United States Patent Application Publication US 2005/0208558 A1 - sequence listing, part 21

SEQ ID NO: 20629 - DNA, 6342 bp, DROSOPHILA
gagaatatcagagatccctggaatggcttcaagttgcatttatccttcttcgaaatagtccaagagaggaaaaagatgcggatcactacctttcagatatccgtgagtatgcatccatggctaattttgagttgggcaatccaaagaaagccgcaagactactgagtcagatccttgaatcgcaaccaacacattccgcccagcaaactcaaaagtatctggagagcagggtgccaggaaagaatgtccaggagacgaaaccctcttggttttccaactatactaggttatgccagggcagaagattgcccgaagagcgaagtggtgatcccttaagatgctacctggatggaaaacgccatgcttacttcaccttggctccacttcaagtggaaccggtacacttggatccggatataaatgtttatcacggaatgctgagctccaaacagattttgtccatcttcgaggaagcggacaaggaggagatggttaggtccgctgtggccggaagtggtggagaaggcaccgtgagggacttgcgggtcagtcagcaaacctggctcgactacaagtccccggtgatgaattccgtaggtcggatcatccagtttgtatctggattcgatatggccggagcggagcatatgcaggtggccaactacggagttggagggcagtacgagccgcatccggattactttgaggtcaatctgccgaagaacttcgaaggagatcgcatctccaccagcatgttttatgtgggttatagttctttatttagttctgaatcttttacaagcttctgatattgtagctttctgatgtggaacaaggaggttatactgtcttcaccaagcttaatgtgttcctgcctcctgtcaaaggagctctggtcatgtggcacaatcttcatcgatccctgcatgtggatgctcgcactttgcatgctggctgtccagttatcgtgggttccaagcggagtaagtacactttcctcttttcataagtatctaaaaactgtatttatcacttcatgttcatattacagttggcaacatctggatgcactcgggataccaggagttccgtcgtccctgcaacctcacctcagatagctacaagtcgctagcctatcgagattaggtgtaatttaatataataaacatttaataaattaatatcttattttaattggcgttgagtgaattttctagtcgaagtccctgtaatgcagtgagatttcctgtcccctttcgagatcacagggccttacattatcctgattgcgttcacgaatccatacattggcaactagtttaatgaattcattataaactgaattagtagcaaggtataaaaagatttacttactccatttgctgccctgaagaacaggacaagcggcgtgtttcgttcgaaaatcctggtctccagagggatgcagattgtaccaaaagagaaggcttcctctttctggagtcaccagcagtggcaaaaagggaaaggcggttcctccaccggcctctacatcagctagctggaaagtattcaattaattattctaaaagattgagaaactgcaataaactcacgtagtaaatgcccgttgccattcggttgccatgtagatctccttcttggtaaatgtggttttcgggaaagctgtcccaatgcggctcatagtgtccaccgatcccatagtttgccacctgcagatcctctgcataatccatattcaaacctgagaagtcacctacatgtcggctaagaagtttcgttgctgcgttcctagagtaattgaaggaggcaccttgactggtgcggaaggcggctgccgtggaacctccatttccacccaaagagtacacagtggatctttttatcctaggcctagctgttttctgaagggagtccgagtctttggagccaataacctgatgcaattgcaccaccagtgggtccaggtggagctcctccaacttaaatggtgcgtagcccaagcgactcttccttaagcgacacctaagatttctttgcttggatggaagtggtgccaactcgcctcgacacacctgctcgtacatacgaaactcccgggactcatggtagtctccaggtcttcgtgctgtcaagtgaagcaacccgttcttgtccccatccgtgattagctcctccagttgctgacgagcctccagaaggtgactcctttggtccggttctatggaaagcacatggttcaccagactcagggcactttcgtgggcacccatctcgcgatgatattccaccactgcctccataaagtctagggatgcggactccgacccgtaggactgttctccgagcaactgcatcgactgctgcagccatggcaccgtgtggttgtaatctcgcagggcatacaggtgctggccaaggacaaaacaatcctgccacgacatggccgtactaaagggttaatatatagtaattacgcgtgttaatagtttattttggcggaaccttatagtagtatgttaaacataagttattagcaatgatgttagattgaccaagtcgttagctttatagcttcctttcccaccctactggtttctctcaaatatcccagtctaaaattcacaacataaaaaaaaaaacttataattgctgctttgtcatcttatgacaacaaattaaaagcgcaaaagcttcaagattttgttgggccatcatttaaacaagcactttgtgcttgtgcatcacaatacagagctatggttcatttaaacaatatataatatggagttttcatatcatggccattgctcacccatatttaacgccattcaggattccactggccagctcagccacatccaattgataagtctgctgaagtcgcgtaagagctatcgccgatcccacaaaatcgtcctgagaaggaaagctcagattctccttaagactcgccatggtatctagatagtctataggaatgtaagttcatatcacatctcacacaatataaatatagatatagatatagaaagcaacccacttgagcgactcgaatccgccgtaacactgccctcgaaggtttcccaatcgctgtgaaggcgttttatcagccggaacgcgttcaccggattgttgaggtagtcatcgattccatcggcggcattcaggtgctccacgcggatggcatcgatctcactgagattataaacaaagtaatcattaatcagactcataactaaaggaatttgcataaattaacttatttgggatggtcaaactaaaacttatacttatacactggcaaaacggaaccggagtttaagtataattaattgggctttttaaagatacaaagatacaaagatacaagataccagatatctctggagtaaataaattgttatacattttaagatttatcttcgcatttttccatattttagaaatattcaaacgttttaaaatgattgctaagtaaccttttaaaaactctttccctggtgttaatgaatttaagcacctgctgattggaaccatttttcagaattaaggtatgaaaaaatatcttaagaataagcagtactgcccagaaatgtattcaagtttagttttatcggtgggttacctgttttgaatatttaacgcatttattttcacgcctgtcgcctgcattgtggctaatttagaagtcattaagttgggagcgtaatcataatgtgaatctaaagcaagacacaactaatttggaaatgttattgtgcagatgattgagtggcagcacttgttctcaataaatctattttatttgggttttgaaaatgagacgccaagcaatgagtaaggcagagaaattaaattttttacagggcctccacattaaaagaccagttttttacggcggctgactcaggtcggtataaatattatactttacaatttgttaacggtttcttattagacggccaggaatccggtttgcaaatgcgcatgataaacaaataacactgtatgttatgcatatccgaggcgatgagtgcaccatattttaaaatccaaaatctgccaagtcgatgacacttatgagtatttctgaacaacaacataaactagcggcaattgtttcttagatatcgatctcgaatggtagcaatcgatttgcccgataatgaaatgcaaatttcaacaagatactgaaagtggtttgccggcgatttgtgctttatatgagccattaattagtataataaccggcgcgaataaatcaagccaagaaataggataaattagcagtccataaaataaatatcacccggcgcatccgaacaaatagcatcgatggttggggagtttaagatctgcaatccggcgacaagtcgctgggttgccattcacttttatggcaaccggtcagtcgttgaggcacaaaatcagcataattgtaataaaactaaccgaagctaactagaatttaatatttcggtaagccatctctcccacacccgactttaattagccaaaatcgaaccagcagcagctagaaatctgcccacccgagtagttcgatgtgcatttttgatttacgtgggcggttgtgtagatgacagctgaaatgaaaaattcacaatcgcctgccggctgacaactgccaattgtttttcagtctaatttttcatctggaaaaatatatgcctggaaaattgatgggctctgccaattaaaagtggcatgtgcgcgaaatgcgtatctcatttgcatctgattaaagctgaccatctggaatcaaagtgtagtaggctcggctagaacctgaaaaactttccattttaatctggccttttaaaagcttctctctggaggagcaatggtcgttagtcttcaaaattcttttaattcagttcattccactctcataaaattaacataattatttgattggaacatcaacacaagtttttgtaaaatgtgcagatatattcatatataattaatttactacaattaattgtaatatcgtaaggaaattgtatatctttacgttttctaatattgtttttctttcaaacattatccttcaaagataggcttaaaattctatcccttttacctctgtagcgcctcagcgtgctggttaatttcattcacataattttgcagctctgccaggaggacgacctccgtttcgaacagctttgccaggcccgaggtggaactgaagaactcgccgtggcaggataatacctgcaggaccaagaaaaggacgcacttggccaaaagcatcgcacttaaccgataaaacgccaccggttttcagaacgcggatcgctttttgcttgttgttccagccgcgaatcgttaggaactgttttcagttggcggcaagaccgacgatctttgaaagatctgatgagaaaaagctcgcggcgtttgtgatcaagcgttttcgagctgcgggtgtcgatcgagcagttccagcgctccaatcgaatggaacggcgtttctggtcaaagaactgcccgcgggggccaggttctgcttgaatggggcccatcaagtgaagtgggttcaataaactgaattgtgtaagtgcgtgtatatagaggcaaaagttatggcagatgttccaggaatcacaactcaatctcatacttttccagccagtctgaatttccacgctaattactttcacttgtctgctcgcagcagttgtcacttcacaggcccgaaaatattcaaatcccccaatgaaactttgtccgtgaacttgtttatgcaaatgaagccggcaaatgaatacgcaactggcttttggctcatctcaaagccagttcgcttcgtttgttttgagtgtttttatagctttgagtgactctgccaaactctactcaaaccccttaacccactgagtctgttcaggccaaaaaagagacacgctggggttaacctgactatcacgatctttatttgattatctcgtactccagcgacacctcgtgatcccggaaaacgtcgcagggtcgggcgaaggtctgggtcacctcgtgtatccaaacgttgccaactgcaaagatcgggtggatgaatgaatcacattaattgtgtatgtcaactcgaggtagctggtggtctcacttcacttatgagtgtattaaatgtgattaacaattagtttggtgtgggcattgctttagttagtgctcgtaaaactgaagttctaattagttagttagttagttagttttagttgtgtagcaactccgtccaggttacttactccacttgctgcccttgagcactggacaaccggcgtgcttggtgcggtagtccttgtccagggagcg

SEQ ID NO: 20630 - DNA, 1883 bp, DROSOPHILA
gaacaacaagcaaaaagcgatccgcgttctgaaaaccggtggcgttttatcggttaagtgcgatgcttttggccaagtgcgtccttttcttggtcctgcaggtattatcctgccacggcgagttcttcagttccacctcgggcctggcaaagctgttcgaaacggaggtcgtcctcctggcagagctgcaaaattatgtgaatgaaattaaccagcacgctgaggcgctacagagtgagatcgatgccatccgcgtggagcacctgaatgccgccgatggaatcgatgactacctcaacaatccggtgaacgcgttccggctgataaaacgccttcacagcgattgggaaaccttcgagggcagtgttacggcggattcgagtcgctcaaactatctagataccatggcgagtcttaaggagaatctgagctttccttctcaggacgattttgtgggatcggcgatagctcttacgcgacttcagcagacttatcaattggatgtggctgagctggccagtggaatcctgaatggcgttaaatatggtacggccatgtcgtggcaggattgttttgtccttggccagcacctgtatgccctgcgagattacaaccacacggtgccatggctgcagcagtcgatgcagttgctcggagaacagtcctacgggtcggagtccgcatccctagactttatggaggcagtggtggaatatcatcgcgagatgggtgcccacgaaagtgccctgagtctggtgaaccatgtgctttccatagaaccggaccaaaggagtcaccttctggaggctcgtcagcaactggaggagctaatcacggatggggacaagaacgggttgcttcacttgacagcacgaagacctggagactaccatgagtcccgggagtttcgtatgtacgagcaggtgtgtcgaggcgagttggcaccacttccatccaagcaaagaaatcttaggtgtcgcttaaggaagagtcgcttgggctacgcaccatttaagttggaggagctccacctggacccactggtggtgcaattgcatcaggttattggctccaaagactcggactcccttcagaaaacagctaggcctaggataaaaagatccactgtgtactctttgggtggaaatggaggttccacggcagccgccttccgcaccagtcaaggtgcctccttcaattactctaggaacgcagcaacgaaacttcttagccgacatgtaggtgacttctcaggtttgaatatggattatgcagaggatctgcaggtggcaaactatgggatcggtggacactatgagccgcattgggacagctttcccgaaaaccacatttaccaagaaggagatctacatggcaaccgaatggcaacgggcatttactacctagctgatgtagaggccggtggaggaaccgcctttccctttttgccactgctggtgactccagaaagaggaagccttctcttttggtacaatctgcatccctctggagaccaggattttcgaacgaaacacgccgcttgtcctgttcttcagggcagcaaatggattgccaatgtatggattcgtgaacgcaatcaggataatgtaaggccctgtgatctcgaaaggggacaggaaatctcactgcattacagggacttcgactagaaaattcactcaacgccaattaaaataagatattaatttattaaatgtttattatattaaattacacctaatctcgataggctagcgacttgtagctatctgaggtgaggttgcagggacgacggaactcctggtatcccgagtgcatccagatgttgccaactgtaatatgaacatgaagtgataaatacagtttttagatacttatgaaaa

SEQ ID NO: 20631 - protein, 535 aa, DROSOPHILA
MLLAKCVLFLVLQVLSCHGEFFSSTSGLAKLFETEVVLLAELQNYVNEINQHAEALQSEIDAIRVEHLNAADGIDDYLNNPVNAFRLIKRLHSDWETFEGSVTADSSRSNYLDTMASLKENLSFPSQDDFVGSAIALTRLQQTYQLDVAELASGILNGVKYGTAMSWQDCFVLGQHLYALRDYNHTVPWLQQSMQLLGEQSYGSESASLDFMEAVVEYHREMGAHESALSLVNHVLSIEPDQRSHLLEARQQLEELITDGDKNGLLHLTARRPGDYHESREFRMYEQVCRGELAPLPSKQRNLRCRLRKSRLGYAPFKLEELHLDPLVVQLHQVIGSKDSDSLQKTARPRIKRSTVYSLGGNGGSTAAAFRTSQGASFNYSRNAATKLLSRHVGDFSGLNMDYAEDLQVANYGIGGHYEPHWDSFPENHIYQEGDLHGNRMATGIYYLADVEAGGGTAFPFLPLLVTPERGSLLFWYNLHPSGDQDFRTKHAACPVLQGSKWIANVWIRERNQDNVRPCDLERGQEISLHYRDFD

SEQ ID NO: 20632 - DNA, 6436 bp, DROSOPHILA
gtggacggcaggagaatccaaaaaatatatcaccatatatattgcgcgaggttttgccgtcaaaaaagaatttctcgcccacttcggtacgcgcgcgttgccggaattgaactgaaattcgcggtcgctttggtaaactgttcactttgttattttttgttcttcattattggccaaactatggaaaagctcgtcgaaggcgttttggtggcacatttcaccaacgcctcgaacatttcaccaatgataaggagacagtccgataacagctggacataacagcggcgctgttagctcggcacgctctgttatctgaagtcgaagtcaattggctgatggattgaaaatcttcgccataaaacgcccccaaattagagcgaacattccagtctttaagatctaaaaaatatatactcaagcaaactattactgtacacttttgcaaaagcacacttaacaattcctttgttctattttgtaatttttgcagcgccttccttccaaacgcgctttttcatatgcaaatgctctcatggcgtatacgcaatgtcaccatgcacattgtttgccagctcacgcatttcggctaaaacagcagcagtttttcccattttccgcactcgccaccccaggcccccttatgagcatttagatccactgaaattaatagcattttcaacgcggtcgcagctgagcgatgtttgcaattgtttgcccaacttttagtgggagctgtggtggtggaacatcatgtgcggaaatggttttcaagtgtgcttaaatgctttctgcgttgtcctagttatgagtgagtggacaattattttaattatgatttcatgtggactgacaaaccgaaacaatcgagatactctatggtttttggacacaatttcggacaccatttgaaagtatggtgtttcatatgagataataatataacagcaccataaaagcccggtcgaaatattacaaagccacttacaattgaatacgatatgctttcaaactggattttatttataagctttcttatttctcctttgctgattccatgtattgtttgctatcaagtgcttaaggctgacaatgggttaaagctttacagagcaatgcaagtgcgggtgtatgtgtgtggggtgtgcgcgtgtgtcagtagctctacgcagacataagttttcactgtgtgtgtatttttgttttggacattcgcattcattattacaaaacgagaatagctaacatttatcaattacttagaactacataagctgtgcatgtgttgcaagtgccaccggctggcatcagttgcatccttccgcggattcggttgcatctccacctccagctgcctcatctacttggcgttgccgtcgtcgtcgatcgccttgaagatgattccgtagacatggtccaccagcttggcccacgtggccgcttgactctcgtccagactgcaggcagctgtcagcacatccaggataactcctttcagttgctaaaaaaaataaaatgatgttttaaatgcaattgaatttttaaatgtcatatagctttcaacttccactatctcaccaacaggtatctcaaagtcgagagctcgactgcagtgttcaacttacgttgtaagactccttggaaacggtccgcggaatgtgactaacggcaattttggtccagatctcgtccagcttctccagatcgccatcctggcccaggacctggatggactcgtcaaagacccttatgattctgccggcatgtgctcggaagcgagcatttccctgaaagaaaacagatcaagttaatcttgagttaattgaagacctatgtgtaaggtacaactcacacttagctcctccaaaggaacatcgcggaaggggaacttctccaagttggacggaaagcggttgaaaaactgcgtcagtatcgccgctccagaatctgttggtgttgccacggggatttcccaggtcttcttgatcagttgcacctcatcgctgttcatgtttatgctccgttttggttcttctcagctttcactctatagctctctataagcgttcggccctctcttaatggcttttaggctgaaagtgagtgagggagaaaatggaattaagtccatttacttcggtctctttttggcgctctaattgaaattgacagttttacaatgcaactcaacgagcccggcacaagcaaaatcaaaatcaaaacaacaaacagtgccttagataaataagcgcacagcacgtgctaaaagtcaatgccttcgccgccaaacaacagaagcaaaataacatcattatcatcattgtatccgagctcaaattaacgtctgtcagttaagccgcagcaaaaagcccagcaaacctaccttcccacacctcaaccctcattctatacaattttcaacatacccttgtttttagagatggtaacgtgataataaaaagctgatgatattaattataatttgtacaaatttaaattgatatctgtatgaaatatgattaaaacttaatgtagagctgagtattttcaagatcttttctattggtttaaagtccctaaagtttagtcctttgtctgcataccattattaaagttgcacatgatatggtgaaatttctttatcttttatgttaataacttgtttccttaaccgcatatctgtttatataatagttgcccatctccagtctgcttggcctgctctcgagttcattagctgaccctacccccgccctcgaccagcaccgagttgacccccaatccaccgagctttgtggctggctctcggctgcgaaaattatcataccccctgtgttccacggagagctgaggaaaatgagaaagctattgcgaatgggagattgcgggagaattctctgggcgaaaggcggaaatgtaaacagcaagagctcacagaaattgcgatataatatgcagaccacaataaaaatggcgagacatcaaatcaaatggaattccacaaaaaaattaaatatttttcgaattgctaaacgaattaagtgagaggaaaaaaaatttccatgcaaaccgcacatgaaaaataaataattagaaaagcactacaaaattctcatgtaaacaacggaatttgatgaacaataaataaagtatttagagttcttttcttgacttttccactttatccgaatgacaaaaactttttaccacagggaaaagcagcaaaaacagcagtcaagccaaaggaaagttatgtctaaaaagtaaatacaaaatacaaaactttattaaaaatgcacaaagtgacagacagacaaacggaatagacatggtaacaggggaaataggaaaagggaaagagaaaaggaaaataaaacagggaaatcgactcaagtgcagccgcagcaggtggccgccatgttattgttgctttttgctggaaaatgtgggtgcgatgtggcaggaggtaggtgggtggtgggtggtgggtggttgccggcgcaggcagtgcagattccactataaaaaatttgccatctctcagtaaccttgtctacaagacccctttggggagcaaaccaacaccaacaccagcaccaacacactacatatgccaggatgtgcgcgtctgtgtacgttctataatatccttcatgccaaaatggcctgtggcttttgcggttcaagtctgtgcctgtaagtgtataagtgctggccactgctgtgcgagtgtatgtgtgtgtagtcgcgcgagcttgtgagtgtgagtgtctgctgcagtcaagagtgaaaaaaggcagcaacaaatcaagcgttaccttgtggttcagcactcggagaaaatttatcctccataagattagttttcattctcaaaaacatattctttcaatcgttttcatggaagttcaaacgttgattggtgatttaacggtgattggtgttaagcccttcttttaacacttagcttgatcgaattaagtaattaatttttctctgtgttatctgccattgagagtgcgagtgtgagagtgttgccagtaaggacattgagcgcttaattaaattaaggcaagcttgatggacagctactagacagtcagccgtgtgcagcagctcctgggggcgttgggcggtgggtggagggcggatcaggtggaacagatggggtaggcgtggcaggcaggcaggcaggctggctggcaggtcaggtgttggcaaagtgcctcctacaggaggactgtgtttgtgcgagtgtacgtgaatatttgttttgtgatgctgccactcaagtgtcgctatggatttggttgcaattctgttcctgtctctttttttccccggcatgtgaatttattttatagaactcaaaaacaacattctgtcgtttggcaagtgccagatgtgaagtgttgtgaactctcgaaacacgagctggtttttttttacaattttaaaacaatttcaaaggactttcaaagtatggggcttgaagaaagaatatttggataaattggtttctggcaaatatcagactccataaaatgtttctgggttttaataaccaaagccgtgttcaaattaattattttttatgggtcttataaataagtaaatcatttaattttaattttaaagacgcatgtatgggtaagtactatggataagaactgtgtatttgataacaatgacgaagctttagtaatcggataataaaaagagggtaaacaaatgtaaattacgatgattgctacatatgatgctttcgctgatttaattaaatgaattcccaactcttttgagcctctgaaattgtctcttaaagccacaatgcctgacttaaacacacacagccacttaaaacacacagatgcacactcatgtcctcatcacgggcattaaggataatgactgccacaacaacagaaacaacaaatggtaatcacaaaaaaacaacaataacaatctggttctgccagaggcgacacttgttttgcaaggacaccacagaaatccataaattccaagcccgctgctttgcggctcttttatttcttatggctctgaaatgcaggaattcaacgaacccgaaaaatccgagatttaaatatccaatgtaggaaacacacagaatgggcgtttaatcagctgttggttgcctgcctgttgagcgccgtcgatggggaagatagcgcgtatttacagttccgttagtcgtgcgctcttattcaccgaattctttcataattctgcaaggctttcactatggtataaatttctcctaccaacgtattattttcacatatatatttcccggatttcccagttttgattactacttttttaattggcgcacttgattggtttttgtgccgtggaaaaccaaataccggaccgttcagtgcgaactttcggggctacaaagaaccgcacactttgcgttcaggttgaaaactgagcgcgggcaaattgtggggccttttatgggagcgaactcaccagattcgcactctctgccggcaaagattcgctagagagagcccgccaaaaccaaaacgctgtggagcaaaagctgcccatgcaggagagtgagagtttggacagaggcgtagttcaacgggggctttgaggtgtgtcatttgcccaaaacaattgatattccgatcaggcgtagagcccacttatggacactcccccgatttgctgtcacatttcataacaaattcaaaatgggacgacacctgtcgaaccaacacgcccaaatcaaacattttccagtgacacctgtggaccttccgacgttttaaaggagcgtagtcaaagtgctggccccaaaacaaagctatctcttaaaagcttgggcttagaacaggaaaagcttacttaaccgttgggcagtggctttcttcaaatgcgcaatgtaatctaagctttaggagctataaacaaatatttgttgtcgtgatgtctaagctatcttcaaatataattatgtaattaatccagcaaaacaaatgaaagcacattttgtattagaaatgaaaaaattcaaagatttttaaaactagttaggtcgactcttaatatttcgatgtttaagattcgcaatatgacaaatcttttcaaacactccattcagttgttttgtttatttgtttattctttacttcaacaataatcttctatttgttcttatcaatatatcacatgcacaagtgaaagatttagccttatcgtggcgctgtactatttttataaatgtttattcactatcactaccttaataagcctccatcagtaattttcaataaaccaagtggcggacaaacaaacaagcactgccaatttatacccaacaaaatgcgttgcattcaaatatcacaccgcacacggattgtttattttgctactatatgaacgggaattgtaagcaacgtcg

SEQ ID NO: 20633 - DNA, 1055 bp, DROSOPHILA
caaagtgtgcggttctttgtagccccgaaagttcgcactgaacggtccggtatttggttttccacggcacaaaaaccaatcaagtgcgccaattaaaaaagtagtaatcaaaactgggaaatccgggaaatatatatgtgaaaataatacgttgcctaaaagccattaagagagggccgaacgcttatagagagctatagagtgaaagctgagaagaaccaaaacggagcataaacatgaacagcgatgaggtgcaactgatcaagaagacctgggaaatccccgtggcaacaccaacagattctggagcggcgatactgacgcagtttttcaaccgctttccgtccaacttggagaagttccccttccgcgatgttcctttggaggagctaagtggaaatgctcgcttccgagcacatgccggcagaatcataagggtctttgacgagtccatccaggtcctgggccaggatggcgatctggagaagctggacgagatctggaccaaaattgccgttagtcacattccgcggaccgtttccaaggagtcttacaaccaactgaaaggagttatcctggatgtgctgacagctgcctgcagtctggacgagagtcaagcggccacgtgggccaagctggtggaccatgtctacggaatcatcttcaaggcgatcgacgacgacggcaacgccaagtagatgaggcagctggaggtggagatgcaaccgaatccgcggaaggatgcaactgatgccagccggtggcacttgcaacacatgcacagcttatgtagttctaagtaattgataaatgttagctattctcgttttgtaataatgaatgcgaatgtccaaaacaaaaatacacacacagtgaaaacttatgtctgcgtagagctactgacacacgcgcacaccccacacacatacacccgcacttgcattgctctgtaaagctttaacccattgtcagccttaagcacttgatagcaaacaatacatggaatcagcaaaggagaaataagaaagcttataaataaaatccagtttgaaagc

SEQ ID NO: 20634 - protein, 153 aa, DROSOPHILA
MNSDEVQLIKKTWEIPVATPTDSGAAILTQFFNRFPSNLEKFPFRDVPLEELSGNARFRAHAGRIIRVFDESIQVLGQDGDLEKLDEIWTKIAVSHIPRTVSKESYNQLKGVILDVLTAACSLDESQAATWAKLVDHVYGIIFKAIDDDGNAK

SEQ ID NO: 20635 - DNA, 2351 bp, DROSOPHILA
tattgcttacaatgccagctatcgatagtaacgatagtagtgtcacagttaactgtttcatggctggcttcgtgcacagctcaccgagactatcgataaatatcgcatctgtgtggctgcacaccgaattcgtaatacaccaaataccggtaccgtactcgatggcattatttaggaactttcccatcgccgcggcaagactgaaatcgactggcctttagatgctctttggcggtgggcgccgcttgacttgccagactctccaggccgagtgtgtgtgtgtgtagtggttgtgctagcagagctgttgcagaaactaactgggaaaacacaagatagacgcgtgtgcggcgagcagtagctaaattgaactgaagtgaacagaaaatatttacacaaaataatagagatacaacttcggaaaagcaagcatacaacacaccgggactccgcaatacgggttttttatttcgtctactcttccgtacctgggcagagatttagatttatcgcctcctccacccactacttcatcatcgacatcaccagtgctgttgttgttgctgtcgttccgccttcgctctcacgtaatccgcccccgcaccacctcgcccgtcggccaaccggcccacaaactaactgactgatagaccaaaaatcgattagcggactctcttcctcttcaacatcttcggcattcgtgtgtgcgttgctttgcgttacgttacggttaccgttacgtcgcccgcgcgtgtgtgttggtgtgtgagcaaggtgtggtgtgtatagaaaatcgattggcaatttgaaccgaagagcgctatcgtcgccgcagtcgccgcgtgtgtgccgttacgcgattttcaacagcagccgcgcagtaatattgcttttatttttttgcctgtgagtcctcctaagtgagtgcgaaagagagagagcgagagtgagctctctaaaacctctgcagaaaataaaaaggaaaagaaaaacaccggacatggataaatcagcggccacgaactcggccactgccgatggccaaaacgaggcagcagcagcagccgccgccgcagcaacagcagctgggtgtggcagcaacaacagcagcagcaccagcagcagcaacaacactgcaaacagcaataatgcactgcagcgtttggcaacaacaacaagtgccgttgtggcatccccgatgacgatcaacctgaacatcagcaccaccaccggcggcaatttcggcgtcagcgtcgagccgcacatcagtgtcgagagtctgaagaagatcatcgccaagaagctgaaggtggccaaggatcgcatctgtctgctgcaccgggaaaagtgagtacccctttagtatttttttttaatttacgttacatttaaaagaaacttggcttgaactgtaattttttggcagtcaagttttttgttgtttgttactaatttaaaaattaataacagttaatatggcttagatcgccaatttttatgttatttatctgaacattttctttttgtttaattgacgagactaatgttgaatgttaaatattacttattaatctatgcattatatttgttacataaaaaggattgttaaggtttaataagcctgtgtttggacaagtgtgtcatttgcatattgcccagaatatcttatgattgtgccaatgaggtaatatcaataaaccagaaataactgataatgcaaaatgtttcgcaaagaatattatcttgaaagtcaggtgaaaagttaagtgtgatatcttttatagaaaaattcttgaggagtgaataagtcctgttctaattaatccttgcgttaagaaaatcgtatggcttcggtgaaacgccttgtatgttgagagttttcttttttatatttttattggatatcctctttttttcgagctttgtttggttaaaatgcttttgattatcttctttcaccgctccacccccctccacagagctccttctctaacccctttgttgagctttgttagagggagagatatagagagagagcgagagaggtgtgcgtgtctgtgtgtgagcgtgttttttagtcgctaagctgccattgtttagttgatttgcttgctgttctcgttattattatgattattattgatataacctccaaaataatggcatgtttgaagggttaagcacaaagagcttgagtgtggtggagtccttgtgtggaagggggggggggggtgtaccaattgatctaatcacacacatacacacgtacacacatgtacacttagtctgaaagcgatttcataatctatttgttattatacaaaacaacgcaaaataaaagtagctaaatg

SEQ ID NO: 20636 - DNA, 351 bp, DROSOPHILA
atggataaatcagcggccacgaactcggccactgccgatggccaaaacgaggcagcagcagcagccgccgccgcagcaacagcagctgggtgtggcagcaacaacagcagcagcaccagcagcagcaacaacactgcaaacagcaataatgcactgcagcgtttggcaacaacaacaagtgccgttgtggcatccccgatgacgatcaacctgaacatcagcaccaccaccggcggcaatttcggcgtcagcgtcgagccgcacatcagtgtcgagagtctgaagaagatcatcgccaagaagctgaaggtggccaaggatcgcatctgtctgctgcaccgggaaaagtga

SEQ ID NO: 20637 - protein, 116 aa, DROSOPHILA
MDKSAATNSATADGQNEAAAAAAAAATAAGCGSNNSSSTSSSNNTANSNNALQRLATTTSAVVASPMTINLNISTTTGGNFGVSVEPHISVESLKKIIAKKLKVAKDRICLLHREK

SEQ ID NO: 20638 - DNA, 17949 bp, DROSOPHILA
tttgcgagtcacttgttttgttagacacattcgtcttcctgaactgtcaaccgagctgtcatatggatgagacagaatggagaatagagagaaagagagccatgctaatctgtcaactctgagttcgttaattaaagactgatttggcaaataattgtggcttagccctgatcgaccccaataccaatttacaagctcaaaacattgcaaaaactcaaaggtaccccgattgggtcaatgaatgtgcggtctattgaacttttgatagtattattgacgcccctttttcacttaatgattgcgaattgagttcagccgtcggaaaatactttcaaggttatcttacagggatcataaatataatatccaaatttatagttaaaaactaagtggaaaagatgtggccaaatataaatccctctgtctaagtgcacatttttcttgtttaatatattcaaattttccctttcttttatcacttctgtcactccacttaattcaatggcccttctcagtttcaatctgtcaacttcctattatttccaccttatctgtttgaggtttgtctttctaacacttccgcctacgaaaatcgtttatttttggtgtggatttcttttcgtttcaatcgcgacgaggctcaaatacgaactaaactgaaatgaattcaatgaatttgaagagcctatcggacacgagaacattttccaatggatagcgtttccagccggagaagaatacaagaacaaaagtgattgcgataaagcttggactgagctgagcagagcccaagtgaaatgagacgaaatgaggggcttaagccaaacaaatacaccccttaaaagcgtaaattgtgaaatggggcagatgtttgggggaaaaaaccaagaatgaaaaggtttgaacgatgaacctcgagctattttaaaaccacacccaaatatttaatacatatcaatcaagttctatgatgttatgacaaaaaatggtttgagaaactctattttgttttaagaggctccaaaagatttttatgtttctaattccatggaaatacgtatattttctttgcataaatcattgtacttacaaagaattcatcttcgatgacgggatcggccagcatctcaatggcctccgtcatggatctgcaggtgcgattcgtgttcttcttcttcttgagcttccggcccaaggtggcggcatcgctgaagcgatgaagcagtttgtccctcttccggaccgccagcggactggtcgtcgaactggcgtgacataacagcgatccgtagccattcgtagaggatatggtgccagtattagcgtagaaattctgcggttgatattgcgccggagcagtgagtgtgctgttcgagtcgattttctgtatgagattgtactcggattggggatatttgctggccaaatgcgatacagaatccgctttggaacccaattgcggcttgggtggcggcggtggcggtggatccttcatcaaggccacccgacggggggcggcgcggggtatggtggccgaatggggggaggaggtggcgtcaccgccataactaacagcgcgacgattgcgatcgttttccttttccctgaaaggaaatttaaatttaatttattagaattttcaatgtatgttttacttgataataatagaactaaatatgttttaagtactaaacacaatgtaaatctacctataacgcctcctctgcatcggtggactaaagaagaagttgggcgacaggggtacaaagtaaccccattggggatctcgattcggtccctcatgatacatgcccaactggggcgtcatctccctggatcgactggatctgagaatgggcatggaaaccctctgtggtccgaaacttctattagagcgataccgattcctatacatatgacgctccagtgaagatgtggtggtcgtagcatccgattccagggtgcaatccgaatgatccttgttctccagggtcacattactgcccagctcatcgtcattatcatcatcatcatccgtggaacactcgggcaccgtatagcaggcatagtcgaattgcgacattgtagaatcgtttttcttatgtctttatttgtttggcttttcgtttgcacacacatttagttctttgtcattgtgtctttgcgactcccacgtaaaatgtttcaattatttaattagtctgcaacttgttgctgttttttatttgagtgctttacttttatttttacctgacaaatgttaaatgacattttcagttggtctggcacttaattgctccactagagtttggtcatgtcttggatattttctggtggcaaaagaacattatttaaggcatttatcatgttcaccctctggacaattgtgcttcccgccagaaaaaaatttcaggggttgtgtatgtccagtgggcacaattaaaagtcgttttcggcctctgttgaaaagttcgcctaatgaggtgttgaacggaagacgttctagttatgatacttaacttggccacgactttttacagacaatttactacggtccgaaacacaaaagaaatcagtgggaaagctaaaagggcatttaaccgaaagtatttcataattgttaagtaaaatgttcttttaggaatcttattgttaatttactatatctgtatgtatgcacgaaaggcaaatttaactttgcggcctggctagctagtaaatttgcagactaaacgttcattattcattaatggggtgaaaaaggaaagtgtcaacagtgaaatccatcaacattgcaattaaaatgtcaaacaaggaagtgactgagtggcagactcccgtttaacccgcacttcctatataccaaaccaaccccccactaaaaaacgaactccacattatacagaaactctctataaagaggctccatccatccataatgatgatgcaaaaagtgatccccgaggggaaaatgtgtaactggagagtccaattgcagaattcacagacaacgacactccggatatgaagattacaacggatttgggttgccactcccgctgttgtttatatttattttattgttgcaattattttcctctttacagcatagaattgcatattaaacgtgattaatgacaaacgagagaaatgggggaaaacagccggatggataggcgcgtagtataaaatgatgtataatttttgattgcgcaaaggaaaattagcatatgaggcgcctgtgtttatggaaatggtgaaatcagtcagaaaaaggggagcaaatcatttgcatggctggtcgccaattctaaaaaatgtttcaaattatttatagataattgttgaaagcaattatccttattatttcattttttattatttatatttatttctgttactttttatttcaatatttaaatatttttcattgcttatttgtttatggcgagtccattgtccacactgctcactgatttgctcgcgtaaatcattctaaaaatactttgattgggtcagcgaatttcccagtaattttcaaaacatatcccaatttttctgtactatatcatttacaattgttaataacgaaacacgagcgcacacacgaaaatgttcttagatataaactaagatagaaaagttcaaataaaacgtgatttttcttttcgaatagaacttttcacttcacgccgcggctgttcaaagtaaatgtgctgaccgccggcaatttccgaactgatttcgaatagagccacggaaatctcgtagccgccgtggggcatccaccaacaaatacaaccctctcggacggaaacatgcgcgacagactcgaaaatcgtcgaaaacactgagaaaattgggagagtgagttatttgtgctgcggcagtggagaagggggtggggggaagacgtcaagcggaagagagtgcgccaaataagaacaaacattctgtttgactaaattgctcaatatcgggggaccaaaataaaagcatcaacgaagagcgtcggacaaagggaaaagaaacaaatcagaggaaaatattagcttgtataaaagaataaagactgcgaaataccctttcatatttaatgtaaaaaaaaaaatataaagaaaattgattttataaaaatcgaatgacacaaaacaacaccttaaaatcccatgttagtatgtacataataatatataccattttcatattaaaactataaatataaacaagaaatatggtaggttatctttataccataatatttttgtttttagcaaattttctcaaatttaactgttgtggcaaccaagttttggtccgagtatatatactttttggaagggtattacaagaaccgaaacattctctgtggagacaattccctggataacgaggtgcacacccaaagtttccatatgcccgtgggtcttcgtgtgtgaaatgtcatgcaaaataaatgtcagccgcttaaaaattagtccctctctctttctatcctttgctttctgcagcttgtcttaaattgccatgactcttcagaaaaaatttatagaaaaaccaaaaaaaaaaaaacaaagtaaactgtttctgttgttattggtgttattaaaaataaacacagatgaagtggtggtgtcttgcttgggtgccccaccaagaaaacgcaacattttcacttgtcacgcatttattttcccattttccatgtccgaaaatgtgtgtcatttgggccaagacgacgtctgcggcttttattgacatctgcctttgtctgctcacttttcttgcaattggtgagattaatgaaaggaaagggcgcagtgcacccggttcgattgaaagttctatcaattacacttgttaattaaagttgggtgtggattagcccgcatttcgagtatttctcccctggaggggtgtgagtgtgtgtgtgtgcggcggtgttttgataacaattgcatgaccgccgcacaaatgcaattaaatcagttctaaaacgggcgtgctggctacgagtacatggaacttaaatccaattgcccgagagcgttaaattaacaatgcaggcagcaaatggaaccaaatggaatggcatcgatcgaccattctgtccatatatatacatagtacatatatatatatatatatgtatatagtgacgtatttgggtggtccaaaccagccacttccattatttcaaagaaatcagtaatgcactctagtaattttccataacgtatcccagctgcgcagcattcgtttatctttggcagcgcagcccgttcttgtaaacatcctaaagcctgacctaagcagatttgactgccctctttcaacgctacctaatctaagaacccaagagcgaggctctcccgaaatacaaatattgttcaaatactgaggcttctcctcaatccaatttgcatttgatttttagtcttaagctgagatccaaagaataaagtcgtgaaactatttctcctaaaaactattttttatttcttggcgttgtccttagtcaactgacgggacattagttcgactcataaataaaacaacaattttactggcgcagtcggtaggatacaaaagtatccgaaaaaaaagaaccttcgagtggaaaataagttaaattttatagtccagtgctcgaaacatctcccaaaataaattcgtgaaaactcttcaacttggattataattccaattcggttatccaataataagtggaagtgaaatacgaaacaaaaatattaagtccaaaggcaactaagttttaaaaccaacatataaaaataaaaaattaaaacaatatagaattttaataatacaacacaaaaatttacaaaacaaaaaaaacaaacaagtgaaactagaaagcttaaaaataataataacattgaatccgaaacaaaacaaaaaaataaaacacaaaagttaaaaattttacaataaaaatgtcacaaccaattattgcgctgagcgacataaaccttgccgaagcccgtcggcagcttaaagacattatgccattcaaggggtgatccagaaacccttcacacctttatcagcagagtggattacgtaatttcgctctaccaaacaaatgatgtccgacaacagaggattctactggggagccatcgaaaggaacttggacggacaaattacacgatctttgggacttccgaacatcgaagattggcctacccttaaagcaagactcatcgcggaatttaaaattcaaacaccaaattacaaacttctggagaacttcagggagacaccatacagaggaagcctaagagcattctgcgaagaagcggagagacgacgtcaattactaatttcgaaactacacctggaaggtaaccaatcggattttcttatttatattcagggtattaaagaatctattaagatactgataaggaaactaccaatacaattattcactattttagcccatcacgatattacagacttaagatccttaattaccattgcacaaaatgagggaatttatgaagaacacattaattttgaattttatgaaaaaccagaatattcgtaataaaaattcaaattctaaccagaattcgaaaacacaaaaattcaatacaaatgttcaaactcaaaatcgaccaagttactcacaatattcccaacccttccaacctaattttaatcaatacattcaaccatttagacctagctatacacagcagataactaacaacccacccatgtggcacgcacctaattatttcagacccaaccaatacataaacccacaacccattattcaaaaaaatcatttccaacaatatcccaacaaagcccaatttccccaaacaacgcattttagaggaaatacataccctcgactacaacaaccctctacatataaaaatactaacttcccgattactaaacgactaagaccatcggacagtgaacaaactaaaatgtctattgacgaaattagattccaagacgcgcatgaattcgaacaagtccaacctaattattacgagcaacagtattttaaccaaaatcaatacaatccgtatcaaaatcatagcttcattaatggaagggcaacaacaagtccaatctgttacaaattaataacaaacaaaaccaaaataattctgaactaaacgaaaattttcggttaacagccccggaaaataccgaatacataaaaatagtttacaaagggcgctcatacaaatgccttctagacacaggatcaacaattaatatgatcaatgaaaatatattttgtcttcccattcaaaatagtagatgtggaagttttaacatcaaatggccctattaccttgaacgacttgattatgttacccagaaatagtattttcaaaaaaaccgaaccattttatgtgcacagattttctaataattacgatatgctaattggcagaaaattgttgaaaaatgctcaatcagttattaattacaaaaatgatacagttaccctttttgatcaaacatacaaattaattacttcagaatccgaaagaaaccaaaatttgtatatgcaaaggacaccagaatcaattgcaagctcagatcaggaatcaataaaaaaattagatttttcacagtttcgattagatcacctaaatcaggaggaaacttttaagttaaaaggcttgttaaataaatttagaaatcttgaatataaggagggagagaaattaacatttacaaatacaattaaacactgtactaaaaacatccacttggattaactacaatgataaccaagtattaatcatatcccacatacccatttacctttcactaataagcccaattaaaataattccttacccagactccaacggctatcagctagattacacagacacacaatcatattttgaaaaagaaaataagagtttataataccgaaaataaagaagtaaaaaatgaatgtgtcaccaatattattaaacacttaaatccaatttgtaattttaagccagtacacacgaaccgaaataataaaatacatagaaccaaacacaattgtaacctggaacttaacccaaacaattcttaaccaaaattgccaaaattcaattaataaaataaaaatagaaggaaacaaaatgataagagtaacgcaatgcaaaatagaaatcaataatataattttaagtgaaaatctgttagaaccagaaatagatttgacaccactatacacaccaccttaatataacaaaaataaaaattgtaaaacacaaccgacattgttgagatgatttcagagaacaatattacactttacatacaaatgatcattgtaataatcgcactaattttgttgtactcatatttaagatatgtatcatttaaaccatttatgatgctgtatgcaaaacttaaaataagaaaaaatcaaaatcaaaacacaccacaacaaacagaaatagaagaaactccatttcccacactatatccatcaatcccagcccaagtataggcttctctttaagggaagggggagtgacgtttttgggtggtccaaaccagccacttccaattatttcaaagaaatcagtaatgcactctagtaattttccataacgtatcccagctgcgcagcattcgtttatctttggcagcgcagccgttcttgtaaacatcctaaagcctgacctaagcagatttgactgccctctttcaacgctacctaatcttaagaacccaagagcgaggctctcccgaaatacaaatattgttcaaatactgaggcttctcctcaatccaatttgcatttgatttttagtcttaagctgagatccaaagaataaagtcgtgaaactatttctcctaaaaactattttttatttcttggcgttgtccttagtcaactgacgggacattagttcgactcataaataaaacaacaattttactatatatattattttataaatgtgcatgtgggttgcgaacggcgcagaattaattaaagcactgcaggaggggcgaaaaaagtagatctttaagataacagagcgggaattcgcgctataaataaatgcagccaaagagagttgcataaatcagagatatatatttttgggactatagcttagataaatgtgtgactaaggaatgcggcaactaaatatttgtaaataaaataaatttatttctattgcatggtaaataatatttacatcttgtttctcatgtccattattatagaaatgatttatcacaaatttcgaattgttttacaaagcttagtgcattaaaatgttaatgttgtccccttctaatcagagtggtttgaaaccacttgacatcgtttacctttctcgaccccaaccaaaaccaacttaagtcggccgggaattttaaaatgtgtataatcgattcgattagtgtcacccggggattaattgaattaaactgcatgtcgcggccgcagacgttgcactatgaaagctatgttaagtgtaattacaatgcacaagatgtcaaatgattttaacctcttggcacaaaaaaaatggaaaaacaaagagagaggcagcagccattttcagggagcttcaagacaaagaaaaatgttaaaaaaaaatatatgaccaagacacggatagtgcgattaagtagcgctgacagttcatatgatagatactggcacgtggtcttaatttaatttctgaccgagaaaaatgataattaattatgaaaatgtagtggacatttgtaatgtggagtacgtatgagtgtgcaaacaggtttctttacaagagacaagcctgaaatatatatatatatatatagaactggttctgttcaagagaaaagtttatattctttttgatccaaggaagtgttgtaatttccattagtacaaacatattcccaagatttatagcctataactcatcgccaacataaatcataagtcagttccgatatcttgccttgggaataatgtttcacagctatgccacaagctctaaatgatttccaactttaaaatagcttcggtaaaatgtagacgaaaggtggagcaacacaaacattgccctgcatttgtcgctataaataacagccacagccaaaataataatcaacgaaaacaaatatacacataaaacttggcaacccttttagccagctgctgtgtgagaaaataatttaggagacaatgaggcatccattcgacggcaacgtagaaataaacattgcagttggccaacacgagccaaaaaaaaaaattaccgccaatgaatttgatttttctttgacgcatttaattgcaggtcataaatcagggggcaagacagcttaactggtttcgtttttgccaaatgcaaatgcaaagcgcgtcaaaataagctagtaaattgaaatgaaaactcattatgggaaattggttactctattacagttccaacctttttatgaaatcctatccataaagaaatatctcgttaaatgctggtatcgatttcacataatgagttaaatatgtatgggtcatgtctgcaggggtccacccactttaaacggcttttcgatgaaaggtctacgtcgaagtggaagacctcccgttgaggacctgtagatctgaagatctggttccggtttaactgtaacggaccgccttaattcccatgatatgtgaaaaatttactgaataattatggtaggcgtgtgaaaatcataaacgcaatttggcttacttatgcagtaaattgagcggaaattatggcgattaaattgcacctaaagtggtatgtatgcaaagtatgagaaataattcattttttaattagcctttaaacttatttaaaaagcatttatacttgcttatggtacaaacacttaaagaattcatcaaaaacacaattactcgaaagacgtaacttttgctttggctaatcataatttaagcccattaaggccaatgcgaaaatccaaggttattttttattattatttctaaactgcagccacagtcaaactcgtaagtcaaaacaagtttttaaagtgtttttggtgtatgcataaattttcatacatcactttggttatttattttcaaattttgtttgggattaacacatcacctaaacgcttttgagcaaccagaaccaggcagaatcaaaaataacaggtaggtttaaacttttggacgggaaccaaaaaagcagctacaacaacgctgaaaggtgttgaaaacattggtcacgcaaagccttcaaagtgattgacacatgttcgattcctgtacgaaataatgaccccacccaaaaaataaaaaattaaaaaacagacaaaaaatcacgaaaatttgctgaaaatttaagcaaattatagccccaaacaaaacatgaaactaaatcaaagcacacacacaaaaaggttgcactaatttgcttcgggccaatttgcaactacaattggctcggattttggggtgtagttgccaaattgcaattggccaaaaggattgattgagtcataaattggaagagaagcaatcaatttcatttcttcgatatcacgaactcagccagcggccaatgctattgatgcaaaaccagtggccagtgaatttggtctattattatcatttgtatccattagcctcgagtgtaatccttttaccattcagctctatttctctgtcgaaagttaataaatctttgcacaattaaccgtatagagccacagccaagacatcaattagagaacgcaagtcgagctgcacaaaagctaaaactaaatcatgaacagctgccggagactgggtttcttttctttcatttcggacttggtcagaaaaaaaaaagaaagggagttggcccaaaggcgggggatcgggatcgggatccacagagccatctgcgacgcgtgttgccaatttatctttgagcgagtgacccagctggggatttgctcgagcatgactcattcactggggataagagataatcctgtttttctccttgtccaagtcggacttccagtcgaccgaaggcggagtacgctgctctaatggaggctggcaatgtttgtccaccacttaaaactggggaacaaactttagctcgggatggaaaaaagagttccaagaacactttaaaaaataacccaagaacattatacttttatttattttaatctcgaatatgttaaaaatagttgatatctatatcatatgcacaggatctaatatatttggatttaagtaaactgtatatttcagtaccatgttagctactatgttgtcccatccattgtgcctattataacccggatcaacattcaatatgcctagtgctattcagccataaaaaagaccctcacttggccataataaacccatgtgcagtagtcaattgttgacgggtgcaaggcatacaaatttcgccataactcacatggctcacgggagacgattttgtttacggcctggcttgcctgcctgttagcccggctttgtttataaactggttcaaaatttgcacgtctttggcatataaattcaagaaaataaccgaatctgcagcaaagaaaaggctgccacgccaacttgtttatctgtcgttttcagctggctgaaagctgactggccaagacaccaagtccgtctgcaagtcctgcctgtgcccccatcgtattcctctaacatatccctcgtataccccattcccctaaaatccccccgcgtttcggatgattgtcagagcaacgccaacagctgctgtcgtgcaagtttgtttccatctcgtggagcccgccgagtgttcataaaaccccttgaaagtctgacttaaagctggagttgaagttgaacgatgatcgctgcttgcatgctaagaccagtgttatatggccaaacagtttatagttatgttttattgttgtctgacaaagcagggggcaaactgtgttagatttcatgacgctcacgttggctagcttctttttcttattattcttctctatgccaatgctaatttcccatatggccaacgttttctgaattttaacttttactttactcggttctactcgcagtggcgcctgacgtggccctaacggtaatgtcagaaacttccttctccggtaaaagtacaaaattttgactgggcaattgcagttcgtttctctgactcagctgcaatctgcataatcaacagttttgaaaaaggcgacgaacaatttaggtgccaagaaaactgaaacttttaacagctcgccgcccagagttattaatttaataaaatgtgcagggtggtggaaggtatatatgctaagatacaatgttttaataaacgtaaataaaactcatgataaatcatttcttactttcatattcaaggtctatgtgaacctgccaaattgggtctagaaggtgattacaagactctcattagaattgtaataacgtacaccattacaatcttaatgtaatgaatagcaaccatttttggttaaccatttcctcgtatatacatttcgttttccattagcaagttgagaaacataactccgacaccgccaaaaaaggcagcaacgcggtctccacctcttaatttacttgtctctctttcggtttttgcatttcaacttggccaaggctcgtgccatgtgcccccgcaggccataaacgtatttttattcatatttttttctcttttattgttgtgaaagcgttttgcagcgaggtgtgcatagaataaaaataaaaatatgcaaaaaaaaagtaaaaatacaacgatttggcaacttcgacctgtgcgctgtgcccgttgtctgtgttccaatagaaatgctgcatttaataatggctcataatatttgtaggtggtctaagccacagctatacatatatatagaagacaaaaaaaaaaaatgtggggcactggcaaaacgcccacaagttgtgcaaggcatacggctgcattttaaccattttccatcatccattaaaaagccataaaatatttcgtttcaggtctttgattgcatttcaggcgtagccggatgatgtgttgcaatggcaaatccgataaaggataaatgtttaattagagcgttaaatgtttgccgcccccctccctccacaccccgcagacacaataacatgattgtctttttttccccatattaatttatcattataaatagatttattgtctgctcggctgcatgacaaaacaaaagacttaggcgacaaactcgtttctttgtgtttcagccagatacattactgttttgcatagattgccatggtatcttggtgggaaatttagctttgatggatcatcgacgagtgcagtttattcgactgtagaaacaattatatttttttataattttaaaagaaattagccttagtaaaaatgagatgcaacataaatttaagtttttttttttttgaagcgtaagtttaccaaactggatttattgattatttataactaaatgctaaatgtgattattacatcgtttatagctttgtgtgaaagcttaacaaattagcctatcgtttatatctgatcattatttggaataagtaaatcccccaatttgtatccgcacccagctctgccctttaccctcgaccctttgaaagctgtttttaaatcgtatttattgtttcgatctcgagtttctgttgtggttccatttgttggttccatttgttttgcttttgttatgctaaaaccaattggtggcaaccttttggtatttaaacttgactttagccagcggcagctaaaacaaacttctctttatagcactaaatgctggttgttgctgttgccgtgttttatttgtgccttttcgatgtttttgttattgttattgttattataatctgtctgctcggcggagtctcccatcaagacgtcacgtaatagacgatcggtcggtcactggttacacctgttttagcgccgtcttttggggtttttctttctgtaagaaatcgtgtaatgatatgctagcagcagggtttacggttacacgttttccgactcaatgaaaagttcatcaaacgcatcggcatgccacaagtggcaattggctgctcaaactgtaatctgcaaaagtctttgactttcgggtaaggaaaatcacggaaaacttacggaatagcttttaaattaaggggaaacccatataaaagcagcaatcctcgaaactcctccttctcagcaaaacccaaatcagcaattaaaaacgacaagtgaaagtttccatccatcttttcgcatacgaaatgtcgtaatcgaacttccaataaaacttgcttcgatattcgcacgttttttgtggttttcttcggcattttttttttatttgtcttcccaaatgctaatttgaatgcgtttcgttggggcgacaaattgccagctggaatcgtgcgtttgttgaacttcatttgcatacgtgagctgaaccagtttcgtgtttttgttaacgatttagcccaatcaaaaggtctttgatttctcgggttggaaagtgaaacgtatcccaaaagaaagtgttgcctcccgcactaaagaagctaaaaaaaaaaaaagcccgacgatggtgcctcattaagttgtaggagtttgaaatgactcggctgtttgttcaatttgtttatttatctaaattcaaatgcatttgattagtcaaccaagataatattctaattatgggtcagagccacgctaatgatgacgatttaatttatggttaagtggtcgagatgacttttaacctacgccgaggcgtagcattatgtgagcactgatgcggatggataacgatttggggtttggcctgaaatttgtttatggccaaaggaaatgtcacgcctccgcaaaaggtgtaggtaaaattaagcttaaagtttcaaaaacattttattttttggtgttgtaatctcttaatatgttgtattttattagtccaatcgctgagcttctcttacaaagcttcattattgcaaaaaaccttttattttcatcgcaggcgatctcgttatgttttttcgcttattttactctcgtttgttgactcttcccaagcaacttccacttgggtcttcaatctcagagtgaaattgatatagtatgggaagttaattaagaaggagaagtcgtcgaagaagtggcagacatgggaacttgtttctgatattgcatcaattggaaaccagaaaccaaaaaagtgccgcacacagccatcaataatgttcagcaaactccggggctacctgactgaatatcataattattttaagtcattaaacttcagaaaatcaaatctcaactacatatcaaaagttaaccaagcaatggcacaagaaaaaagccgaaacaagaaaatctcgcaacgataaggaaattatgtattaaacacattgacgattggacaggccgccaccgcccgtaaaacaacatgatctcgggacagttaaaaagactgcaaaaaaagagttaacaagttgccacagagcgaagaaacaaaaaaaaaataaagaaaatctcgccacaccaaccgattttggcggctgtttaagtgaattaaatattgcgcaacatctgggggaatacgatgaataaaaaaaaaaactactacttctgcagaaacttgcccatgttcattggccatataaacggtaacaacttcgacgatccaaatctctcccatgttgttgcatttgtggtcaagctgtcgctcaattgcagtccgcaaatggcttaaatgcgcgctcatgaccgcaggcaataaaataattaagacgaacataaaaacgccggcaaaaaaaattggctgcataattcacactttgagcttgtttcaatgcttcgggaccaggccaaaacggtacgtggtttcatgcgaagtttaataagcctttttggtggtgagaaattggtgatttgttaaagggaaattgatttggcttacaagtcctaattagctttatttcttttaaattgcagggaacttacatttactgcatacgatacaagcatatatttgttggagttttttattaatgatttcccaaccaaataaatagctacactaatcaaacagatttctacaatcgaaaccgataaagttgcatcgcacaatcggcaaattgtagagcaatcaggcaaaacaacgataataacacccaactgtcgtcgcagtgttttgtcaattttgaggattggtcaacgtgtcgtatacacaatttgcacaatcgaacgtaaacattgcggcacagcagcccgcaaatgaatagtaacaggcgctggcgcagccaaactttaactttaactgcagcaagcacactgagattagtaaacaattatggttttcgcgattttcgaaactgcaacaagttaattctccacccagcaattggcggcgaataaatttactcgtagggcgttaaccagacagaaaacaggaaaattgcacaagttcaggccaagacctggtaattgtccactccactgacatggtaattaatttcttgcaataaatccaacttatttgcaaccacttacttgtcaatgtaatcgatcgtttcgatttccttttgcattttttcaccatcgcgactgtcctccaaattggcggcatctgaaagaaggaaacaaaagcacgcataattagtttagtttacactttcgtgtatagggtagaactttgccgttgcataaattatagttgcaaacaaaatttatgagttgcattctccgtaaaatggtaaacacatgtcacatccaacatgaccaacataaattataattagcgtagcaaaaagtcgcagacaaaacaagaactctaattgtaggcaaatggcaaacacatacaaaactcacgcaccgcactcgaaacccaaaagaaaaaggtgtacaaataatcctgtttaac

SEQ ID NO: 20639 - DNA, 983 bp, DROSOPHILA
gatgccgccaatttggaggacagtcgcgatggtgaaaaaatgcaaaaggaaatcgaaacgatcgattacattgacaaatgtcgcaattcgactatgcctgctatacggtgcccgagtgttccacggatgatgatgatgataatgacgatgagctgggcagtaatgtgaccctggagaacaaggatcattcggattgcaccctggaatcggatgctacgaccaccacatcttcactggagcgtcatatgtataggaatcggtatcgctctaatagaagtttcggaccacagagggtttccatgcccattctcagatccagtcgatccagggagatgacgccccagttgggcatgtatcatgagggaccgaatcgagatccccaatggggttactttgtacccctgtcgcccaacttcttctttagtccaccgatgcagaggaggcgttatagggaaaaggaaaacgatcgcaatcgtcgcgctgttagttatggcggtgacgccacctcctccccccattcggccaccataccccgcgccgccccccgtcgggtggccttgatgaaggatccaccgccaccgccgccacccaagccgcaattgggttccaaagcggattctgtatcgcatttggccagcaaatatccccaatccgagtacaatctcatacagaaaatcgactcgaacagcacactcactgctccggcgcaatatcaaccgcagaatttctacgctaatactggcaccatatcctctacgaatggctacggatcgctgttatgtcacgccagttcgacgaccagtccgctggcggtccggaagagggacaaactgcttcatcgcttcagcgatgccgccaccttgggccggaagctcaagaagaagaagaacacgaatcgcacctgcagatccatgacggaggccattgagatgctggccgatcccgtcatcgaagatgaattctttcctcttaaaacaaaatag

SEQ ID NO: 20640 - protein, 301 aa, DROSOPHILA
MSQFDYACYTVPECSTDDDDDNDDELGSNVTLENKDHSDCTLESDATTTTSSLERHMYRNRYRSNRSFGPQRVSMPILRSSRSREMTPQLGMYHEGPNRDPQWGYFVPLSPNFFFSPPMQRRRYREKENDRNRRAVSYGGDATSSPHSATIPRAAPRRVALMKDPPPPPPPKPQLGSKADSVSHLASKYPQSEYNLIQKIDSNSTLTAPAQYQPQNFYANTGTISSTNGYGSLLCHASSTTSPLAVRKRDKLLHRFSDAATLGRKLKKKKNTNRTCRSMTEAIEMLADPVIEDEFFPLKTK

SEQ ID NO: 20641 - DNA, 5453 bp, DROSOPHILA
aaatgtgcagatatattcatatataattaatttactacaattaattgtaatatcgtaaggaaattgtatatctttacgttttctaatattgtttttctttcaaacattatccttcaaagataggcttaaaattctatcccttttacctctgtagcgcctcagcgtgctggttaatttcattcacataattttgcagctctgccaggaggacgacctccgtttcgaacagctttgccaggcccgaggtggaactgaagaactcgccgtggcaggataatacctgcaggaccaagaaaaggacgcacttggccaaaagcatcgcacttaaccgataaaacgccaccggttttcagaacgcggatcgctttttgcttgttgttccagccgcgaatcgttaggaactgttttcagttggcggcaagaccgacgatctttgaaagatctgatgagaaaaagctcgcggcgtttgtgatcaagcgttttcgagctgcgggtgtcgatcgagcagttccagcgctccaatcgaatggaacggcgtttctggtcaaagaactgcccgcgggggccaggttctgcttgaatggggcccatcaagtgaagtgggttcaataaactgaattgtgtaagtgcgtgtatatagaggcaaaagttatggcagatgttccaggaatcacaactcaatctcatacttttccagccagtctgaatttccacgctaattactttcacttgtctgctcgcagcagttgtcacttcacaggcccgaaaatattcaaatcccccaatgaaactttgtccgtgaacttgtttatgcaaatgaagccggcaaatgaatacgcaactggcttttggctcatctcaaagccagttcgcttcgtttgttttgagtgtttttatagctttgagtgactctgccaaactctactcaaaccccttaacccactgagtctgttcaggccaaaaaagagacacgctggggttaacctgactatcacgatctttatttgattatctcgtactccagcgacacctcgtgatcccggaaaacgtcgcagggtcgggcgaaggtctgggtcacctcgtgtatccaaacgttgccaactgcaaagatcgggtggatgaatgaatcacattaattgtgtatgtcaactcgaggtagctggtggtctcacttcacttatgagtgtattaaatgtgattaacaattagtttggtgtgggcattgctttagttagtgctcgtaaaactgaagttctaattagttagttagttagttagttttagttgtgtagcaactccgtccaggttacttactccacttgctgcccttgagcactggacaaccggcgtgcttggtgcggtagtccttgtccagggagcggtgtaggttgtaccagaagagaacgttgcccagctgcggcttcacggcgatgtccaggaagggaaaggcggtggccccaccctgctccacctcggatagctgtacacggataagataatcttactaaatcatgtaggggattacggccttgtcacaactcacataaaatatggcagtggcaatgcggttgccctcctccgccggataatgattggggtcccggaagaaatcccagtgcggctcgtagtgcccacccacaccgtagttggccacttggagctgctcgcagaaggtggtatccagcccggtggcgtccttcaggtcacggagcatgcccaccattgtgggatgggactcgtacgccagccacgcatttttgctcacccgaaaagcggactttttgagctgtccgccgggcaggggattcactgtggagcgatgcatgcgcggaacagccatttcccggagctgcgagatctttccgggactcagtatatcatggaaggttgccacatagggatccaggctgtgctcctccagcttcagtggcgccagaaagcgatacggatggtttccccggctatagcgacaccgcaactcctggcggacaattggatgcacctctcctcggcacaccttttcgtatttggcgaactcctgcgatagctgtaggattggatttaaactataagctccacatttcaaagtgaccttagacttacgctgtaggagtccgagtgctttggtagatacacatcatcgatgtcctccggaggcgccgttcccttgtcaccgagatgccagttccttatgcgtttgggatcgaactgaaggactcgctggctcagctcgaaagcagtgtcgaaatcgcctaaaatcgaacgaatgagtatcctgaaaactggccaattcccccagccatactgcttttattttttgctcacccaattggaacaaactcttggccgtcgcctccattttgttgagggtaaccgtatccggtccgctagtgggcgctaggtggctgggggcgtggctggtctgacgtcgcaagcgttccatcgattcccgcagccagaccttggtgttgttgtagtcctccatttcaaagagttgttgacccagctcgaagcaatcctgccagctcatatcggagctaaaaataaaagctggaagagttttgataggttctttcaactacaaaatacccttaaaatcaatatgggataaatttatgggatttatgggataaatgtatgctgatcatgggggatttttccaaaattaaaattccattgacgcattaagagctgatttagtcagaagttatgaaaaacaggaaacatgcctaatttatagtattcggaagcggacgggaccacctaagcgcatttaaaacaatttatttcaattaaatggctataatcatatcaataaaatcaagcattaacatatatttttaatgtactattgcaagttgcgatttcaaaagtgctaagttcaccacgatctaatagtcggtagacttcgcaaaacacctgctatagtgatttcgattgggtttaagtaataaggggagccactcgattgaactgggattagatgggatagcccgtattttaagcttggctggttattgcttatccgcttccgccacccaacccactttgaggtctcacccgtatttgacgccattcagaatgccctgggccacctgggccacgtccagtttgtaggtgctctgcaggcggacgagagccagagcagccccctccacgtcctcctggctggggtagctcaggccgtactccctggtagcattgaaatctgggtgagaaggtaagtgttaatagcagtaatccttgaatgtggtgggcgcacttactcatctcctcagccataagctgcactcgtccctccatcagagaccagtccgtgtgaaggcgcttcatcaggcggtacacattcaccgggttggtcaggtagttctccgtgtccgacgcggccatggtgtgctccttttcgatggaggatagctcgctgcggattgaacgagttcggactagagttgcctaccagtttggtcgatttatgagtctcgtgtcgtcatagtggcccatacacgtatttcggcttaattaattctaatttatgtgtgattctatattcataatagttttaaagaccgccgcgataagaaacaacggggcgaaatcaaataaaacgaaagcgaaatgccaaacacaaagccaaaacctgataaccaatattcgctgatccggccaactgtcagaaatgatcaaatatctatctcagcagattagtctaactactccagattggtgacaggttgacgtctgtgataacacttagccaaagtcactggcatgacaatctttgcaaatatatagcagacataaagtctggcacctacataaactagtttagtcaaggggtagtaaaactttaatggatttgcttacgaccaaaggctgtaatttaattagcattgtttcaaatatcgtgttctatcaaaaactactgtgggcttgttttgggccaaaaatcgatctttgagttcccactaaaacgaaatccacttcgtattgggactctgagtgtatccctaaatattctgatttcaattcaaaggctttggtaacacaagtgttatccagtttcaaaagttgttgctaactggttaatcctattcagccaaagacgtgacttgacaacatttatacgggttaactttgctatcacgctattgtataatccataagcgaatacgatttgttgtatatagtcaatagtcaaatggatatgtctatcctgaactctcaattgggccccctttatgaactttatcgatcaatttcatggttctactcacctctcgagctgttgtagtgcagtttggattgcattaacctttgacctcagttcccttgtaagatactgctccgtatgcaagagatcctccaggcccgtaatggatgaaaagtaatccgaggcaagggatccctgagccagtaagaagatcagtcccaccagtaacactagtccacgcattgtatggttgcactatatatcctttagggttctaattaatatccttgctgtgtatatgcggtacgttcttgaagatctgcaagtccggcgatgttcgcggcttgtggcgaactgatcttggggccatcttcgagagacattcccagagatgcggagagcaaaccggcggcgagaataaatttcgcatgtgtgatggcgaaactagttgcggtggcctatgatttgaagaaaactgttttattagccagttctgtgcatgttccgatgcggagaagttggcaagaggagcgtacgggtttcttttcggcccggtgtgttttatggcttgttttgcgctgatttactgatgcttatcggcctggcgagctcgtttcgaattcttaattctgaattcgattcgcattcgaatcggattcgaatcgggcattgtctttagctagagttagaccagccaggcatattaatactggctaattggcagttagctgtttgatatttaagactgcagttcgactatttagcagctccggccagcgctgattaacatttcgcatccgactgttgcgacagttcatattggcttgcggtctattgtttatgaattgttatggatgataattcccccgcaggctgccaatttggagcaatgatttgttaatgagccgaccatcataactcacactgttgtgatccgcaatctttgctgatttacggacttcagaggcggcggccagcacacttgttttatggcccagtgtttgagtagcgggcttcctcttaacgacaaacaaacaaacaaacaattatggatggcagcctttgtttgcccagcccattcacaccgtcggatgggcactcccaatgggaaataacgcaataaaaggctgatttttaatcaagtgccaaggtcaactttatttgattccccagctggcaattaatgcacatgtcgcggggatcgggaaaccatgaaaacccatcaggcctcgctgcccacgtc

SEQ ID NO: 20642 - DNA, 1614 bp, DROSOPHILA
atgcgtggactagtgttactggtgggactgatcttcttactggctcagggatcccttgcctcggattacttttcatccattacgggcctggaggatctcttgcatacggagcagtatcttacaagggaactgaggtcaaaggttaatgcaatccaaactgcactacaacagctcgagagcgagctatcctccatcgaaaaggagcacaccatggccgcgtcggacacggagaactacctgaccaacccggtgaatgtgtaccgcctgatgaagcgccttcacacggactggtctctgatggagggacgagtgcagcttatggctgaggagatgaatttcaatgctaccagggagtacggcctgagctaccccagccaggaggacgtggagggggctgctctggctctcgtccgcctgcagagcacctacaaactggacgtggcccaggtggcccagggcattctgaatggcgtcaaatacggctccgatatgagctggcaggattgcttcgagctgggtcaacaactctttgaaatggaggactacaacaacaccaaggtctggctgcgggaatcgatggaacgcttgcgacgtcagaccagccacgcccccagccacctagcgcccactagcggaccggatacggttaccctcaacaaaatggaggcgacggccaagagtttgttccaattgggcgatttcgacactgctttcgagctgagccagcgagtccttcagttcgatcccaaacgcataaggaactggcatctcggtgacaagggaacggcgcctccggaggacatcgatgatgtgtatctaccaaagcactcggactcctacagcctatcgcaggagttcgccaaatacgaaaaggtgtgccgaggagaggtgcatccaattgtccgccaggagttgcggtgtcgctatagccggggaaaccatccgtatcgctttctggcgccactgaagctggaggagcacagcctggatccctatgtggcaaccttccatgatatactgagtcccggaaagatctcgcagctccgggaaatggctgttccgcgcatgcatcgctccacagtgaatcccctgcccggcggacagctcaaaaagtccgcttttcgggtgagcaaaaatgcgtggctggcgtacgagtcccatcccacaatggtgggcatgctccgtgacctgaaggacgccaccgggctggataccaccttctgcgagcagctccaagtggccaactacggtgtgggtgggcactacgagccgcactgggatttcttccgggaccccaatcattatccggcggaggagggcaaccgcattgccactgccatattttatctatccgaggtggagcagggtggggccaccgcctttcccttcctggacatcgccgtgaagccgcagctgggcaacgttctcttctggtacaacctacaccgctccctggacaaggactaccgcaccaagcacgccggttgtccagtgctcaagggcagcaagtggattggcaacgtttggatacacgaggtgacccagaccttcgcccgaccctgcgacgttttccgggatcacgaggtgtcgctggagtacgagataatcaaataa

SEQ ID NO: 20643 - protein, 537 aa, DROSOPHILA
MRGLVLLVGLIFLLAQGSLASDYFSSITGLEDLLHTEQYLTRELRSKVNAIQTALQQLESELSSIEKEHTMAASDTENYLTNPVNVYRLMKRLHTDWSLMEGRVQLMAEEMNFNATREYGLSYPSQEDVEGAALALVRLQSTYKLDVAQVAQGILNGVKYGSDMSWQDCFELGQQLFEMEDYNNTKVWLRESMERLRRQTSHAPSHLAPTSGPDTVTLNKMEATAKSLFQLGDFDTAFELSQRVLQFDPKRIRNWHLGDKGTAPPEDIDDVYLPKHSDSYSLSQEFAKYEKVCRGEVHPIVRQELRCRYSRGNHPYRFLAPLKLEEHSLDPYVATFHDILSPGKISQLREMAVPRMHRSTVNPLPGGQLKKSAFRVSKNAWLAYESHPTMVGMLRDLKDATGLDTTFCEQLQVANYGVGGHYEPHWDFFRDPNHYPAEEGNRIATAIFYLSEVEQGGATAFPFLDIAVKPQLGNVLFWYNLHRSLDKDYRTKHAGCPVLKGSKWIGNVWIHEVTQTFARPCDVFRDHEVSLEYEIIK

SEQ ID NO: 20644 - DNA, 2789 bp, DROSOPHILA
gaaaaacaaaagaataaaatcaaaccgacaaaaaaagtctatatcgtcatggaagcctgagcagcagcggctaaaaatgcataaaatggtcagcaaaagaaaaagggcctgaaatgaaagaggtaaaaggaaccgcagccgagctttgactttgaaactttttgagaaattgaaaggccgcagtgaatatcattttgggggcaggtgtgttcgaggatgccaaattagcagctaccgtctgaccaccagctctccccttcctttcatctccatttcgcctttgccaatctctcacctcgtttatttcttcatcccatttccattaatggccccaagcgaaattttgaacatcattaattttaatttttgcgcagacgcaccccaggggcggtaggcttcactgcctccattctggacactgcagacaagccacgagtgatgactgatgatgacctggcggaacgagccacactacctccatacatacatccacgaatgtaattaaggtggccaaatggaaaaaaaaggtgccacagcgacaattgaaagtgttgcaacgcgagttgacaaatttcgatgttgcccaagagcaatgcaatgcggtgattgatggctgaggtggtggtattcaatggcgtaaagaattttaatattaggaaatcaaggaatttcccttaaatatatatattctatctgaggggtaaaataaccaactttaagtcctgtcataaagatttttatatttactgtttttaacgtagagttctagatttataatctcaaatgaggtattcggataaaaaacgatttagcaactgttaacggtgaactaaattatttgtaaagcccgtctttatgttagtcatatttttcagagttgccaactgaccgtgtggcctaatggataaggcgtcggacttcggatccgaagattgcaggttcgagtcctgtcacggtcgtaaaattaacttttttcttttgtatccagaattttttttatttattttatgaaaatgagatttgagggcatttggttgcatttatcacactttgtaagtctgtatctcaccttcttgaagcgccttcgctgcgatgaggagtgcgtcgatgcagtttcgagcagattgctgttgttatcccccccatcccttttgcccagtgcctggagaagatcgtcaacgttgcgtatataggggcgatctcgatccccgccgcgttccctttccttttcgccaccccctccaccgccgcccatgcagctggttatgctccgattgcccacactattgctacgcgatcgggatctggtcttttgcttgcccagccagtaaacctgatttgccaaatttatttcggcggctgccgcagcctttcttctgcccaattgttgttgctcctgcacctgttgatgctgctgctgctgttgttgctgctgctgctgttgttcactggccagatattcgccggctatatgaaccttgggtgcactaaccaactgcaggccagtggcgccgaattgctgagggaattcgtgcaactcgagggggaaacggggatccatggtctgacccggttgacgcgggtacatatagccatcgcgtagaaacatcttgctggtggtatagaccctatccgcgatttggtacactccactcgagccgggaccctcggcgccgccaataattccatttcggacataggctgtcgggcgatagcgaacgagtgggttatatacattcgatttggggggtttcgttttgaaactgcgacgtcgcgtgctgggcttcatatttttgttgtatttaattttcgtttttgttcgtttgtatttgcaccccgcgataacagaatgtttgctctacagaaaatccacccttgtgctgtaggttgcttgcacacgtatcaaatgttttcgagtttaagcgtgcttggaacaagcgaccgtgtggcctaatggataaggcgtcggacttcggatccgaagattgcaggttcgagtcctgtcacggtcgaaaccaaagtattattttttttttgtgagaaacttatgttttgttctttaaaaaattcaatttgttgcaaactaaaaccataaaataaatcaacaaaaacaacaaaaattttaaggttcacttggctaattttacataaaatctacactgtctttagactgacgatagaatgttttatgattacatgtaaaattagatcacgcaaaattatatttttttcctttggaaatatataaaaaaaaaaaaaataaaaccagattagtgtttcaagggtgttgagttaatttagagactttttgttctttttcaaatgtaattttcgaccgcgtaaaagtatgctatagatatggttgaattatttttcatggcgttcttgtttaacagcgcacaaaagcaggcaacatttgtgtttttaaaaacgcctgagagaggccaataaaaaagagataaaccctataaactatattgaaaataaccgattttttaagggttttacgcgaccaacacgttcggcacactgcacgttcgattttccactgcaattgtttgattttattgcaacaactttttctgcttttctgttgtttgctggaaggcacgcactgccaatccaattagccggggttcacctttcgagccgtcgtctttgcgcaaggtaaattgtttttcgaacccaaagtattgacacagtttgcgagtcacttgttttgttagacacattcgtcttcctgaactgtcaaccgagctgtcatatggatgagacagaatggagaatag

SEQ ID NO: 20645 - DNA, 789 bp, DROSOPHILA
atgaagcccagcacgcgacgtcgcagtttcaaaacgaaaccccccaaatcgaatgtatataacccactcgttcgctatcgcccgacagcctatgtccgaaatggaattattggcggcgccgagggtcccggctcgagtggagtgtaccaaatcgcggatagggtctataccaccagcaagatgtttctacgcgatggctatatgtacccgcgtcaaccgggtcagaccatggatccccgtttccccctcgagttgcacgaattccctcagcaattcggcgccactggcctgcagttggttagtgcacccaaggttcatatagccggcgaatatctggccagtgaacaacagcagcagcagcaacaacagcagcagcagcatcaacaggtgcaggagcaacaacaattgggcagaagaaaggctgcggcagccgccgaaataaatttggcaaatcaggtttactggctgggcaagcaaaagaccagatcccgatcgcgtagcaatagtgtgggcaatcggagcataaccagctgcatgggcggcggtggagggggtggcgaaaaggaaagggaacgcggcggggatcgagatcgcccctatatacgcaacgttgacgatcttctccaggcactgggcaaaagggatgggggggataacaacagcaatctgctcgaaactgcatcgacgcactcctcatcgcagcgaaggcgcttcaagaaggtgagatacagacttacaaagtgtgataaatgcaaccaaatgccctcaaatctcattttcataaaataa

SEQ ID NO: 20646 - protein, 262 aa, DROSOPHILA
MKPSTRRRSFKTKPPKSNVYNPLVRYRPTAYVRNGIIGGAEGPGSSGVYQIADRVYTTSKMFLRDGYMYPRQPGQTMDPRFPLELHEFPQQFGATGLQLVSAPKVHIAGEYLASEQQQQQQQQQQQHQQVQEQQQLGRRKAAAAAEINLANQVYWLGKQKTRSRSRSNSVGNRSITSCMGGGGGGGEKERERGGDRDRPYIRNVDDLLQALGKRDGGDNNSNLLETASTHSSSQRRRFKKVRYRLTKCDKCNQMPSNLIFIK

SEQ ID NO: 20647 - DNA, 20811 bp, DROSOPHILA
atctgtttattacgtacggtgatactttcctggccacaacaaatagctatgatgagctctactacgaactgaaccgcgaggagaaggtatttacggaaatacatgccatgggtaaggttgttaagattctatctgtagaaacaaaattaatcattttcaaattagttcttcgctatacaacgatgccggactgcgaatacaaagacgatgtaatcaagctcttaaacgctttggtaaatatcctggccattgttaagcactttcagaacaagatcaaggaatggctggccgaacaaggcctctctacgcccacggaggagcagatactcgacgtggtgcgcaagaactacgacctaacgctcaaactgcaggactccctggaccaatacgaacgttacacagaaacgccgctgcacaccaacttctttaagttgatggttcgcgatgttgtcaacgatacgcgcaagcacatctacggctatgtgaaggaggcagtatctgttattccggaccaggaaattctcctcagttcctctatgacatccgtttcggccggtacagccactccggcttcagcaacagcagtgccagaagcaaaagcgttgccttcttttgcttagttttgtaattatattttaaatattcaaatctctggatgcgtaaactcgatgtaatctataagatttaaagtgctttgcgagacttttatagctaaaacagtgcacttaaagcaaaaacatattctgtgcaagttttttacacaagtatacaaaatatataaatattacgtgtatataaaatcaaaccagatcacctcttacgaagtcataaaccattggcgacttatttaaccatgggggtagaactcaagttttttaatatcgatctgttaaatgtcgatatttgtcactatgtggaatgtcgtccacctccttacctatataagatgatttaggcaatatgattattattgttgctcttttatttattcccaaactttccacgtgtgtataatctttaattcaaaaatgcgtataaatatttataaagtatgatttctttctggttatacaggcgtgtgtgtataggctctaaggatatcgctacgatttataaatggtatatatgtttaactttagcatgcaatacttgcacgcatttaacaatttgaatgcaattaaaattgatcatgggtcgaagcaatatgcgaatatctaataaaatgtcgaatatatcatttaaaatgcgttaaatatatgaatacatttaaaatacatagtaattggatgatttaaaatatacaaaataatttgtgtatgaaattaaattctagtcgctttatacaagtatccattgcattcgattgattaatttctagctcgatataatagttcagaggcagagccaaacgatcacttaaaggcacaattaacagacaatatcgaattaaatttattatattatataagcaatgcctatactacctctttgctcagctcatttcgtctgccctggaattgcggccctaagactacacatatgatactacggatctatttacaatttcgtatatcgttcaagttggctggtgaatggtagtgctatgaatcttaatgattagaagtgatccaccttgacggagaccgtgtgagcggcggcattgctgggcaggtcgatgttgtcccactcggtgtgcagattcttctcgctatcggtcgccttgagggccagtcccagtgatgcagttcgtccggcgcagtggggtatgttgagcgtaaccggtacgaggaactcgaggccctgcggcccgcacatcaccaacggtgacagcattgtctcacctacgaaggcaaataacaaggccattagtaggagttatttataatttcttcttacaaatgcaaatatagttgtgtttaatagagtgtggtggtacatcgtgtggggttataggaagtgggtaagtggacacaggcatagactccactcggttggaaacacaaacgattcgtgcaaaagcaaaattttatctttggataaaatattgaaaatagattagaggtaaggtgagacacaatgtatagaggtaggtctaaaaatgtatatgatattacatgcaccaagcaaaactacaagttagtatatatcgcataaaatctaaaactaatgtttaaaccacagcaaattaccagccaccatttccaaaggttaagtacgtaaaacataagggttgttaacaataacacaaaacaatgctgtaataaaaacaaaatcaagaggtttgtggtagtggcagtggttttggtggatggatacaatacgaagtagagtgggtttttgtgtttagtgggaccaaccattttccatgtccagcggaggaccgccgacagcttgtcccattcgcgggtcgctcacggtgaagtagatctcttgtcgtactccggccggaatggctcccggcgggatttgcagtgagacgtgccacagcttatccgccaaagtgccaccgttggagtcaaaaaatccgcgcgaggtgctgggttcacggggcagagtgggaaagcgtccgttggccgaaggttgattatttactggtccggcgatgggcaatgacatgctgctactaaacggcgtactggtcgcattgggtggacccactggcaagctggcttgtgatgtgtactgggtttcgatggaggtacagctgtcaccgattggggaactcggcggaggtgctgttcgcttaaggatattcgaaatgtggaagggagctctaccggatcgcggggtcggcggttgaacaggagctggtggaggggccaggggagaaaccttatctgctgcttcgaatacgtcatccgaatcattctgtgattgctccaccattccttcattgtgcagattattttcaatagctgttggctgctctgtctgatccgcagagctctcagcgggatcacgctgatcctgaacctcctcctcttcgtcatcatctacttcgtcctgcacaagaggagctctagctggattttctatcaccgtgtccgaagatttctgcaggtccgaacgacttaaggtcgaatcttcgatctgttcttccggttgagcattaatctccacctgaatctgctcggttttgcactccttttccttcttttcatctgtttcattttctcgggactggaggatactctcttcccgggtctcatagattggggccggtctgcccatacctcttttggatacatagatcggttcagccatgctgtccagggcttcccgtctagtctgatagatctgatccctcagttgtgacctcgttttcagagcactttccttggcctcccgccgactctggtatattgcctccgaattggaggcttccgactggctgctgctgctttgggggctaaattctcgctccatatccctcttgccctggctaatcctctcctgcatttctcgtttcgattggtacagatgatttctctgcatttcgcgctgcatttcgcgtcgtgattggtagagcggttcctcctcagtctgctcattggcagcccccggatagaatcgtctacgggtcatcacctccgaactgggcgcccttcgctgatcgggcagcatgtaggctccgttgcgggtctggtagatctcttgcggatcttgttcataaccaggactgatcataggcctccttggcggtccgggatttcctccacgatctgcagtagtggtgctgtgccgccttacaattctccttccatttcgtccgccagaagctgcagctgcctctgcttgccttctttcgagatcgatgcacgctcgattcgcatagagatcatattggtcatatccgtaaccattgtcctggtgatgcggcattctgggaactgtgttgccgatattcccatagatatcctcaccctccagattctgataggtgctgttcatcatctcctgctgttgcggcgcgtagtgaccacccctttgatagtaggcatcttgtgaatgtggttgcatcatgccttgtccaccatgggcacgctcctcaaagccagctggatacgttggatactcatccgggtagtagggtctttgcacacccctctccagcatcgattgctggcgtcgaagtcccttcggtttcctctccggttccaccatgctgttcattctccttagaggcctcgtactcttaagcagtgcattctttaatgccaccagtgggctctttagcaccgatttcttcttcttatgtggcggcaatggcggtggacccatctccaacccatgatcatcgtaatactgctgttggtgatgctgcgaatattgctggcgcggctgactatgtcccctggacgttccatagtggccgtagtagttcggatcttgggcgtgaggaggtcgctcgtgtggataacgaggagctgatcgggatcgctgcatatgatgcccttgggacggatgggcggcagggggtggcatgttatagtaatcatcgtagcgctcatcgtacggctccatttcgctaaagatttattatgtgattcgaaatttttgtgtgcaattagcaaggagtttttttttttaaatgtattcgtgaagtgaattcaagtttgggttctgaactttagcaatcaatttgtttttataaaaatgtccaccagaatatgttttaattcgcggcggtacatttcatcagttaaataagggaggtaaaaatattgaacaaacatgtctaacttgcaatttattcctgcaaaactttcgcttacgacacacaagaagcgcacatgtaaaatgtattcatatatttatattaaatactttgcatattaaccaaaactgtagaataaacataccatttaccaaatatttcaactttattttaaagtagttttttgttagttatggtttttatttagaaatgttgaatttacccaaaaccatagttagattcaagattaactttcaaatacctgagaaatgtattgagagttgttatatttaagaaaccagctaaaagcatgatcatattaaatagtaatacaagttgaagttcgaaagtagagaaatgtggatacgaatctttgtactgtaaactaaaatagcaagtcgaagttaacccgaaaaatgttttattttcgttttttttttttcattttttatatgtgcgtgaagcgctcaactcaacaaccttagatttggtttttacaaactttgttaagctttaatttatggtttggttaataattttggttattgcaaaatacaataattattaaatttatggaatatatgcgatctgttttcgttgtgcgtttttcgtgaattttgcatcgaataatttgtaatgaccatcaaccgcatgaaagtatgaagagattggcataatgattgattgattgattgactgattgtttcgctgactgaatgtttgatattgtaaagtacaaaaatggcatttaacaagaatataaaacatttttcgttaacacaaatgttgaaaattgggagtggggaatcaataagagttctgtatattttcgtgtgtttgatttcattttttgttttttacttttggcaaaggaggatatccttttgggagagcaatgggagagcaattcagggagctacgggtatctaatggacttatggactcacctcatgttgtgatggtgcccggcggtagctccgatttgcggtttacgatacagttcgaaggccgaaccgcgctgctcccgacttccggccaagtcaagagcatgacgttcgggcgtgtgaggcggcaggtttcctatggttaacatttaagtaggtattaggatattctatgctcagaagatataaccccttaagatagggctaacacgcacctattggcggtggcatgccgcgatgtggtgcaatatagggtcctgtgccgctgcccccgttgtagtgatgcccattcccattgtagccattggcctgcggataggattgtggtggtggtgcctggccatagttgccattacttccgccgtaggtgggctgctgctgctgcggtggtggtggctgcatgtggccattgctgggtgaacccggggtcgcctgctggccgtaatgatgatgcgaaggcgttggtggataatagaagccattcggagaacggggcgaaccagagtcctgaaaagggagtatatgatgagtggaaggtctaagaaagagagaagatgaaacttaccccattctcccaaggagttgtgcctccgctgccactgctaccaccactttgcaccggtggcctatagtttttgggtttgggtggtggcaccggcttgaagggtccactgccattgctgctcggcgttccgctgccattcatctggccctggccattgctcacattcggcggaggaactactccatgtggcgcagtcttcggtagctttgtataatccgcttgcgttacggagttattccgactgatggattgttgattcaaatggtttcgggattgtggattcggtgatatacaattgcgttatgggtggcagtggttttgggtgtgtgagattgagttttgtttttggggacaaacagttgatgatggcgagcacaatacataagcaaaaaagagaaaaaagttgatgtaattataaggatatgtgtggtagaaatatgataaatattcatagtgcttagacggcatacaaaaatctgggttaatcgggttttaatcagtatcgtttattgcacttcgggttggagctcgcaaaagagttaactatttacatggtcgaaggtatcaatacagatcattgagaacactaaaggctttaatcattaacttgaaggtaaaatgtaaaataaaaacaatttcaattagatcgactttctaaaaactatgaaagtaaaaacatgtactaaaggaatgtttccagtgcagtatcgcatataaaaagtcgtagtgtatctataaaatagtttcgatttcgatttcgttgcttagacgagtgtatcgtaggccgaggcactggacatcagagctggcggtggcagtggtgccatcagggcatgcagacgtggtgcagcaatgggtcggcgatcgaagccgccggtggagaggcgtagcagctgctgctgtgtcagctgaaggccgcaggacatgtgaaggggcaaggacgagggcgaaggtgagagcgacaacgaggacgaaggtgagagcgagtgcatcatatgcaagtgcttcaaatggggcgcatgtaaatgatagcgtctaatgggccagagacacaggtggatatacacataatcatattgcatttattcagaacgatacaaaggaatatttacgacacagtcgataaagaggcatgcgagtgatttcagataataacgacggcgcaggagaaaaagaaagtaagaagtatgtttttatttctgactgagcctcgcaatttatacatttttcgagggcgttcccccaaagtaatgaattttcatcatgcatacctgtatttgccgtaatccgtttttgtctccaccaaaggcttgcgtgggctgctttccaggcccagattcgaaggacgctgtggtgtgccattgcgtggatctgtcgaatgatatgaaatatgttagttcgttttgaataaactatggcatatagagctactcaccgatattacgggacgcattcatgtcatggtagtgcggcctgcccggactgctctgccggttcagatcgttgggtcctccgaagctgcgatgatcgtgcggagtgcgaccgtactcgtgcgactgacccgtcggaggcaaggggcgaccactaaaacaatttggaaaaacatataaatactaaagtacagaagctacatttaatatttaataaacttactttgcatttggcactgatttgagatcgtcgggtgcattgggacctagtcggcccaggttttgcatggccatttgtgtattgttgtacgagtcgtagctggacacactgtcgtaggtggatgcaccacctcctccggcgcctactccgttggcctttagctgcgcattcaaacgcgcttggcgctccaaggatgcatgagtctgctgctgctgctgctgctggcgatccagggtttctgcagctccagacccgaccagagcgtttcgggttatgtactccgcctggacatcgtcctgcaccacagccttgccaaacagacgctcctgggcacttcgacccagggtgccatttcgcgacgatgagcccgaggtgttcagtggtatatcgcccggcttggactgacgatcgatgcggggcggcagatcgggagcattaatcccgtacagagattgcggtctcactgcagccgtatctcctccaacgccgggctgctgctgctgtggtggcacattggtgccgtagatgctgtacttgctggagtccatggtctggcggcgattgggattcgcggggacagcatggtcgtagggtacctgcagcaggtgcattgcaaggggttcgtgagtgggtggtgaattagattagcacactagtcagcaaaaataaactttcatgagagctattatggaaaatattgattttagaatgtctcttttgaatttcacgtaatattttctttatttttgttgaccattgttattttgatgagaactggatggacgcttagaaatttcccaagtttttggttgttttttcttttgattgattttagtgtaagcgcatgccatttcttagtttgagttttttttgttttgtatgtttgtttgtttgtttggttggttggtttttcgacctcttaccgtatatggaggtggtagtccttcaccaattatgtctctatccctatccaagttatcctgattagtggcaatcgatggatctgagctcgctttaaccaactgcggcaaattgccaagcgacaatgatgcggatgggccgggactcagttccaaatcggattcgggacttgatgcatacgagagtcgggatgtggtcatggggaataggaaatcgtcggagagggattctactggctggggtttggtagtttgcaggattgagcgcaattgtttggcaaaagttaattgatttttagcgatagttttttttttggttttttgtttggttttcgaatgttcaaaatttagcgcgttgtgagcgaacaacattttttttttgcaattgttgtcaatttaaacgcaagaacagcaacaagaaacgtttatgaaacattgaaagagatatgattgattcgatacgattcggttgattgaaaggcgttcgattgcgaagcatttggatacgtaatgtgtggacgaacacaagatatttggcattttgagtatattatgttgtttggtttttgtttttagttttggacaaggacattttgattatttttgtggtgtttggtttgtttgattatatgcatcgggttttacgggtgattaagcggggaatgaccatgatgatatatatttggttttggtatgtaaataaaagaaacaaatgaaacgaaaaacatttagttagcaactttataaaaatattggcaaaaatttttatggcgatttttgcgtaaatacttaagcctaaatatgtatgtcaaattggttcgatagaattggtaatgagtacgtttggagttggaaaactgtcattcgttgggagtacaaagtggaaatgtgagaagataaaagtactcaaattcgtataaatgcagatcttagatctcttgagattaaatattgtactttaagcattccctggaatgacaattttcgtgctgttggaggattatgtggtagttgtgatccctctacatgcttttagcttcacgattacacacatttatatgtacatacatattcaacgaatagcgggctacacgcaatattattgttcttgatcatgctacatgtgaagatttgggtcttatgaataatttagtacaaacaactacatgcgataattacacaaagaaggggctgataggaaggatagaggagatacgattcagttgaaaagtcttgtggcccaagatcggaataaatcagatctataaattagatctcgttttctggaccttttcaactaaattaacaccgattctcatgcaatgcattcgttactttggccaacattgttgttggaatcagcattattaacatggctattgttgttgttggcattaatattatggctgttgctgttgttgttgatgctcctgctggtgctacaattattattgtttagactacttgaattattgagactggctatttgattggtgagattattgaaggccagtgtaaagctgccctcatccaccaaagtgccatcgctgctctcgtgaccattgctcagcccatggccattgcccagaagattgctcagtgaccccgaggaggagtagttgctcctgccctgaccattgctaatcaaacgctgctgtggcttggccatcggtgcccttttggatgcattcgatgcatctgcaagatgcttctgatgctgctgctgctgctgttgttgctgctccagctgcacattgctgttcttgctcttggccagatccggctgatgctgctgctgctgctggggcagaagattcagactggaatcgaagagattcttctgcagcagcagctcgtggtagtagtagggagtggtcctacgttccacctgggcattggaccgcaatccatagcggctgactaccgatggtccgggctgaaagcccctcatggcgtttgagtgattcgtttgatccacggcactcgtactgccgccatttaaattcgagttcaaataactctgactcattagatttggctgagaactatgatactgggagttggacccatccatggccagaacacaatcgtctagtggcatcatgggagcagcaggctcaacggtcggtgccagaccactgggcatcgaagaagcgggctttatgatcggcaccatcgtataagacctgcgatctcggggcttttcggccaaactctggctgtgggcataacccacgggcggtgggcgtggcggcggaggggtatgtgcctggttctggattagtgaataggatttacttggattctggtttagattcagattcatatcctgcgagtagcgtggcactgaggtagatgatatggggcggcaacaagctaacttgcatggctgggcgatgtagggggggaataacatttcggtgggggaatcggggaactgttaatatgtttttgtttttatttttatacggttcgttgacaacaatcatgggcatgtttgtaagtgtgtgtggttgtgtgttttaaaaaacgaataagaaaaattatcgaaagtaaaaattagaatattgaccataaccatttgttgaaattatagatttataggggtttcaaattagttaaggagtccattcgataaataagattatttaatattggaaaaccctattgggctgggatatcatcggtataactaaaactatatcaaataaactgaaaaacattcctttctttaatattgttttctaaagttttcatgttcattagtgttcacacgttaattgatctaatagaatcatttattttgaaaagacattctcgcaatatgcctacataaattttgtaaacaaaacaaggtttctatgtggttaatggaaacttaaaactttcgaattaaatatttctctcctataacataattctctacatttattaatccatcacctacttggacagttaggacatcgttaagttagacattacgaagttatcatatggagccacgacatccaatagatgctttggttttaataagacttaaggactaactacattggacaatactcagacaacaactaggatggacttaaaatccggacgtgaaaacgaaaagactcaccttagactcggacatccacacggcgccgctctgctgcagatcgatcgaatcgcgcaactttcggtaccaggactcctcgtcgctcaacgcgatctgggtgctaaagatgtgtgaccagacgcgctccagtttctggcactgctccagcagcttcttggagctcttgtgtgccgccttgggaagtccgtgacgcagctgcttgatcacgtgcttgctgtctgtcttcaggaagatcaccaccggatagaactgcgcgtaattgagacgatccactgcattgggcgtaatgtccagcagggcgtgctttccacgatccatcacatcgcgtatattcgagagccttacgatgcggcactttccactagttgcggctgacttgtcgtcatcctgcagtggagtcgaaaacttatcggggaaatctttggccaatcgctcgcgggccaaatcggatacgggtccgaagagcactacgggtcggacaaagcctggatggcgcagaacgacacgctcgtaggcggggaatttggaaatgctatcggagaagaccacatcgtcccagttctcgcgggacagactcttcgagcgtcggtgcgtcgaactgttggtaaataaataaaagttattaaatattctttttatatagaatactaatggactcaccgtcgtcgccggaagaagttgcctctcgattcatttgcattcatctccttcttggtggcattgaactgagcagtggccagctcttcagcccgcgacttgttcggtattacgccgcgctgcatctcctggtgaccccgaccgatcttcagcacctgccaggatccgaccacaccattgtgcagggtatcgatcacccggaaaacatcgcccgccttgaaggccatctcgcctttggaaggattatcgcagtggaaatgtgtcttgatgtggaaggagtcgccacgttggttggtcaccacctcgtcgtattcctccttgcagtactgcacaatcagatcgatgcgatcctggagactcaacaggaagagaacagcctcctcgcgcgtcactccgttcatgtccatgtcgttgaccttgaggatcttatcgccaggcattagaccctgcagcgaggctggagatcctggttgtacggcagtcacaaaaataccagcttcattgccgccggttagccggatgcctacgcttccttccttctggaaggaaatgaatctcggttcggcactctgacgctcctcgtacaattgcctgcgagagctgtagaaatcctcttgagctgctcctccgctcgatccccttggtggtggtggacgcggcggctcgtcgatggctgcactcctgccccgagtcggtgttacgggtctatccagttgctgcagggataccccatccattatggggccccgggagcgacctcgcggcgtaagattactcttttcgtcgttcaggccattgccattgatattgggaccattggaggtgcgagttggcggttgcacgtacagattctgcgaggagtaactggctccgcccggcagatatggatcttcaagattgttgttactgctgctacatccggatacctgaggctgatgcgtggcgtatatatttcccgacgcctggtggctggctgaattgttcagattcaattggctaacagctgtttggttggtaatgtcccttagaaccactaggttcaatcgctccttgcagccatcaatgatctttttcgcctccttaagactcatcgtatccccgcagttagtattgtggatgcgggtgatgatgtcaccctcttgcaagctataaccattggcatttagttgctcgcgagctttagaggagatctccttaacaaacagccggcagccgagcaccacaccatagtcatctttctttccgcctttggtgagggtcaccttgatgggctgaccactgctggcattctgcactagggaagagttcagcgagttgggttgactcagactcgtaatgggggttggcgccactcctccacttccattggccattagaccaaccgaactgagactgtgtgaatgctgatgctgcactgcacctgcagcattaatgggattgaggggcacgcgacgcttgaccaccaattgcaccgtgttgccactatcgcgtaacacctgcaccgcggtagcatattccacgttctccagagagacgccgttcaccgagattatccgatcgttgactctgcaaagaggaataatagaaatggttttagtgccagacataataatatggatcacttggcttggctaagtaattgtcgggtagaacgtaaaccctgccctaatgaccgaatcgtgaccaaactaggagaacagaagtttctgtttatatgcaggtcattagaagcgaccttgtccatttttacacagtcattagacctgcagccataattaaggaaacattttgtgatagtcgcaacttggaaatacccaggaaatatattcttatgctttgaatagtttgaaggtaactttacatagttatcatatcagctattcaataattaaaatcactatcatgttgacctaaataaatatatatatattaatgaaataaatagggttatcgtggacctgattgcatttactcagtgtcacagttgagtacagggtattgaaagcagtagcacacctgctacatcagctgcagatatatttcgtttcggatcattgagtgcaatgcgatcggacaggtaaagatcacacttctcactctcaatccccctcagaaacttgaagtgaaatcaggttagactcggattgaaaacatacgctaataaaccgacaattgtctgagttcttcggcatgactagactggaagtaatggagaatcgaggcgtctgctataagcggcttccatggatttctgaggaatatctctggcggtacttggtttatttgtacaggccaggcctgaacaattacggtccgttcttggaacggaacaccgaagtggaggaatgaaaagtaaaaattttatagtaaatagcacatgacgaattaatgacaagaatgttatactttagatacagatacaataagtgtgtgttgctctgctctcgtcgcggcagacaaagtgcctaatgatacaaattatgttgcatgtctgaggcgaaacataaccgtaattaagttgtctacgagtgcagaaagaagcggcagccgaacaaagtcaacctgagcagcgttttactttcggttcgccatggatggaaccattgggtctggtctggtcggaactcggagctcggagcggcttaacgattaagccgtccaaaaatgcggaaaatgcgccttggaatgccagaagttgggtttggaaaaaccctgttatgtgctgaggaaaaatgtgtttcgcaagtcaacaaaatataaaagttttgatttatttcattaaaaattaggtaggtaagttgtttgtaatcctggttaggatggtaatagaaaaaaaacttatttttgaatgtctcaatgcgaagtaatattttttctgagtgtgtactagttactgagctgcgtaacagcgaaactttgaccacatgctcttagccaacttttcagaaatacatgtgctgggctgcagctaatttccccttgtctccgctcacttggccaacaattttccagcctcggcagcggattttccttttgaaatcctccggcagtcgcaggtaagggacaacgtgaaaatagttctctgcatgtctgggccagggtaaatagtttcttgggaaaaaaaagattatgacaagttcgtaatcactagggccgcctctgcgctgtctattgaaaaacgctttggaatttttattatcgccaagagagaaacagcttcagagggaccgagttgtcgagttgccgagacgttggtttaattaaataccatttctttttggggaccgactctacgtgagtttgaagtattgaagtgtgcgcatttcgggtttatatttgtagaagtgggtatataaaagtataggttctaagcgcaaaattaacgatgtcaattgtcagcagcatgtcgggaatttataatgcccgtttttcgtttggagcagtggatgattagttcttatatgctttatttgatcagcctgcatgggggtctattcagcatgtcggacttattcgggaacaacaattagtttcctgtcagataataattcaaaatgcattggaaaggtttacttcctacagggtcagtaacttctgttgaatcatcgcgagggtacttactgcaatcgatcctcggcggggccacctttcagcacatcgctaactgctatcgagggatcgccgttggcgaagtgcggattatcacgtccaccggaaacggcgatgccgaatccatagcccggcacccgagtcaccgccaccgtgtggtactcccatgtggttcgatcaccctggaaaatcgagaacaaatattgaattcgttagatgattttaaattttaaagaaaaagtacacataaaactaaacaaaaagcgaaataaatgatttaaaaattgtagtaaaacttgttgtgtaaaatcttttctctttgctgccattaccaatttatttcaatatagtttaattggaattgaaatttgttaaggacggctgccaggcggaaatgcacatgtgacttccgcatttccattacttttacacactcttgtatgcgacctgttgcccaggccctttgaaagacccatgaatgtttagccactcggacacgattcaattttatgcactagaggttccagcagaagtgcgtaaacggggtagtggttagttgtaaaaataatggtacaaataatgaaggaaatatgacttgttgggtgtgcactcgctgtgactgaatgggtatttgtggagtttactatgcatttgttgttttttttttttgactgagacacctgacacaaaagcggaactaaataaaactgaaaacgattctatttggaaatgccacgaatgaagttgaatttacatacataaagtcagcaaagataaaaatatttctgggccgtacatacatatatcattttgtgtaggacaaaagaattggggaatgaaagatgtttgggatgaactagaaatgtgagatataaacatataaatgtactttttaatggctcgggtaaaaacttaatttctcttctcaagttttcttttttaattatgaataatggatacaaagaatttttatatgactgcatttataattctatttaaagtgtaatgctgggaaaagcaaatacactgcgttcggcattcaacaactcaactaaattaatgatttcaatcggctggcacgcacttcctcacccaatttaccacctgcaattacaaaatcattttagtttgacttcatttaccctcacagcaggtgcgcggggtggaacccgaatcacaattcgacacacttcccccatatgggcgactaactcaattgagagatccagctcagtcattacacaaatccaatatacaatgaaaataaatcaattaaagtcgaatcccatcatgctgttgcccaatccagtttgcattcacaattcaacgtgattcactcgacaaaactccacgaaaaaaccattcgaaaatgcaatcaattgcggatctgtcgttcagcgagccagccaatcccctaaaacaaaaaaattaaagcgaaattttcatgcctgtctcaggtgggcgccacaaaccaacaaaaaactacatttcattttaaaagacagacgcaacacaacgcatccaattacaaaaactcggagtaacattccacgcgtgggcttgtataaataataaacgaaattaactaacaaaaatacaaatttgtgtagtcgcgtgggccaagctaaagctaataaatatttataaagttatacgtctgctgcaggtgtagctatgtatttttcaacaaatatacggatttgcatcggactgactgcacatccacatctgctcagaaatctttggttatgcttggcttgcataaaacaaaaataaaaccaagggagccgaaaacatgaaagaagatatatgaatacgtttgctggatttttgaccgactttgtgcattttgatgggggcggtaaaattataattaacttaattgcaagtgaaattagttgaaaatttaatggtgtgcagcagaagtaaggcgtgcgttaaagactttctttatcctgaatatggcccataattaatcttgtcgtgtgtgcgttgccaagttttcttccaacgaagttttgttgccaaagaagttttttcgattctatgtagtagtaaccaccgtaaccttcatctgctacagcgcaggcattcatcagattgtttatctggccggttctaagaccccacccttctctttagtcataatttaagtagcgacctaatgatttatggcccagttacacacactcttaatcactttaattatagggaaaaacactaagaaactaagatgtttgcccctggtttttgcttaccaccaacatgttgtttggaacataatccggaaacttcatcgtgtttgcttttatttggtttcgtttcgccgcaaattgaaatgtatctcaaacaatgcactttgagcgaatcaaagcaattaatttgacaatttaattggattcatatgacatgtttatagggagtgtgtaatctcacttgtttgcattgcgatatgaatgaatgcacgtaatttggtcacttgaagcacgcacactaacaccgaaaataaatataattttttacaaatgggaataataaaaacacaacaaagtaaataaagtgcaaaagccgaggaattttgcgataataaagtttcgaagctgatgtcactttcaattgttgttaacacacacgaaatggttagctgaatttgtcaattcatctgtggaaaaccacagctaattgaggtaatcatttataaataaacttttacttatttgctgcaacttcacgccatttaaaatttggtttcgatttcagtttcgaactcgattctattcgatttgattggaagtagctttgcatatgctaatggctggttggcaagaaatatctgaacgagccgtcatcgagtggctctcgtagatactttacactcccataaagtttcggtgcaaattagcatgaatagtcaccaacaccgtggcaatcgctacgtggatagcaaaagtagctcatagatacaccgaatatctctctctttatagagacatttgcatcgtgcaaaaggtttcttgccgtcaagagccaaaagccaatgaccagcaaactttgcgttgcaaatttggagcggcgtgcaacaatcgctcgtatctgtcggatgcaccgaaagtgaaatgttcacagctgcgctccgctgagcattacggattgccttttaggtcttggattgcggattgcactgggctaaagtttctgtttgccggttgttagaaaaccctagcgattcctgttgctatatgggtattccttctaagggtttgcaaatataccgatttttgactttatttatctaattaataagatttgttgcaaataacatctgcattttgactttgagttttttatctttttctcttgtaaccttttgttatgtatcttaaggtttagtagcttaatatttttcgggagtatcttttgattataatgccactgcgcacttgaataagctgagccaacttattaactttaacactttcgtaatgaaccaacacaatacacacagcagatggaggaagaagggtgcagatagatatacgaatattcgtatctctcggatacgtcgcgccgtcgcagttgtccgctggcggcaaccgttgacgttgacggcttgaaacacgcttcgaaactgtttttacctacgattgtggactcgtcgatgtggatgccaaatgccagccagcaggcaacgcgatccaacgaacgaaggcgcagcgcaaaacaaacacgagaataaataccggaatgtgtgtgtgtgtgtgttgtgtgctgttgtatctgtgagatatgaacgtagctgtgtggatggtgttggcggacatgggttccacttttaaattaaaaggccggaaaggcgaacaagtaaatgtaaacaaaccgagaatgagagccagacgactagaaaatatttgataaaattgtgtatgaaagagattttcagattggagtttcttttcacaaagtgcgggtctatggagaatgtctgtgtgtatctctttgggtgtggaacgtatctgtggattaaagaaaagggctatgatccggtttaatgtctggaacttctgctgaggatcaaaggagatgtgccacatcaaacaaagggaggaatttcatcatgaattgaaaatgaatggggagaaatacaaaaactttcaatacaaatgtagaataactaaaaaaaactaaatctgcaattgctgcaaagaatcaaacacttcctcaatcgatgcaataagtctccacctattcaaagattttctcacttttgaagtgctgaaaagttgaaaagttcataacttgagaaaggcaacttcaattcaattaactctctctctctctctctctctctatctctttcgttctgcccgtctcgaaaccaatccgaaagatcatgtgcagccggtcaacaatggcatattaattcaatcaagagatcgcttattaaacgtttaaacgtttaaagtgacaaacatgagaccccggagcgaaagagccacagagatcactccattatgcgactactgaactgaactgaactgaactgcactgaagtcgcgagtgacacaagaatattccgtgaattaaattctgcacattgaagtgcaagcgatgcagaaattgctgcattcatg

SEQ ID NO: 20648 - DNA, 5279 bp, DROSOPHILA
cagtttcgaagcgtgtttcaagccgtcaacgtcaacggttgccgccagcggacaactgcgacggcgcgacgtatccgagagatacgaatattcgtatatctatctgcacccttcttcctccatctgcttgtgcgtgcttcaagtgaccaaattacgtgcattcattcatatcgcaatgcaaacaagtgagattacacactccctataaacatgtcatatgaatccaattaaattgtcaaattaattgctttgattcgctcaaagtgcattgtttgagatacatttcaatttgcggcgaaacgaaaccaaataaaagcaaacacgatgaagtttccggattatgttccaaacaacatgttggtgggtgatcgaaccacatgggagtaccacacggtggcggtgactcgggtgccgggctatggattcggcatcgccgtttccggtggacgtgataatccgcacttcgccaacggcgatccctcgatagcagttagcgatgtgctgaaaggtggccccgccgaggatcgattgcaagtcaacgatcggataatctcggtgaacggcgtctctctggagaacgtggaatatgctaccgcggtgcaggtgttacgcgatagtggcaacacggtgcaattggtggtcaagcgtcgcgtgcccctcaatcccattaatgctgcaggtgcagtgcagcatcagcattcacacagtctcagttcggttggtctaatggccaatggaagtggaggagtggcgccaacccccattacgagtctgagtcaacccaactcgctgaactcttccctagtgcagaatgccagcagtggtcagcccatcaaggtgaccctcaccaaaggcggaaagaaagatgactatggtgtggtgctcggctgccggctgtttgttaaggagatctcctctaaagctcgcgagcaactaaatgccaatggttatagcttgcaagagggtgacatcatcacccgcatccacaatactaactgcggggatacgatgagtcttaaggaggcgaaaaagatcattgatggctgcaaggagcgattgaacctagtggttctaagggacattaccaaccaaacagctgttagccaattgaatctgaacaattcagccagccaccaggcgtcgggaaatatatacgccacgcatcagcctcaggtatccggatgtagcagcagtaacaacaatcttgaagatccatatctgccgggcggagccagttactcctcgcagaatctgtacgtgcaaccgccaactcgcacctccaatggtcccaatatcaatggcaatggcctgaacgacgaaaagagtaatcttacgccgcgaggtcgctcccggggccccataatggatggggtatccctgcagcaactggatagacccgtaacaccgactcggggcaggagtgcagccatcgacgagccgccgcgtccaccaccaccaaggggatcgagcggaggagcagctcaagaggatttctacagctctcgcaggcaattgtacgaggagcgtcagagtgccgaaccgagattcatttccttccagaaggaaggaagcgtaggcatccggctaaccggcggcaatgaagctggtatttttgtgactgccgtacaaccaggatctccagcctcgctgcagggtctaatgcctggcgataagatcctcaaggtcaacgacatggacatgaacggagtgacgcgcgaggaggctgttctcttcctgttgagtctccaggatcgcatcgatctgattgtgcagtactgcaaggaggaatacgacgaggtggtgaccaaccaacgtggcgactccttccacatcaagacacatttccactgcgataatccttccaaaggcgagatggccttcaaggcgggcgatgttttccgggtgatcgataccctgcacaatggtgtggtcggatcctggcaggtgctgaagatcggtcggggtcaccaggagatgcagcgcggcgtaataccgaacaagtcgcgggctgaagagctggccactgctcagttcaatgccaccaagaaggagatgaatgcaaatgaatcgagaggcaacttcttccggcgacgacgttcgacgcaccgacgctcgaagagtctgtcccgcgagaactgggacgatgtggtcttctccgatagcatttccaaattccccgcctacgagcgtgtcgttctgcgccatccaggctttgtccgacccgtagtgctcttcggacccgtatccgatttggcccgcgagcgattggccaaagatttccccgataagttttcgactccactgcaggatgacgacaagtcagccgcaactagtggaaagtgccgcatcgtaaggctctcgaatatacgcgatgtgatggatcgtggaaagcacgccctgctggacattacgcccaatgcagtggatcgtctcaattacgcgcagttctatccggtggtgatcttcctgaagacagacagcaagcacgtgatcaagcagctgcgtcacggacttcccaaggcggcacacaagagctccaagaagctgctggagcagtgccagaaactggagcgcgtctggtcacacatctttagcacccagatcgcgttgagcgacgaggagtcctggtaccgaaagttgcgcgattcgatcgatctgcagcagagcggcgccgtgtggatgtccgagtctaagccagtagaatccctctccgacgatttcctattccccatgaccacatcccgactctcgtatgcatcaagtcccgaatccgatttggaactgagtcccggcccatccgcatcattgtcgcttggcaatttgccgcagttggttaaagcgagctcagatccatcgattgccactaatcaggataacttggatagggatagagacataattggtgaaggactaccacctccatatacggtaccctacgaccatgctgtccccgcgaatcccaatcgccgccagaccatggactccagcaagtacagcatctacggcaccaatgtgccaccacagcagcagcagcccggcgttggaggagatacggctgcagtgagaccgcaatctctgtacgggattaatgctcccgatctgccgccccgcatcgatcgtcagtccaagccgggcgatataccactgaacacctcgggctcatcgtcgcgaaatggcaccctgggtcgaagtgcccaggagcgtctgtttggcaaggctgtggtgcaggacgatgtccaggcggagtacataacccgaaacgctctggtcgggtctggagctgcagaaaccctggatcgccagcagcagcagcagcagcagactcatgcatccttggagcgccaagcgcgtttgaatgcgcagctaaaggccaacggagtaggcgccggaggaggtggtgcatccacctacgacagtgtgtccagctacgactcgtacaacaatacacaaatggccatgcaaaacctgggccgactaggtcccaatgcacccgacgatctcaaatcagtgccaaatgcaaatggtcgccccttgcctccgacgggtcagtcgcacgagtacggtcgcactccgcacgatcatcgcagcttcggaggacccaacgatctgaaccggcagagcagtccgggcaggccgcactaccatgacatgaatgcgtcccgtaatatcgatccacgcaatggcacaccacagcgtccttcgaatctgggcctggaaagcagcccacgcaagcctttggtggagacaaaaacggattacggcaaatacagtcggaataactccgtaacgcaagcggattatacaaagctaccgaagactgcgccacatggagtagttcctccgccgaatgtgagcaatggccagggccagatgaatggcagcggaacgccgagcagcaatggcagtggacccttcaagccggtgccaccacccaaacccaaaaactataggccaccggtgcaaagtggtggtagcagtggcagcggaggcacaactccttgggagaatggggactctggttcgccccgttctccgaatggcttctattatccaccaacgccttcgcatcatcattacggccagcaggcgaccccgggttcacccagcaatggccacatgcagccaccaccaccgcagcagcagcagcccacctacggcggaagtaatggcaactatggccaggcaccaccaccacaatcctatccgcaggccaatggctacaatgggaatgggcatcactacaacgggggcagcggcacaggaccctatattgcaccacatcgcggcatgccaccgccaataggaaacctgccgcctcacacgcccgaacgtcatgctcttgacttggccggaagtcgggagcagcgcggttcggccttcgaactgtatcgtaaaccgcaaatcggagctaccgccgggcaccatcacaacatgaggtgtgagacaatgctgtcaccgttggtgatgtgcgggccgcagggcctcgagttcctcgtaccggttacgctcaacataccccactgcgccggacgaactgcatcactgggactggccctcaaggcgaccgatagcgagaagaatctgcacaccgagtgggacaacatcgacctgcccagcaatgccgccgctcacacggtctccgtcaaggtggatcacttctaatcattaagattcatagcactaccattcaccagccaacttgaacgatatacgaaattgtaaatagatccgtagtatcatatgtgtagtcttagggccgcaattccagggcagacgaaatgagctgagcaaagaggtagtataggcattgcttatataatataataaatttaattcgatattgtctgttaattgtgcctttaagtgatcgtttggctctgcctctgaactattatatcgagctagaaattaatcaatcgaatgcaatggatacttgtataaagcgactagaatttaatttcatacacaaattattttgtatattttaaatcatccaattactatgtattttaaatgtattcatatatttaacgcattttaaatgatatattcgacattttattagatattcgcatattgcttcgacccatgatcaattttaattgcattcaaattgttaaatgcgtgcaagtattgcatgctaaagttaaacatatataccatttataaatcgtagcgatatccttagagcctatacacacacgcctgtataaccagaaagaaatcatactttataaatatttatacgcatttttgaattaaagattatacacacgtgg

SEQ ID NO: 20649 - protein, 1445 aa, DROSOPHILA
MKFPDYVPNNMLVGDRTTWEYHTVAVTRVPGYGFGIAVSGGRDNPHFANGDPSIAVSDVLKGGPAEDRLQVNDRIISVNGVSLENVEYATAVQVLRDSGNTVQLVVKRRVPLNPINAAGAVQHQHSHSLSSVGLMANGSGGVAPTPITSLSQPNSLNSSLVQNASSGQPIKVTLTKGGKKDDYGVVLGCRLFVKEISSKAREQLNANGYSLQEGDIITRIHNTNCGDTMSLKEAKKIIDGCKERLNLVVLRDITNQTAVSQLNLNNSASHQASGNIYATHQPQVSGCSSSNNNLEDPYLPGGASYSSQNLYVQPPTRTSNGPNINGNGLNDEKSNLTPRGRSRGPIMDGVSLQQLDRPVTPTRGRSAAIDEPPRPPPPRGSSGGAAQEDFYSSRRQLYEERQSAEPRFISFQKEGSVGIRLTGGNEAGIFVTAVQPGSPASLQGLMPGDKILKVNDMDMNGVTREEAVLFLLSLQDRIDLIVQYCKEEYDEVVTNQRGDSFHIKTHFHCDNPSKGEMAFKAGDVFRVIDTLHNGVVGSWQVLKIGRGHQEMQRGVIPNKSRAEELATAQFNATKKEMNANESRGNFFRRRRSTHRRSKSLSRENWDDVVFSDSISKFPAYERVVLRHPGFVRPVVLFGPVSDLARERLAKDFPDKFSTPLQDDDKSAATSGKCRIVRLSNIRDVMDRGKHALLDITPNAVDRLNYAQFYPVVIFLKTDSKHVIKQLRHGLPKAAHKSSKKLLEQCQKLERVWSHIFSTQIALSDEESWYRKLRDSIDLQQSGAVWMSESKPVESLSDDFLFPMTTSRLSYASSPESDLELSPGPSASLSLGNLPQLVKASSDPSIATNQDNLDRDRDIIGEGLPPPYTVPYDHAVPANPNRRQTMDSSKYSIYGTNVPPQQQQPGVGGDTAAVRPQSLYGINAPDLPPRIDRQSKPGDIPLNTSGSSSRNGTLGRSAQERLFGKAVVQDDVQAEYITRNALVGSGAAETLDRQQQQQQQTHASLERQARLNAQLKANGVGAGGGGASTYDSVSSYDSYNNTQMAMQNLGRLGPNAPDDLKSVPNANGRPLPPTGQSHEYGRTPHDHRSFGGPNDLNRQSSPGRPHYHDMNASRNIDPRNGTPQRPSNLGLESSPRKPLVETKTDYGKYSRNNSVTQADYTKLPKTAPHGVVPPPNVSNGQGQMNGSGTPSSNGSGPFKPVPPPKPKNYRPPVQSGGSSGSGGTTPWENGDSGSPRSPNGFYYPPTPSHHHYGQQATPGSPSNGHMQPPPPQQQQPTYGGSNGNYGQAPPPQSYPQANGYNGNGHHYNGGSGTGPYIAPHRGMPPPIGNLPPHTPERHALDLAGSREQRGSAFELYRKPQIGATAGHHHNMRCETMLSPLVMCGPQGLEFLVPVTLNIPHCAGRTASLGLALKATDSEKNLHTEWDNIDLPSNAAAHTVSVKVDHF

SEQ ID NO: 20650 - DNA, 5019 bp, DROSOPHILA
atttgccagtcatatgtctttagtatatctaccatatatacacaatccatatgtccgtgccgttttagttttgcttactttaaaaataaattatactccatttattgtcaaaaatattgacgactcgcgattgcattattcctggcattacacatgacttgtataatatgatttttaggtttacccctagtcttatcaaaagtgatctgcccaagtacttaggtaattgttttcaactataccaccttgtgattaggtgtgattaaattcaacattgcggtcagttagttttcattagccaccatatatcctgtttgtatatcctttttgtcagcaagtgcaatagaaacgatttcatcggagatgtagatgagtttttcgcatggaatgttaattaacttttgctcaagatctacgcttcaataatgaaatatttatttcatattattactctccctcggcggcgcaccgaacactacttgacaagtctatctgcatattctgggatgtttgtgggcttaataaaaatatacaatttcatattttcatgtgtatatccggtctaaatgctgcatgctttaggattttatttcgcaaacaagacttaaaaaaaaataaaagagaaatgctgcaggctcttgttgcttttcttatgctataatatgcaacccgtgcaaatatatattatgcatgtatatatatgtatacaaaataaactttgctttcacattgacgcttgcataaaaatgttaatcaaaaaacattggttttacttccatttttcttcgttttcctatttttttttcttttttgagacggggacatagacggtgcaattgtttggctgtgaatatttttgggcaggaatggcatggtataaatatgcggtacgtctaataagcagggtttaagggtttaaaagctaggctaaggattataaatggcttatgagttttgattaaatttaaattgtagttctcttggtgagtgtttatcatttcggtttatacttaggcacaatacatttattttgttttatttgtagttttcacatgacttttgtttttgtagctgtaactttttgctaaatattttcgcttcgcttacaactaatttctacgcataaaaacgtgtgtgtgtgttgtgaatgtgtaggtgttatggttaattttttttatatattatgggattagtttgcatttatctgcaataatttctactacatttaaacatctcagccgcttggcaattatttaaagcttttcacaatcattttcattatgcaaattaaaaaaatataataggattacaaattctgttcaataaataatgtaaaattgtttttgttgaacttgttacttacgcttaacgcgcattggtgtttctgttagttgtttgcatggctagcaactctcgttttcacgaagctgttttttttttacaaatattgcttaagtttcgcatgtggttgcttattaacgcaaaatgcatttccaattagtctgctatcattatttatgatagataaatcaaccggattataaaatgttcgcttgattgaggctaaataggcttttggctgggagtccgaagctggtcagttattggcccatatattcgcctgtaacccgccgctcgcctgttgtaaacacaaatttattttcaacacaaaacttaacgcacaaaactgcgaatacaaaagttattgaattataataggctttagggactttaaactatacacacacattttgcttactatcagcttacacacttttcgcttaggtttgtttttctgtttaacaaaatatgcgctaggttttctacgaatgctacaaagtagacaacaattaaaactttttatctgctttccttctgcttagttatgcatgctgttgtgttcttcttgaatcttagttaatttatgacttgcatcttcgcttagggtgattaactctccgcctgctgattggccgtaaactgcgtaatgccgtctttctccatcgactccagtatatcagccacatacacggcaacatcagtgtggctcgtctcgccacgacgtatgaagggcatctccagcagacggctatacttgggtcgatcgctctcctttttaattaggctaaaacgataataatgctttattagttactattattaagttttctaggctttactggtgcttaccaagtattgacaaagtccacaaactctttggaaaactccatgccgttataggatgtcaaaagtcgcggcggttcgccttgcacaaccttgaatgttaatattatgaaaaagtcattagccaaagaaaattagcttcagatattatgataatttactatatgaaagacaatacgataagacaatcagcaaataaaatgagtcattagtcaatgcttatctctattagattattcctaatgacgaaagggaacaagacgaacgatatttgtatctcattttaaaagaaaaactatcctattaaaatgttttatgtttacctggcacaactgctcgaaaacagagtcccatttacgataggggaaattaccagtcgccacctccattaatgtgatgcccaatgaccaaacatcgcttcgtacatcgtagcccttggcacgttctggatcaatgcgctccggctgcacaaatgcatacaattgcggtaaaaatgttgtgaaatcaaatgacaatcattaccgccatgtagggcctgcagcccgcatccttggtcttggcaatagagtcgaccagctgacccgaaataccaaaatcgcacagctttatgtctccgcgacggtgcaacagaatgttgctcggtttcacatcccgatggataatctttagctcctccttcaaatagttcagcgcattgaccgtggccactgttatcttagccagtatagactctggaatgtggcgctgctgcttttcgtagatgtacttgtaaaacttgtccaaagaggtgtccatcagctccatacaaatccagcagtcaccctccttgaaaagcgccccatagaactgaacaatgtaaatgcactcgttggacttcatgaccacctcgagatccatgagcagctgcttctgttccttctcgtctacggtggatcgaatgcgcttgacggccatcaccttgtccaatttcttaaaggtcatcttgttgactgccccaaatgcaccgcgtccaatttcgccctcatcctcgagatcgtctgaagtaaatgtgtgtgtattagcgccgccctcaccaaactgtagcttgccacaggcctgctggcgaattcgctcccggtgacgatcggcagcgctgctgctcgatgctgccggcaccggtggcacttgactgctggccaccggcggggtttgctgtggctgctgggcaccaaaacagcgggtcacatggttgtgctgtgatgaggaacttgagcccgaggaggtggatcccgaagaagtggacgacgtggacgagggcggatggcgtatgctaagattattcaggcttagctgatccgggggattgcgggagcgactggatccggctggaatgtgtgggaaatgggagaatttaggaggcttcatagatggcttatcgccgctgcaccagatttccaaactatgcgtcacccagcgagtatgtggtcctcttcggctgcatgtgtatgacctgcgtgggcggttcgagaccaaaggggtaactcacttgcaaacaaatttttcggtcgttcggccattgtgtgtggtggctgaaagtatcgatgcgcctttgtgtggctgtcctaaggatgttttgtccgttttctgcaggcgccgcgccccgaatacaacacgtcgacttgatgctcctttggccctccgatcgcctggttactgggccgcctttgatgggctcttcgccgtttgcaacgcaactactttttcagcaatcgagcgcactgatatgcactttttccgcaatttcgctaaacatttacataaatagcaaccaaaacttaaaagagctagagatgaaacattgattatttgcggccaatcgatagccatcgatagtatgcgcactagcttgcgataagcagtcctgcaaggtgcaaaagtagtgaggtgggtaataaaacgaatataaaaatgtcacctataaataattatttctttaaaaccaagagatttgagtttctatttttcacaaattaatcccagctttgttaaagtttttactagttgaaaagttacatttcgtcaataagtgacgtcgacgcctacataaaccaatctgcgccaccttaaaatcaatgcacaatcaccagtgatttaaaaccagaaaattaaaacatacataatcatgtccagcggatttgttcgcagcagctacaaattgttcgtcggcaacctgccatggacgataggtagcaaggaactgcggacctacttctcaaagtacgggcacgtggccaacgcggaggtggtctttgaccggcaactgggcctgtccaagcactatggctttgtggttttcagccaacgggatgccttcaacagcgccagcaaccagaacacccatttcctcgatggacgagtgctcacagtccagcgggcgaatgaaagtcctcagagttaatcaatgaagaatttaatgatttattggttagaccaaaggaaaagcatgagaaatgtttgttaacagcttagttttacacaaatgaatgcagcacttgcttcaaatcgtggcatctttgattcatttgggcaagtagaacttgctgttggtgcccaccacgtccgcaacattagtgtgacccagccgtgtgatcagcgccgacagctccgccttaatgtcttccacaagagcgggtccctcgtacactaaagccgtgtagatttggacgtaggaagctccagcttcgatcttttcgtatgcatcatagccggaagccactccgccgacgcctatgatgggaatctttccatcggtgagctggtacatctgggcgatcatctctgtggagcgggccttga

SEQ ID NO: 20651 - DNA, 2504 bp, DROSOPHILA
tttcatctctagctcttttaagttttggttgctatttatgtaaatgtttagcgaaattgcggaaaaagtgcatatcagtgcgctcgattgctgaaaaagtagttgcgttgcaaacggcgaagagcccatcaaaggcggcccagtaaccaggcgatcggagggccaaaggagcatcaagtcgacgtgttgtattcggggcgcggcgcctgcagaaaacggacaaaacatccttaggacagccacacaaaggcgcatcgatactttcagccaccacacacaatggccgaacgaccgaaaaatttgtttgcaaccggatccagtcgctcccgcaatcccccggatcagctaagcctgaataatcttagcatacgccatccgccctcgtccacgtcgtccacttcttcgggatccacctcctcgggctcaagttcctcatcacagcacaaccatgtgacccgctgttttggtgcccagcagccacagcaaaccccgccggtggccagcagtcaagtgccaccggtgccggcagcatcgagcagcagcgctgccgatcgtcaccgggagcgaattcgccagcaggcctgtggcaagctacagtttggtgagggcggcgctaatacacacacatttacttcagacgatctcgaggatgagggcgaaattggacgcggtgcatttggggcagtcaacaagatgacctttaagaaattggacaaggtgatggccgtcaagcgcattcgatccaccgtagacgagaaggaacagaagcagctgctcatggatctcgaggtggtcatgaagtccaacgagtgcatttacattgttcagttctatggggcgcttttcaaggagggtgactgctggatttgtatggagctgatggacacctctttggacaagttttacaagtacatctacgaaaagcagcagcgccacattccagagtctatactggctaagataacagtggccacggtcaatgcgctgaactatttgaaggaggagctaaagattatccatcgggatgtgaaaccgagcaacattctgttgcaccgtcgcggagacataaagctgtgcgattttggtatttcgggtcagctggtcgactctattgccaagaccaaggatgcgggctgcaggccctacatggcgccggagcgcattgatccagaacgtgccaagggctacgatgtacgaagcgatgtttggtcattgggcatcacattaatggaggtggcgactggtaatttcccctatcgtaaatgggactctgttttcgagcagttgtgccaggttgtgcaaggcgaaccgccgcgacttttgacatcctataacggcatggagttttccaaagagtttgtggactttgtcaatacttgcctaattaaaaaggagagcgatcgacccaagtatagccgtctgctggagatgcccttcatacgtcgtggcgagacgagccacactgatgttgccgtgtatgtggctgatatactggagtcgatggagaaagacggcattacgcagtttacggccaatcagcaggcggagagttaatcaccctaagcgaagatgcaagtcataaattaactaagattcaagaagaacacaacagcatgcataactaagcagaaggaaagcagataaaaagttttaattgttgtctactttgtagcattcgtagaaaacctagcgcatattttgttaaacagaaaaacaaacctaagcgaaaagtgtgtaagctgatagtaagcaaaatgtgtgtgtatagtttaaagtccctaaagcctattataattcaataacttttgtattcgcagttttgtgcgttaagttttgtgttgaaaataaatttgtgtttacaacaggcgagcggcgggttacaggcgaatatatgggccaataactgaccagcttcggactcccagccaaaagcctatttagcctcaatcaagcgaacattttataatccggttgatttatctatcataaataatgatagcagactaattggaaatgcattttgcgttaataagcaaccacatgcgaaacttaagcaatatttgtaaaaaaaaaacagcttcgtgaaaacgagagttgctagccatgcaaacaactaacagaaacaccaatgcgcgttaagcgtaagtaacaagttcaacaaaaacaattttacattatttattgaacagaatttgtaatcctattatatttttttaatttgcataatgaaaatgattgtgaaaagctttaaataattgccaagcggctgagatgtttaaatgtagtagaaattattgcagataaatgcaaactaatcccataatatataaaaaaaattaaccataacacctacacattcacaacacacacacacgtttttatgcgtagaaattagttgtaagcgaagcgaaaatatttagcaaaaagttacagctacaaaaacaaaagtcatgtgaaaactacaaataaaacaaaataaatgtattgtgcctaagtataaaccg

SEQ ID NO: 20652 - protein, 424 aa, DROSOPHILA
MAERPKNLFATGSSRSRNPPDQLSLNNLSIRHPPSSTSSTSSGSTSSGSSSSSQHNHVTRCFGAQQPQQTPPVASSQVPPVPAASSSSAADRHRERIRQQACGKLQFGEGGANTHTFTSDDLEDEGEIGRGAFGAVNKMTFKKLDKVMAVKRIRSTVDEKEQKQLLMDLEVVMKSNECIYIVQFYGALFKEGDCWICMELMDTSLDKFYKYIYEKQQRHIPESILAKITVATVNALNYLKEELKIIHRDVKPSNILLHRRGDIKLCDFGISGQLVDSIAKTKDAGCRPYMAPERIDPERAKGYDVRSDVWSLGITLMEVATGNFPYRKWDSVFEQLCQVVQGEPPRLLTSYNGMEFSKEFVDFVNTCLIKKESDRPKYSRLLEMPFIRRGETSHTDVAVYVADILESMEKDGITQFTANQQAES

SEQ ID NO: 20653 - DNA, 3884 bp, DROSOPHILA
caggtgatctataggggaccaacttgtcgtcgagggtccttttgtcccatccaatcgctgtgcaaacaaagcggcttaatttcctcgctattgtccgatcgatccgactccgacggctgcgaatggtgatcgaggcgcgtgtggcaggctggagttgcgtccgacttatgtcggatccctctctgggatcagcgatcgacgatcgtcgccacaacttcagtttgagtttttctttttgatcgtcgctatgtacaaacacccacactggaactcagcccatatgaaagagtgtattttcgacgcatgtaaacacaagtgttttgacttaattaaaaaatacacacatatgcatatagctagttatgaatataggttcgtctatatgaaggtaagaaacctaagcttggccaatctagctccaaacttcgcccaattctaatttcaaactaatttggtttctctctagtcaatgaaaaaccgtgatcgccagctaagtgctcttataatcctattaaaaattatattacatattctatacctatttttatgatttttcttaattgaaatagatacttgcttaaaagactgagatattgagcacagtttccattattactacatatcttctttaattaatagtaattaactagcaaattatttttttcttccgaaaattcagaattcctgaaactataaaccgcaaggaaaaaactagaagaatatctactgatagcccgcgaaattcaattcatgtgcaagatctcgggttaccagaaaaaaaaaacaacacacaactagaagtgagaaaattacttacatttttccgaagtcgagagttattttgctagctggctaaccagagaggcacctttgcccggaatcggaaatgaatatgagcagagtgtagtttctagggaaacctagagagttgacttgtttctctccttggctgaacgtttcgggtttccaggaaaatgtatagacttgctaacaacttcccaaatgtgggtcactgtggtggcaattgcaaatcgaagccgaagtttattgttttctgctttataaaaataaacacgctgtgtaaaaaataaaataaatagcgagtacaacgatgcattaagtgggcgccacacggactcagagccaaggcatagatcaattctgtatagctatttacatagaagtgccttagtcggttcggtgctaaactaatatcgcttagttcgatttaagctaatttcatataaactggtagtaagaatcgatgtcaagcaaatgcaggtacctcaattcggctaccgttctaacttccgaacttcaggggtcgtagttcgaagtacttgtccagcacttcgtccgtaatcagcttgcgggcggcctgatgctgttccacaatgggtgtgagcgtctaagaagatcatttgagcacattaattacaatgttttttgggaagattgtagcatcatcattgcacttacctcaactgccagcttcttgatctcgcccgtaagcatttcgcctttgctgtaagccactctcacctcctccaacttggcatcgtcctccaggaagaacttcaacagctgataggagacatcaacttccggaactccgcccagcttgcggtgctcctccacagatacgcgtcctccggagaaggcgtacttgttgatcttgttcttaatctgcttgggcgtgtccgtcagataaacagccgagttctggtcgctagccgacatcttcgtcttggcaccctgcagcgccgggaagaaggtcgaatggatgagcgcgcatttgggaaaaccaagacgtggagccacatcgcgagtcatgcggaaatatgggtcctgatcgatggcgcacgggatgaggcagtgcaccttcctgttgccgaagatgaaggggaaggtgctggaaatcgcgggagctgcttgagcggctgggaaaccaatcttgccaatgatgtctgagtccccgaagccaaagatgcccttgacctgattgaaggtaacgcacttctggatgcgaatgatgttctgatacatggcaggacattttctgtaagtaatatagataatacagattatacaggttaaaagttttttaatttacttaccccacgaattccaggttattaaaaatgaacgtcttgttgacatcgaatccaatggccacaatatccttggcgttttcacgtccaagcttgatggcatcctccactttcagatccttccacaaggtcttctcgtcgtcggtcaattgaataaccagcggcacatcaaaggtctcctgcagccacttggtcatgatgaagggcaccaggtggcccacgtgcagggatccggaactgggaccgcgaccagtgtacaaatagaagggtttgccctgttcgcgcagtgttagaatcgtatgaagatcccggtgcgagaagaacatgccccttcggatgaagtggtgggcgggctttcccgtgattttctcgaaacgcgcgataagctcctcatcgattttgctggagccaaaccgttctgcaacgtgtcaacatgtcgtttgattaacttgattaataatttgccttgcaaatgtcttcttacttatcagcttatcatagtcgacgcccgcgtcattactactggccacattccatggatccacaacatcttcagtgggtgcagtggctccctcctgtgcctgggcatccgtgcccgtttccacgggttctgcgtccggttttccatttagtgtcaacgcctccacgccctccacaaccgtctccttggtgtccgccattctgtcagtctgattgttaagaatttaacagataatttaatactggccagtgtaattgggcccttcacatgtgaaatgaggcgcttattagtgtcccaaccatcgattacaccatcgattatttcatctgctctcctgttaatggtaattgttatgctcaatttcaactgttaaaaatatcgataatgagaaatatcgatggattgcaaatttgctattgagtgacaactctggaaaatcagctgttgcgctgcaaactgtgggtgaaaaatgcaagcggataagactaatgtttttcgattaaaataaggaactaataactcagacaacatgcctatcatgtacaacacgggggagtggttcaaggtgcgaccggactactacaggtgggtaatcctaatccatccgttctatacaaaccaactgaaggatacgcccattaatcccattcacagaaaagtggaactggctacgcctgattggcctctggacctggacttggagtatatgtgggtggaagtggctccctatggaggaccactggcggtcactcgtgatccgaccaaattggtgccggtaaagggtaacgctagacccatgattcgcatctttgataccaccggcagggaaatgggtcacatattggtgagttaatcgaaagtaagaaatattatctcaaatattgaaatcaccgtagtggaaccatggcaaacttattgccatgggctggtcagacatggaggagcttatctgcatccaggagaacgccaccgtctttgtctacgacatgtttggtcgggaaaaggagtcctacagcatcggcgatgaggccagtgtcacaaagattgtggagggcaaggtgttccagtcctcagctggcacaggagtggctgtaatgaccacatccggtcgggttttcctcaagcagaacagcagcaagactgaaagaaagctgccggatattcccagtaagaaaaccattgaaataccaaaagaatattatgtcattgctcaacagattccagcatgaactgttcctgctgggagatcgtaaccgagggacgcaacagctactgtctgctgggaagggatc

SEQ ID NO: 20654 - DNA, 1689 bp, DROSOPHILA
cactaataagcgcctcatttcacatgtgaagggcccaattacactggccagtattaaattatctgttaaattcttaacaatcagactgacagaatggcggacaccaaggagacggttgtggagggcgtggaggcgttgacactaaatggaaaaccggacgcagaacccgtggaaacgggcacggatgcccaggcacaggagggagccactgcacccactgaagatgttgtggatccatggaatgtggccagtagtaatgacgcgggcgtcgactatgataagctgataaaacggtttggctccagcaaaatcgatgaggagcttatcgcgcgtttcgagaaaatcacgggaaagcccgcccaccacttcatccgaaggggcatgttcttctcgcaccgggatcttcatacgattctaacactgcgcgaacagggcaaacccttctatttgtacactggtcgcggtcccagttccggatccctgcacgtgggccacctggtgcccttcatcatgaccaagtggctgcaggagacctttgatgtgccgctggttattcaattgaccgacgacgagaagaccttgtggaaggatctgaaagtggaggatgccatcaagcttggacgtgaaaacgccaaggatattgtggccattggattcgatgtcaacaagacgttcatttttaataacctggaattcgtgggaaaatgtcctgccatgtatcagaacatcattcgcatccagaagtgcgttaccttcaatcaggtcaagggcatctttggcttcggggactcagacatcattggcaagattggtttcccagccgctcaagcagctcccgcgatttccagcaccttccccttcatcttcggcaacaggaaggtgcactgcctcatcccgtgcgccatcgatcaggacccatatttccgcatgactcgcgatgtggctccacgtcttggttttcccaaatgcgcgctcatccattcgaccttcttcccggcgctgcagggtgccaagacgaagatgtcggctagcgaccagaactcggctgtttatctgacggacacgcccaagcagattaagaacaagatcaacaagtacgccttctccggaggacgcgtatctgtggaggagcaccgcaagctgggcggagttccggaagttgatgtctcctatcagctgttgaagttcttcctggaggacgatgccaagttggaggaggtgagagtggcttacagcaaaggcgaaatgcttacgggcgagatcaagaagctggcagttgagacgctcacacccattgtggaacagcatcaggccgcccgcaagctgattacggacgaagtgctggacaagtacttcgaactacgacccctgaagttcggaagttagaacggtagccgaattgaggtacctgcatttgcttgacatcgattcttactaccagtttatatgaaattagcttaaatcgaactaagcgatattagtttagcaccgaaccgactaaggcacttctatgtaaatagctatacagaattgatctatgccttggctctgagtccgtgtggcgcccacttaatgcatcgttgtactcgctatttattttattttttacacagcgtgtttatttttataaagcagaaaacaataaacttcggcttcgatttgcaattgccaccacagtgacccacattt

SEQ ID NO: 20655 - protein, 430 aa, DROSOPHILA
MADTKETVVEGVEALTLNGKPDAEPVETGTDAQAQEGATAPTEDVVDPWNVASSNDAGVDYDKLIKRFGSSKIDEELIARFEKITGKPAHHFIRRGMFFSHRDLHTILTLREQGKPFYLYTGRGPSSGSLHVGHLVPFIMTKWLQETFDVPLVIQLTDDEKTLWKDLKVEDAIKLGRENAKDIVAIGFDVNKTFIFNNLEFVGKCPAMYQNIIRIQKCVTFNQVKGIFGFGDSDIIGKIGFPAAQAAPAISSTFPFIFGNRKVHCLIPCAIDQDPYFRMTRDVAPRLGFPKCALIHSTFFPALQGAKTKMSASDQNSAVYLTDTPKQIKNKINKYAFSGGRVSVEEHRKLGGVPEVDVSYQLLKFFLEDDAKLEEVRVAYSKGEMLTGEIKKLAVETLTPIVEQHQAARKLITDEVLDKYFELRPLKFGS

SEQ ID NO: 20656 - DNA, 15337 bp, DROSOPHILA
ttgagccaccaggagcaactgcagcagcattaccaggagccgcgcgactgggagcgggatcggccgccatcgcgcaagaactccaagcgcatcaggccggattcggtaatccacacaaccatccgtgagaaccagcagtacgtgccacagtcggatgccttctatccccaggccaagtcctcctcctcgcccagcgatcactcctacgccgagctaaacaagttcgaggacattgctagcaaatttgagcagatcccgcccaagcatggctccgtatccggatctggatccggttccctgttgaatcttcatcacaagatgcccagtccgggcagcgagtccgccgtcagtcccacggactccgctcgccggagatccttcaagaacaagcagcgccatcaaaaggaggagcacttctatatccagacggaggatcgtagcggaacagcagctggcaatggacccatcaacgtgaccgcgaatccgctggaggcagccgccgtctgcaagcagccgcgtgccaccatcgttgttcagcaggtgagttttacaaagaggaacttagtaggagggattgcttttcactttactgatcttgttctataaatattatccatgatgcgcattaatttcttactaaggatagtacctggctgtgtagtatcagttcccaggaaattttccaatgtgtggcgcgcgcagataatgagttcatattgatttatgggccggttctattgataatgtctttcgagcacatctataggaacatacagataacggaagctctctttgtccatctctccatcttcgattggctcccttgtggggtctccaatgcaatttcgctccccattatccattttccgtatatcgcaccgctttgtctgcgctctcacacccactcccacttttgctctctgccgctctctctctctcgcccgattttcacagctcataaaaaggggcgcgcgccaccgatctcgtcagttatagagagccatccgaaagcaaagcatcgccattaaagcagcggaaacgcgagaaatcagatcaaagtattattatctacagatcgtgttattaagtgccaacctgtttgtgttagctatgtaaacgcggtgccttacggacatataacgctataaaaaggataataaatcccttaaacaatttacaacaaagtttcctattccaaagtatataaattcggtgaattagtgtaaaatggcgcccttctacaagcgcatctgccgcagtctttccaagcgctacaaggaggtaactatatcacacaaatcttctagctatattgcctatgcgctggggaacatccgacaaaatccccaatccccagctgccgcttgattgattttgctaatgagccaacaactagtaggggggtggaatcaataagccttcagttgataagataccaagttgatgcaatgatccatcgaacagccgatatgcgagatttatcgagtaacaatgacgtcaatttggccataaattttcattcaagtccgctccgctttgcttgggtccgcgatagtggttatggatgaattcctgcatagatcggaattcggatagcttgttatcaatgtggacacccacttatgggggctgtggatgttattgctacacaatagccgtttcagtgaatgagttgctgacccacaatgaattttgtcgtaaataattaaaatgttgcaagtgacagcgaaatatgggggatattctttattattccgaacatctccccgatgacagatgtcaaaataaactaccacaacggaacgagagggacccagttgcccagtttgtagaaagtccaagcagatcgcaggttgtttgcgccttatttatttacttgcccacatcgggatcataaaaacatgaaagcaaaggccgccaaagtggtggcaaaaaggggcgggaacgtgtcgcagtgccagacaaacaaaaaaaaacatagatatagattcgaggttatttaacggtttcattgtaaatggcggtgagttagcattttattcctcgaacttttgcccattatgcataaagagagaatcgctgggcgtgttgaagaagtgcatatatgtatatgtgtagatacagatacaaatacagattcagatagattatagatgttcagcgcgaaggcatttcctggtgcaaaagaaaaacaacaacagatatagatatgtgtacagcagcatactggcaggaagagtataatgtaccattcaattgaattttccatccgaaacaatccagaagaaacgatgtgcggagtggagattttcccgagaaacaggcgaggcgcatcctccattatttagtggcccaacattcaatcaggtgtaaagtgtaattgtttctcgcgaagatcgattgcctccataagttgcagatggattcggggtgtgcgtgagtgggcatcgagacgtataaatctacataaattgcatgcgtcccagcgatacctggcgatttatctaccgattcacctccttcgattcagtttaccagctcaccttgtgcgctcctttggcgaattattagcaggcacgcacttggctggcgattgcagccttgtgggtggcggatggggctggttggggctgatggcgtttggaggttgtctaatccccattcccaccccttatgccatttccaccttcaaagtaaacatcggcagaaacgcaaacatgtttccccagtttttcccattgttggttgttgtttcctattgattttacattgagtggtcgaatggctttctttgatttcaggcaaatgtgtgagagaatgcatttgccgctcgttggccttcgatgccataaatcgcttaaggtttgtccttgctggatcttaaatttccacgataatcacccaagcgaatgaaatgaaactacaaagactaagcacaactaattacctattatttgtatcaccgaactacacacgttaattggccattatttcgctgcctcagccttcaaaggtcagtttccccaacatttcttggcactttcacttagcgccgcggccattcactcttttagttgttggaaatcgccagaattttgccgatcattgataaatgataaatggttaaaacggctattgactctgccagggccgaaaatccatatccaatgttactaattatagcgcgtttttggccaaacattcgccacttgcttgtggtcacggactcgattaggttcacctcaaccttagcactgcgatttgaacccagtaattggccaatgcccgaacagacctaaactttcctcgcagctggacgctgcgtatacttgataattgccaacgggtcggctacttaattcggccacttgatgccgcctctgatactctgtgacccctgcagctacttcataatcaccacctccttactttacctccctctttttgagggcactgtgtctctgggcagattcagtaggccattcggtgccattctgctcgaggccaattgccttataaagtgacattaattagttgatttatgaatcgcccccgcacacctgggcccgctttcatccttctacattgatggcaaattcattgaccccattcggtttggcgaaggctactactgcatttgctgcatcagcatctgcagctgcgtctgcatcggcaactgcactttctgcagcacagccataaataaacctttgctataaataaacagcaacaaggagatatagatatataagagttctgctcttgttattgtgcatatgccaaacataccaaaagtaatcgttcgcggaaacatttcccagcagcgcaaatagtttgctgcaggtaaataacctcagatgctgcactttgcacttccttggtcagctgtcagacgcgtgcacagttgcaggaaaagaaatcccccttatgagaagaaaacactcgaaatgtttcacttggtttttttgggggggataaacggtccatcacatcgcagacacttacatttcggccaacatcatgattagtgtgcggcgtgaaaattatggtgtttggaaaatcgcaatttaaacagcgtctgcctccggtaatgatatgtttttcacttcggccggaccccacatcaggttctacgagtttaccaatttatttttaatattcgtgcggcatgaaaatagccagaaaacgtggccaacccccgaccgctggctcttttcagccggatttcacaggcgattgaacacagagcggcgtaaaaatgaaacaaaaacatgaaaagtgatttgcatgcatggcgcgcgattattttcaatacatacttgccaaactaaatgtatttttaagcgatgccaaaattggagaagagcttgcaagtcgatggggtgtgaaatgagtactggcagctcctgtaatatcaattataatcaatgcgaacaatctgcatagctaaatctgagaacttgataacaatttctgtttgcattttccataaacaaaaccgaatctaattgcattccagtctgttcaattgtttctgggttttctcgtcttggttcgaaagcttattgaattcggccaatctgccatcgattcctgccactctgcacgtagactgcgtctttgacaatccaattcttttgggcatggatgcctcgctttcactcgattcgaaatttgaattcccaacattttatttgcctgtttttttttcggggagcgctacacattttcctaacacctcgagtcggtttgctttttaatagccaattctgaagcggttggatataaaaatggcgcggcgtagtactgcatagcatcagcatggaatctataagaatattccctgagaaaaatggtaaaaatgggaaaatgaatctgaaaaacaaatggttcttattttaaacttagtttaaaatgtccagaattacttaaatggtttgttgtcacttaaggctgacacgagctatgaaagctacgaatattaaatgcaaactatctgagaatagaactataaaaataattgttaagaaacttttaaaccgcctgcaatcatttccctttaaatgctaccctagaagttctgttcttcatcgcacttctttgctttttcgttttttcgggaactctggggtgtatgtagcaactttttcccaccccaatgcaatgcgctgctaaaaataatcgagaaaaaaagaaaacaaaaaagagccaacgcactaagcgatgcaagaaaaactattttcggcgtttgtgtaatggggaaaatgggaaatggcagccaagatgaaaaagagcagcgtcatagcagcatgtccaacgcaatattactcatacgccgcgtgtaacgcgtcactgcttgtacgatgttgggggactttctctttggtttcgtcatcagcgaaattgtcgcatcccctttcggcgccatcaaattgctcccctgggttggtattgccaaaaagtttccctgttggccacttgaaagacatgattcgagtgtgggaaggtctaaataggaggaactgtgaaatcgagagcctttagtgggcggaatcattagcgcccctcacacacacacattctcacattattaattagcgcttgggtggaaatgcaggcgaactttttccctttttcctactgtcatgcctgccaataaaatacacaaattaatttgggcatttgctgaataaataaatgtgcccatacgggtggttgggtgtgcgttctcaggtagacttttgcgaaatatatgtatattttgcgagtgctggtgtaatttatggtgcaagcatttctgtctgcgtaaattctggtttaatttacctgactggcagtcatttgttttctgcccaagaaacacacaaatttaaagccgaactttgatagagatttgtttattgtccgtttttgtttgcagcacttgaaagatttaaataatttggtttgctttccagaaagtacaatctctaatttgtttctaaaacagagaaatttgtatcccaattaaaatacaatagaaatggtaaatttacagattacaataaagattttcaataaatataaacattgcaattgtaaggggatttcttattgttaaataagtggtggcatttaaattgtatatacaactattcaatataaattcaccttcgaattggatttgtatgttacgttaaaagttagttatttccaattactgattttggcgaacgtcgatttaaaagatagtaacaaaggtcattatctgccaggaaaattaggcttgtagtagggcttattaggggttacattaggccctattatccatgagccaggtacaattctggtcaataatccttggccagttaaccgaaggcaaaacataaatttgcagcagtggaaattcacctcggcacgaacgccgggaactatttgaatttgcaactgcagacacgcaatgtagaggcttacggaattttttccgacttttgcatgggctgtcagaacacctgttcaaggtgtagataaagcaaaaagtttttttttttaaatcgttgggaaaaacccttgaagagtggcgaatccttggcgagtggcagagtgctactactacaaattcataagcccatggtggcaatgaatgaagtcatcggggcatgagcacttggtcgagtagttgcgattcaattggaaaaaacagcaatccgcttaacaatcaacgatacttccgacagtcaccctttccattttgatgtttcttctaccctctttacattttcttatcgctttttttcccccctctttttatagccctcgttaagtctggacaatacagtcgagacgctgctaatcaagaatgagggggacttcatcagcgtggagcagggcaaggagctggtggctcgcaagcgcaactcccagcagctggcacatccgccggcccacttgcatcaccacacccagaaccacgcccacaatcatcacactctccagcagcagcagcatcagcagcagcagcaacaacaacacaagcgggacgagaatatgaggcagctcctggatgtgaccaacacgctcaccattgaggagctgcgcgattttcagatgcggtatgtaagctggggcgatcctactgctccttctatttcccaaccgacctgacctttgacggattacgttttatggtccggccggagatttaatttccgattgaatgccaatcgatttttaagactctcgtaaaaatgctcggaccaaagcaatcaaattttaaatggccaaacggacaaacgaaaaaaagacaaaaacaaacaaaaaaaaaaaaaaacggaggaccgcttttatagccttcacctgccagccgttttgcattgcaacaaactggcgatgggaaaaaacgaacgagaaaaatccatgatgggctcataacttttcaaattactcatacgacctgttgccagtttgcaaagtttttttttccgtttttgtttctgtgaaaaatcagtggataaacaaacatttcggacttgctcgtggacgcagttcctgcatttgattgtcataaatgaggttttaaatattttaaatattccacaaacgatgctgcattgcattgaattgcatttcattagttgtcggtctgttcaagagatttggcactagaattatcaatattttccaatttctggcttgtggttagttcgtatcgacgcccaaggacactatgcatatgtcctttggcctgttggcattcacagtttccaaggacatggcaggtgaacgcagtgaagcgactgttggtggcggcatcgggtaagaaatgcatatcttgatctccattaaactgctgtcaactgcagttttggttacaactggtatgccgttgacttcttcccttttttaaccccgagtgacagaacacgaggatgtgcatagaggactcgcatttctagtttggtttttggtactaacaagttcaaccatgttcggatttcagatatggctcaccacatcacagccgctcgcaatcggtgaagatgcccggcagcagagcatccggaaggccaaatcagctgtgtctgccccagcagagatccaggtgggtgtcccacatccggtttagtctatatggttttaaccaattactcttggatttagggtggcttccatgccgaatacaggagtagaggaggagtactacagactgcgtcacttctcgatcaccggcaagggtgtggtaaatcgcggtgattccctcaagagccgacgcagtcgctccaacaacagcgtggccagttccaattccagcacggagcacctgaccacccagcagcagctttccgcccccgcatccgtatccgctcgaacttcgctggcttccagcagggagagcagtacatccaatccgggcaacggtccctacaggtgagtccgttttacggggaaagctattacatatttttgatttcgcaaactttttgtaagactactaaggctttaaacataatataattaaatgcgtaaactgagattggtaataaatattatttgccataacaaattgtgggtttcaatctgaatcagatacatgtcattagtcaatgccgcccatttaaacgtgcattgtaaatcagaatatatacattaaccagaaagtccggctcatatttaaatgcgttaccctctaaccttttgaaaacaaaattcaatggaacaatcaaaaggtcaagagtcacctcattagcattgaaataacaatagaaacaagagccaatcgacttcgatcgcttgggataatacaatagtaacataaagaggttgactaattggctttttccgctttcttatttcaccattccagggtcctgatgctgggaggtcctgcggtgggcaagagttcgctcgtctcgcagttcatgacgtcggagtacctgcacgcctacgacacgagcatcggtgagtttgtagcatgcccctccggagatgcttgcatccggattccctattccgtattccggattccatcccacccaagagcactgcataacccccagtaacccctgtatcctaccgtgtcattccatgtctgtctgctggttgtgagcgagtgctttggctttacttgatattatttcataattcatttgttggcactacctccgttttcctagtcgatgttgtagctgccttgctgtataattatgttggctattatatttgtttctgatttcgttgctctgtgtctgtgccgtctgtttgcccccgtatcatatggctttttatgattccgtgttcggaaagtttatattccatagctctgtactcgtactccccgctttttgtttggtttctttttgcttttggcgttttatgatagcgccgagctattgccaccgcccgatgggtcaacacaaattggcataaagcataacaaacgctgctgcaatgaaaataaattcggatcttttttttgggtttttgcgactctagctaggaatggaaaaaaaaaaaaaaactgaaaactgtttcattctttggctgggagtcaatgaaaagattcgaataaacatttctattggcacaaaggaaatatgggggaaaaaaatattcataaaacaataaatgttggcagcgaatggaaaaattaaatggaaataattttgtcgttcgtcgcttagttggaaatttttagtgcaatatttaacgatttttgtttgtgatcaaatccaaattccctaagatatatacaaatatagcaaacggtcccagtgtaaatgcttatccaatacacaaaacctcataacgaaaatccgcaattgtatcatactgttttataaagcaatgataatttgttctgtttctctccattccgaatatcaaccaatcatacaactcaatgtctcaaaactgaccctacaaaactcgaaaaactcaacaacaacaaccgaattaacaacaacatctttgtacatacaacaacaaattgtggttgtaatcagatctaggcaactgtgatatacgcattctaattgaaaaagccgccgacggtaaaagcaaccagcaacttaacaaaataattattaaccttgttaattatgctactacttaatatttattcaaatatctctatacacctaattgaaacgcttttcgactctccaattaaattaaccaaactcaacaaactagccaaacacttgatccacaattgcattagccctgcgcttgaaagctaataaaaaaaactccgaaacacacctggttccgcccactagccacgccccggaagttagaacactcctccctccccaccgaaaaaccgaaaaacaaatataacaccaactagccaatatatagagcatataatatatagtcccatagaccgctccaccatcgattgccattgtttcgcttgtgatttatggccagccagccagtcgatggacggcagccttgagggcaggcattcgatatgattgaaatgattatgcacatcacaaacacaactaatgaaatttaattaatgatatgccgggctctgcaattattgattgccacctggggatgggaacggaataatggtcgtgccatatattcaaaactataaatgccacaacttcaactatagctatagcatttttaattaaaaaagaggcgcacagagagcccattaaatgaataataattgtgaaaacactcagtccaaccaaaacaaagtcacatttacccagccaccttcctttcaccttccatttacccatttggtcagatgacgactttttcgcccagtccatgttgcgcgtccatttcgttgcacacttgtgggggccaatttaatttcccatacattagcatacatttcggggcagtccggtgtggacatccggtgaatccccgcagctgtgttcattcaacttggctaatggatatatccaaatactcgatactcgcatgcagtggacgacacttgtagataagcccatcacagaaaacatccaactaaaacacctgcacatactctttgtttctgcactttcgagaatagatgttgtaaatcatttcattgcttgacatttgagctatcgaacttaagagtatagtttggcgcacatgctaatatatcggtgctaacctcgattttccccttcaatgtgtgcagatgatgagtccggcgagaaggccgtttcagtattactcagtggcgaagagtccgagctgattttcatcgaccatggatacaccgaaatgactgtaagtaccttacaaaacactcatcatcctctcaagggtatgggacagtggtcacaataacgcagggatatgcataatttaaaagcaatacatttttaaatggaaataaatttcaaatatttgaaaacaattttagtttttttttgtacattttttttttttaacatctatctatttgcataaaaggcaagtgcttttcatagtgcactttaaacaaattgattctctaatggacttaggtgctttcgaaacacccattattatgcagcctccaaagccttgttgccattattgtgaccagtgctattatatatacatacatacctgctcatccatccggcgccctgcactctatatgtgacatttcataatgccattagcatgcacggccatcaacttacccacacagaagcgggaaatcacactttggcaaagccctcaacctcactcaatgtcacctcggtgtcactgccatttctccatcctttcacagccggatgagtgcctgaccaactacgatccgcacggttactgcgtcatctattcggccgcggacaggagcagcttcagtgtggcggagcaggtgctgcaggtgctctggaccaatcagaacatcgcccagaaggcagtcattctagtatcgaacaaggccgacctggccaggagtcgactggtcacctctgaaggtaagcgacacgttataatgctaataaatatgtgggaggatttcggttatcttcccctcccccattaacactggaaagtgcgctcgattgggtctgttacgaatagatatacgagtatatataaacataacgatatatagttcgagtgtataaacagaaccgtcgtgcagggtcagctgaagagtttgccaagcggaagtcatccggcggttcgcctacccaaacagccggaatcttaagtggaggtgattccgcacccccccccccccttgaaggtcgacagtttcgggggtcctttttgtctactcaagtgctttcacttgacttttatatcagattccctttaagaccaaggtaactcgggcgctttcatctaagtaattcaatattttccgttaaattacgtttgttattatgaaagtaagggtgggtggtgactggaagggttccccagttctgccagtaaaatggcagtggagggaaattgtttcagcgcaaaattgattacatttcgtcccgtgtggcatgtgttccgctcaaggcttaaggcccataagcctattgttgtaaacagggcgacaacaggacctacattcgccacccactacccaacgcccacatccaacgcacaatcttgaatttgggcggagagttcctgtccacctaatgcgacgccctaatttcataaagtatttatagaattttgtatgcctctggcaataataaaatgagcgcttggcccagaaatgtctggataaaagatatattcataaatctatacattgtcaagctgattggaaaaatatgaataaaacctaagtgcgtcacaggtgattctgccactccacagactctaaaaaaccttttgaaaatttaatgtattttccatttccacctcataactttttggcatactaatgacgcactaattattcaattggggtaaatattgcccgatgtcgcaaaacttttgtttacctttaattaggatcctatttcatctgtaatcgaaaatcggaaggttaagagcttaagtctttaagcgcccaggaaaaggctggtctgcctatcaaataaatatatgtaactttcgtcacattgttaataaaaatgtgaggctgtcataaaatttgcaccaggagggtcaccatacgcatggtgtaccgaactttgatgcttcagattttacgagttgtgtacacatctgtggacaagacgtgacggatgggatggggattccccgcatcatgtttagatacaaatcccagccgaggatgaggttttacgaccaactccgagttaactaagcgagaccattcgatttgattaactgggatgatgggcgggcaactaagctggaatgtgatgcttttggccataatttttacacattttcacttaacctctccatcgtgccattttcattacagagggcaaggccatggccaccgcctacgattgtaaattcatcgagacgtcggtgggcattaatcacaatgtggacgagctgctggtgggtctgttatcacagatacgactcaagctggagaatcccgaaaagtccaggttcgtcgagagctactcagaagtagtctttattttattcacttatgtttattatgtttcttgccacagggatctgttccgaaagcgttcgattcgaaagtcaaagagacgcgcctgctcgccactgaatgccggatgcctgaatgccaatacccctctgggtccgctgggggaggcggtggccacgcccccgggcagtgcccaaagcaggtgagtcatcgccacgccgacaggccatcagaatcaggcagtaatgctgatgcaccctactcttttgcagtccccgcaaataccgtggatcaaggacctccaccagcctgaaagtcaagggacttttgggccgcgtgtggactcgggactccaagtcgaagagctgcgagaatctgcatgtactctaagcacagagattatccaaagtgtaacccacaagtttcctatagagtatgcaagatcctaagttaaagaagaaacagactcgactactaccgggggtattattcccaactgtacatattgtgtataattttagtcttaatttacgctagtcacttcctccattaatcattgtatatagtttgtctaaatataaaactattatttgtaattggttttttatgctctttcgttttcctctaagcatgagttgggataattttgaatgctcgttgtaatacggcgactggaataaattagttatatttttgattgaaagaaatcgtaatacaaaggaatccaaataaaaagcaataatttttaaaatgagaaaataatattttacccttgttcgtggacgaatgaataccaattgtactgattttttgaagatatggcgcttgtccgccgaatgaaacttattgttaattatatacgtgtagttatacatttgtaatggcattgaatctcgttttaaaatggcataaatattcacatgaatgttgattgaattaaaagttcataatataattgatcgattgcaaaccagaaactatattaaccacattgtgcaattttgcttaaatagacctagggattattatgccgtaattgttaaacaaaaccatttttttaaacaaagaagcccatcgtgcacccacaatccgcacgccctaggtttctcaagttagtcgggaccatttcaaaattaatcaaagatagcagaaatacgaaagaaacactagatttacacaagggctacttttaggttcatgtcagcgtagttttacattaatgcaatatgtgattttacacatggtccactaaatcaagagcctaagcaaaaccattttgttaacgtgtgcaatgcgacctgctgtatcaaatattgaggtcggatcgagaatttgtagatttttaactattaatgtgaacactagtagtgtagggcaaatcacacaactattccataacaatctagatgtccattaaatgtattataaatgtccattaagtattataatcaccaacaattgcagcacaatggaatttaacggatttggaacattcaaggaaacccccaaataatacgtgcatcctaacatgtgtgtaagatatccgatctataacagatagttaaaatatatacatatagctgtaattgatttttgtccagaactctgtgtattattctcgctcaacatgaatgaatatgaattcgagccgaaaactatataggaaagtgataaaagcacactcgattttgcacagattgtcatatgatgtataaggaaaagcgaaagtcagccataaatgtaagaagcagcagagtggtgaaaagttatcaattgaatgcatgttttaatttttccgctccgataatatatgtctaatgagtgtgtattaaatgtgaaaagtta

SEQ ID NO: 20657 - DNA, 2296 bp, DROSOPHILA
ccatccgaaagcaaagcatcgccattaaagcagcggaaacgcgagaaatcagatcaaagtattattatctacagatcgtgttattaagtgccaacctgtttgtgttagctatgtaaacgcggtgccttacggacatataacgctataaaaaggataataaatcccttaaacaatttacaacaaagtttcctattccaaagtatataaattcggtgaattagtgtaaaatggcgcccttctacaagcgcatctgccgcagtctttccaagcgctacaaggagccctcgttaagtctggacaatacagtcgagacgctgctaatcaagaatgagggggacttcatcagcgtggagcagggcaaggagctggtggctcgcaagcgcaactcccagcagctggcacatccgccggcccacttgcatcaccacacccagaaccacgcccacaatcatcacactctccagcagcagcagcatcagcagcagcagcaacaacaacacaagcgggacgagaatatgaggcagctcctggatgtgaccaacacgctcaccattgaggagctgcgcgattttcagatgcggtatttcgtatcgacgcccaaggacactatgcatatgtcctttggcctgttggcattcacagtttccaaggacatggcaggtgaacgcagtgaagcgactgttggtggcggcatcggatatggctcaccacatcacagccgctcgcaatcggtgaagatgcccggcagcagagcatccggaaggccaaatcagctgtgtctgccccagcagagatccagggtggcttccatgccgaatacaggagtagaggaggagtactacagactgcgtcacttctcgatcaccggcaagggtgtggtaaatcgcggtgattccctcaagagccgacgcagtcgctccaacaacagcgtggccagttccaattccagcacggagcacctgaccacccagcagcagctttccgcccccgcatccgtatccgctcgaacttcgctggcttccagcagggagagcagtacatccaatccgggcaacggtccctacagggtcctgatgctgggaggtcctgcggtgggcaagagttcgctcgtctcgcagttcatgacgtcggagtacctgcacgcctacgacacgagcatcgatgatgagtccggcgagaaggccgtttcagtattactcagtggcgaagagtccgagctgattttcatcgaccatggatacaccgaaatgactccggatgagtgcctgaccaactacgatccgcacggttactgcgtcatctattcggccgcggacaggagcagcttcagtgtggcggagcaggtgctgcaggtgctctggaccaatcagaacatcgcccagaaggcagtcattctagtatcgaacaaggccgacctggccaggagtcgactggtcacctctgaagagggcaaggccatggccaccgcctacgattgtaaattcatcgagacgtcggtgggcattaatcacaatgtggacgagctgctggtgggtctgttatcacagatacgactcaagctggagaatcccgaaaagtccagggatctgttccgaaagcgttcgattcgaaagtcaaagagacgcgcctgctcgccactgaatgccggatgcctgaatgccaatacccctctgggtccgctgggggaggcggtggccacgcccccgggcagtgcccaaagcagtccccgcaaataccgtggatcaaggacctccaccagcctgaaagtcaagggacttttgggccgcgtgtggactcgggactccaagtcgaagagctgcgagaatctgcatgtactctaagcacagagattatccaaagtgtaacccacaagtttcctatagagtatgcaagatcctaagttaaagaagaaacagactcgactactaccgggggtattattcccaactgtacatattgtgtataattttagtcttaatttacgctagtcacttcctccattaatcattgtatatagtttgtctaaatataaaactattatttgtaattggttttttatgctctttcgttttcctctaagcatgagttgggataattttgaatgctcgttgtaatacggcgactggaataaattagttatatttttgattgaaagaaatcgtaatacaaaggaatccaaataaaaagcaataatttttaaaatgagaaaataatattttacccttgttcgtggacgaatgaataccaattgtactgattttttgaagatatggcgcttgtccgccgaatgaaactt

SEQ ID NO: 20658 - protein, 537 aa, DROSOPHILA
MAPFYKRICRSLSKRYKEPSLSLDNTVETLLIKNEGDFISVEQGKELVARKRNSQQLAHPPAHLHHHTQNHAHNHHTLQQQQHQQQQQQQHKRDENMRQLLDVTNTLTIEELRDFQMRYFVSTPKDTMHMSFGLLAFTVSKDMAGERSEATVGGGIGYGSPHHSRSQSVKMPGSRASGRPNQLCLPQQRSRVASMPNTGVEEEYYRLRHFSITGKGVVNRGDSLKSRRSRSNNSVASSNSSTEHLTTQQQLSAPASVSARTSLASSRESSTSNPGNGPYRVLMLGGPAVGKSSLVSQFMTSEYLHAYDTSIDDESGEKAVSVLLSGEESELIFIDHGYTEMTPDECLTNYDPHGYCVIYSAADRSSFSVAEQVLQVLWTNQNIAQKAVILVSNKADLARSRLVTSEEGKAMATAYDCKFIETSVGINHNVDELLVGLLSQIRLKLENPEKSRDLFRKRSIRKSKRRACSPLNAGCLNANTPLGPLGEAVATPPGSAQSSPRKYRGSRTSTSLKVKGLLGRVWTRDSKSKSCENLHVL

SEQ ID NO: 20659 - DNA, 4995 bp, DROSOPHILA
tgaatagaaaacatagtcttactaactaattcaatagtataggtgtaggtgaacaaaattcaattcgtcgctcgtctttaccggcgcgtttcgaaacacattcttggtgataaagtatatataaaaaaaaataggtgaaaaacgattttctattaaggcaaattaggttaaagcgccacatcgcagtcgctggtgcagattttcattcagcccgccgtcggttattaaagttaaacataacataaagctgccaaagccaggtgtgtgtgtgtgtgatcgtgtgtgttgtattagatttgatttggtgtatctaaaattaaatctaaattccattttagtttaccaaaatttgccaccgctttggcttacaaatcattcagcatagtctgtgtgtgtgttttacattgagttctatattaatcatttccattataagaatttcttttcctttttcatacatttctatttccgttccgctcacgctgctggttgctaacgattcaaattgtgaattgcacggcatagcgtgcgcctgggatgtacacaaaaaatttcactaaatttaatttacaaaaacattaaaggatttcgcctccagaagctggttcattcacttcatttgctcccaacgaaatattggcttgcaccgaagtgggtgtgttttagggacttaaaattaatttaacagcttatcgaatttccgggcgcttccatttccattttgccccatcgtggaggtgggaaacccaaacgagcgggtgttcgaacagaagaattggtgttgttatgcactaactctagattaatttaagctttagttgtggttctagtttcttttgtttgcccatcatctgcttctactggatcctgcgcatcatcatcatcttcatcttttgtttgctcttcgttctttgttgctgctgcgtaaactagtaaatgctacaaaataggataaagtcagcggggctggtggtggctctagctgatggtgctgctgcctttaggccgccgtatccacctcctccacaatgtggttcggggacacttcgctgggcggcgccgctgttggtgctgctgctgctgacgttgctgctgttgcaggtgccgttgaagtattgccgttgacattggcgttactgctgttgccagtgatgctgttcgcgggtgcagctttccccgtctgaacgggcacagcggctggttgcaggggcgtagccaccagggcgctcacggcgctgtactgtgcggccgcgcccatcggaacagcagctgttccaccagcggcgatggaggagagactgtccgccgcggatgcggaggcggctgtggcatagggaccacttttcagtttacgcgcctcccgcttctgcttgtgctgctgcatcaccaagcgcagctgatccatttttgagcgggtcttcatgttggccagctccacggtgcacttctggcatgtgtgctcacgctcccgttcgccctgtccatcatcgcggcggtagcgacatgtgcatccattggattgactggtcatagagctgggtgcctcagcagtctggcagcaactatgcgacgatgacttcgagctggtggaagccttggtggcagcggaggaggagtggtagctcgggcagtcacggaaagagcagctacctccgctaccagaggccagagtcgccgactgctgttgttgctgctgggcgcggctgttgcacttggcgcagttgtggtgcttggaggagtactgcaagtaaaacaagtggataatgagcatcaccaaatatttcatactagatttgcttaccattttgctacgcgatccgtgatgcagcccgctaccagaggaagtagtcgaggaagatccactgctgccggatcccgaaccagatcccgaaaccgatccagtggtcggggcctcgaagctaatgcgtgcaccacgtccgtattgcggtgtggcactcaacagatcgttgagaatatggatcaccgttgagatgtcgcgtttgggtcgtccaaagcgatcctgtagtgccggattgagtgtgcccgaaaaggtgccagagtagatccccttcccatggttcttcatagactcgatcacggctcccgatccgctcttgcgcggtgcttcctcaccactggctgctccgctcgaggtggcaccgctgcttgagctgcgaccgctgctcaccacgccggctccggataaatcgatcttgttggtgaacacctccttggagagtttacgcaatgtctgggtaagatttctcgatgcctcagcgagagtcctagtatcagacacacccagcagcgagtcatcgggctctgcggttgtggcgctggtgctggctggtagtgccaccgttgccgctgctgttgcggttgcggccgttgctcctaccgctcctgctcccattccctgctccagcttgcgacgcttcgagggggaagaggaggaagatgacggggacgaggaagacgatgatgagcttgtagcaaaggcggctgcgttaaccgatggctggttgccggcgcaggcgtgattaaaaaagtggctactactgctgctgctgctgctgctgctactgctgctgtgaccatttccatgtccatgaccgtggccctgcccgtggtagtgacgatgcttggttctagtgatgcgattattgcccgtcttgtgcagcatcgaattgccagagaaggtgactcttgtgcccgcaagagtcgaacgagctgcaaatccggcattcgctccactgcaactcgattcgggacacttgctaggtgagctggtagatccggatctggccaccggagcaggcgccaccaaagtggccaccggtggagccactgacggtgtgggtagtcgcgtgcacaagcacgaggtcagcttggccgctatcggatcctgctggcagccaccggttgcgcaggctccactggaagtggacgaggatgagctgggggcggcagagctgcagttgcagctcgaactggaacttgtggcagccgtcgtgggcaggggaatgtttttgatagttgtcatcttgatgggactggacacgagattcgacagcgacttgatgggcgactgctctaacacaggcttccctggactcgatccggatcctccattggccacaggacgagcattggcgccggcatccttcagagcgaagctgttcacgatattctgaatgccgcccttaattagcagcttggtgagatcgggtccgtttagcgttgacgagctctgggactgaccagtgccagttgctggagcagagccagatgctccagacgagctgggcaaatcgccgtacatcttgcgcagcgaggacatcccaccaccgctgcccgcagccactgccgaagcgttgtgatgatgatggtgatgatggtggtggtgatggtgatgatgatgatgtccatgcccgtttccgtggctgtgaccatgtccatgtccgtgactaaagccatgccagttcgcagcatgcagactcggatgctgatggctgtgcacgtggccatgtccgattcttccactcgatcgctggccagaagagcgggttctcgacgaagacgaagacgaagaggatgacgatgacgttgaggatgaggatgaggaagtgccggagccactggttccagtgctgccgcctactccagcggccgccgccgccagcaccgccgacgaagacaatgatgtggagttggcgccggaacagccagtcccagctggcattacaggcaccgttgatgttgtgcttgccgctgcgttgatgcttgagccactcgcaccaccggcgactggggccactgtggcagcaccgccgcccgccggattaaccgtgctcagctgcagctggatgagcatcatgtggtcgccgaggcgcatgctcaagttgagcggtgtcttgccgctgagaaaatcattaacctgtgcgtcgttaagcgattccagcgcttgcataaccgtgttctccggacgttgagcctgcatagatggatagatagatagatagatcagtggatgagtaaaggagttattcgtttaaagagaaaatcgaatcgaatcgaagctaatagcctactggttaattctccataagagatttctaatttatttattatacgtatatttaagtcgcacaaagaaataccgcattccaatcagatgagagtcattcccttttttctttatcgacctataccaactattcacaaaccccctttttatttcagaacgtagcatttctggctttgattgccattctacgtgattcaatgcgacgcctttgtgctccgctcaaatatttgcaaatactacaaataatcaggcgttgaagtcaacgccttaagttgcgttacgaaatgaaaatatagggtttgaaaaaaaggttttccaagaataaactacaaaagcgtttcgaaaaacgggaacgcgaaacgaacggtaattgtggaaaattaagagcaacaaacagaaggcagtgtatgtatgggcatatactataaagactcggttccaagtttgatttttgtttttagaggtctgggtctgggttaattaatcatttccattgcatatgcacgtacaactgcggtcaagctgctagtataagcttttaaattatgagcttttccaacattattatcaattactagtgtttgaaaggaacaagaaatgcagcacattatttgttagcattcaacgggaccaagaagtttttcattttcaccttgcatttgggataagtgtaaaatctgtttctctattttgctgaccacagctgtcctttgtttgtggccagcaagtgagtaaccacatgtgcgaatggggttgatggggggatggggcggtgcagggggtgcagggggtcatgttttaatttttattgactctgcgctgctctgacacagtgacccaataatattcaaatgaagtcagcgacaaaagctcgcttcagtttcagtttttagccgaaagttaaatga

SEQ ID NO: 20660 - DNA, 2995 bp, DROSOPHILA
ggctcaacgtccggagaacacggttatgcaagcgctggaatcgcttaacgacgcacaggttaatgattttctcagcggcaagacaccgctcaacttgagcatgcgcctcggcgaccacatgatgctcatccagctgcagctgagcacggttaatccggcgggcggcggtgctgccacagtggccccagtcgccggtggtgcgagtggctcaagcatcaacgcagcggcaagcacaacatcaacggtgcctgtaatgccagctgggactggctgttccggcgccaactccacatcattgtcttcgtcggcggtgctggcggcggcggccgctggagtaggcggcagcactggaaccagtggctccggcacttcctcatcctcatcctcaacgtcatcgtcatcctcttcgtcttcgtcttcgtcgagaacccgctcttctggccagcgatcgagtggaagaatcggacatggccacgtgcacagccatcagcatccgagtctgcatgctgcgaactggcatggctttagtcacggacatggacatggtcacagccacggaaacgggcatggacatcatcatcatcaccatcaccaccaccatcatcaccatcatcatcacaacgcttcggcagtggctgcgggcagcggtggtgggatgtcctcgctgcgcaagatgtacggcgatttgcccagctcgtctggagcatctggctctgctccagcaactggcactggtcagtcccagagctcgtcaacgctaaacggacccgatctcaccaagctgctaattaagggcggcattcagaatatcgtgaacagcttcgctctgaaggatgccggcgccaatgctcgtcctgtggccaatggaggatccggatcgagtccagggaagcctgtgttagagcagtcgcccatcaagtcgctgtcgaatctcgtgtccagtcccatcaagatgacaactatcaaaaacattcccctgcccacgacggctgccacaagttccagttcgagctgcaactgcagctctgccgcccccagctcatcctcgtccacttccagtggagcctgcgcaaccggtggctgccagcaggatccgatagcggccaagctgacctcgtgcttgtgcacgcgactacccacaccgtcagtggctccaccggtggccactttggtggcgcctgctccggtggccagatccggatctaccagctcacctagcaagtgtcccgaatcgagttgcagtggagcgaatgccggatttgcagctcgttcgactcttgcgggcacaagagtcaccttctctggcaattcgatgctgcacaagacgggcaataatcgcatcactagaaccaagcatcgtcactaccacgggcagggccacggtcatggacatggaaatggtcacagcagcagtagcagcagcagcagcagcagcagtagtagccacttttttaatcacgcctgcgccggcaaccagccatcggttaacgcagccgcctttgctacaagctcatcatcgtcttcctcgtccccgtcatcttcctcctcttccccctcgaagcgtcgcaagctggagcagggaatgggagcaggagcggtaggagcaacggccgcaaccgcaacagcagcggcaacggtggcactaccagccagcaccagcgccacaaccgcagagcccgatgactcgctgctgggtgtgtctgatactaggactctcgctgaggcatcgagaaatcttacccagacattgcgtaaactctccaaggaggtgttcaccaacaagatcgatttatccggagccggcgtggtgagcagcggtcgcagctcaagcagcggtgccacctcgagcggagcagccagtggtgaggaagcaccgcgcaagagcggatcgggagccgtgatcgagtctatgaagaaccatgggaaggggatctactctggcaccttttcgggcacactcaatccggcactacaggatcgctttggacgacccaaacgcgacatctcaacggtgatccatattctcaacgatctgttgagtgccacaccgcaatacggacgtggtgcacgcattagcttcgaggccccgaccactggatcggtttcgggatctggttcgggatccggcagcagtggatcttcctcgactacttcctctggtagcgggctgcatcacggatcgcgtagcaaaatggtaagcaaatctagtatgaaatatttggtgatgctcattatccacttgttttacttgcagtactcctccaagcaccacaactgcgccaagtgcaacagccgcgcccagcagcaacaacagcagtcggcgactctggcctctggtagcggaggtagctgctctttccgtgactgcccgagctaccactcctcctccgctgccaccaaggcttccaccagctcgaagtcatcgtcgcatagttgctgccagactgctgaggcacccagctctatgaccagtcaatccaatggatgcacatgtcgctaccgccgcgatgatggacagggcgaacgggagcgtgagcacacatgccagaagtgcaccgtggagctggccaacatgaagacccgctcaaaaatggatcagctgcgcttggtgatgcagcagcacaagcagaagcgggaggcgcgtaaactgaaaagtggtccctatgccacagccgcctccgcatccgcggcggacagtctctcctccatcgccgctggtggaacagctgctgttccgatgggcgcggccgcacagtacagcgccgtgagcgccctggtggctacgcccctgcaaccagccgctgtgcccgttcagacggggaaagctgcacccgcgaacagcatcactggcaacagcagtaacgccaatgtcaacggcaatacttcaacggcacctgcaacagcagcaacgtcagcagcagcagcaccaacagcggcgccgcccagcgaagtgtccccgaaccacattgtggaggaggtggatacggcggcctaa

SEQ ID NO: 20661 - protein, 989 aa, DROSOPHILA
MQALESLNDAQVNDFLSGKTPLNLSMRLGDHMMLIQLQLSTVNPAGGGAATVAPVAGGASGSSINAAASTTSTVPVMPAGTGCSGANSTSLSSSAVLAAAAAGVGGSTGTSGSGTSSSSSSTSSSSSSSSSSSRTRSSGQRSSGRIGHGHVHSHQHPSLHAANWHGFSHGHGHGHSHGNGHGHHHHHHHHHHHHHHHHNASAVAAGSGGGMSSLRKMYGDLPSSSGASGSAPATGTGQSQSSSTLNGPDLTKLLIKGGIQNIVNSFALKDAGANARPVANGGSGSSPGKPVLEQSPIKSLSNLVSSPIKMTTIKNIPLPTTAATSSSSSCNCSSAAPSSSSSTSSGACATGGCQQDPIAAKLTSCLCTRLPTPSVAPPVATLVAPAPVARSGSTSSPSKCPESSCSGANAGFAARSTLAGTRVTFSGNSMLHKTGNNRITRTKHRHYHGQGHGHGHGNGHSSSSSSSSSSSSSHFFNHACAGNQPSVNAAAFATSSSSSSSSPSSSSSSPSKRRKLEQGMGAGAVGATAATATAAATVALPASTSATTAEPDDSLLGVSDTRTLAEASRNLTQTLRKLSKEVFTNKIDLSGAGVVSSGRSSSSGATSSGAASGEEAPRKSGSGAVIESMKNHGKGIYSGTFSGTLNPALQDRFGRPKRDISTVIHILNDLLSATPQYGRGARISFEAPTTGSVSGSGSGSGSSGSSSTTSSGSGLHHGSRSKMVSKSSMKYLVMLIIHLFYLQYSSKHHNCAKCNSRAQQQQQQSATLASGSGGSCSFRDCPSYHSSSAATKASTSSKSSSHSCCQTAEAPSSMTSQSNGCTCRYRRDDGQGEREREHTCQKCTVELANMKTRSKMDQLRLVMQQHKQKREARKLKSGPYATAASASAADSLSSIAAGGTAAVPMGAAAQYSAVSALVATPLQPAAVPVQTGKAAPANSITGNSSNANVNGNTSTAPATAATSAAAAPTAAPPSEVSPNHIVEEVDTAA

SEQ ID NO: 20662 - DNA, 4516 bp, DROSOPHILA
ttgggaatgtcgcactcctgcaggacctcggccagagccaagaagcggtagaaacagccgaagagtatccatagtcgcagaaccgaaccgagcatgggtaatagtatctataagtgatcttgaaccgctacaacagatgcaatccaaatccaaatccgatcgtctggcaagaagaagcggcggcaaaggcttacgaaccgaaactgaatggcaacgcagtttgtataagcggagtgccaaaaagcgaaaagccgaagaccccgaaaagtcggaagagccgaagagccccgggtcttcagtcttcagtcttcagtcttcagtctccagtctccggtctttagtctaccagctcaaagctccaactcaggtgtcaacaaatgcgacacccccgccccacttaggcggcgaaaaaacgagtccaaaagtgcagtagtcggcaggtcgaccgataccgatcgtccggctggtccggttataatatatattgcataaccgacacagctggccagctggtttcactttcgttcaaggcgagagtctggctcttggctggtaaaagcttctcgtgaatggattgcacacttttaggcggcggcggttgggcaaagctcagccactttgttttggccaaagtccaagtccacggctcaaaacaatacacacctgccgcaaaccggaagttttcttgtggttttctggcgccgaattatccgccaattaaagcgcggtggcaatgtcattgggatccgtgctttttgaaggtatcgcattctgttgggaaatccaaaggttttctgaccaggtcagccacctcgttggggtgatatcaatataaaatgctaattatattacctaataatatgtcagtatatcagatttaaaacttgtatttgcattaataaatatttatgtctactaaaatctaagttagttactatattaatctaagagtgctaaagatcacaatttttgttttgaacattcagtttgaattcgggacctaagccctcacattctgcctgatccagatgtcgtaggcagccacgttcgtgtagactcctggccagtccttcagtccgcacttgtagccgaatgatacgatgccctcgaggacccaggactcgtcgcggaatcgcatcagcggtccgccggagtctccgtcgcaactgtccttccggaactgtccgccggcacagagttgggtgggctccaggttcaccttgatctgcgagaatctctggcggcatttggctggatccacgtagttgaccgtcaccttttgcttcacagcactgcgggccatcttcagagtacggccccagccggccacggtgaactgctggccggattgcctcgactccaggcccacagacgagggcaggcaaatgggctgaatgttgtccgagtagcggacgttgcgctccatgcgaatgagaccaatgtcgtgcacctgattggaggccttctcgctgtatctttcgtgaacccggatctcctcgaagcccaaacgctggacctccggcgagcaacttcctccacctggggggcaatccacagcggtgcgagtgtcatgctcgcccagtctcaccgacacactaaagcaaatgagaaacaagccgaaaacaattaatgagcatttaagccattaaacactagaattaaagcgctaattggtgcttggtcaatggagaatcgagagcgaagcgaattgagaacccgaacgccccgggtctgtgaatcatcgaaacaagttagcaagcggctaagcacagtctaattaatattggccagatccaagcctggggatccctttggcctcgttagccgacttagccggagaattcagcccgtttcgcagaattatcggacaaacaagcgtgaataagcgatgactttcgcccaacccgagaaactggattggagagtagatcttagcatacgtataactaaaacttgattcatcattctatcgatctggcgcccattcatgaatcggtgggtcagatctatagtaattcccctaatgcttaagtcgcaaacatcaacaatcagttagtaaatcttgtgggatctctaagcgaaactaatatcttaaagatattagtaggaagttttccatgacacttgtgcggactgatcttctagagattctcaaagcagatcaccggaaaaattccccttgctgtgacatgggtatgtctggatgaacttgtggttagaatctctggaaatttttcgaagagattagaaataagtttagggatttacataaagtgcataaactgaaatgaaatcttttgtatcttttgttttaaccacaaaaaccaattaatgtttaatttaatgcgccctgacctgcctcttttcaataaaaaaaatccccattttgacatctaaaaacccactttagatactcacagtgttccgacttcccgttcgatcctgccagtcaaacaatgcgcagctgtgaggacatatcgccgattgatgagggatcctgcacaggcggtggacagaccatttccagatcgcctgcggtactccagcagaaccatccagggaaactcgttcacatcggtgtcctggccatcgtaaatcctgttcctaatacccactcccccgcaggatggaggctgaggtagtaagctggagccatcgctagtcgatgattttcgaaaaggtgttctgctggtggctggctggttgccaaagctccagggacgtctttcttgtctgggaaaaacgaaactctgtggccgctcctcctcccaatcaccgccaaatgcaccgtagtccggaaaggtgcgatcctggcgttggatcctcacatagccggtatcctgggtgcagcaaacatagggctgattattgctgccccttccacaggccgaggacttgatgaagctcttctcctgatcagtcaaagtggcccgcttcagcacggagtagagtgtctggcattcattaatgagcacacaaagtccaggggtttgattgggattcaggcacctcgaatctgctgaggagataaaaacattgcaatcaggttctgcaggggatgcccctaaatgcgcgcgccacttttctgacattcttgcggttcagaaaggtgatgttgccccaaactgcacagattgatcaaggcacacttaaagaaacaccttgtattagttatgcaatttaaaataaaaaaaatattataagtgtgccttgaaaactaatagtggtttctttattatataaaattcatttgatgtcattattggataatcgcttgaatgtctttttaaagtgattttaaagcactttttggggaactgcccactttaaattcttgatacaaataccgaatcaaatgagcttgtcgaaccggcttaattagaaatgcacttgacttcctcgcacttgtgcgtatttcccacgattttgggaatttttcaatggcaaacactcacactgggctttggcctcgtgggcaatcagaatgcaaagaaaaaccgccgcgaacactttcattttgctgctattttaataattgaatttatttaattaacttgcgactgcgatcgtttccagctgacccgataacccttactgtgagatggctgaagttgctcaaagctttttatagccgcagcttcagcttcgtgaaccgagatctctcgatcggttctcgatcggaatcctacagtaccgggtttaacaatcgagcaccactgttctccgcgtttcaatctgcggtttaatcttcaaatctagtggctagtactatgcgatttgtatctttaagatgcgtatcactaggtgaccccgaaggttcttagttccgagtttatggttaggaaaacctatcttttgggtgcaacgaacttgcgaagccgaagacctcaaatcaatgacgacagttaggaattcctctacacgtcataaatatttggtaaacaggaaacggtccaaatctacaaaggttactcacccaatagatatgttctaaaatatataaagttttattaaattgtgaccaatgcgagggcatttcatgtaattaggcactggcatcccttaaaggggtttgcccgtttgtcatgcatcatctgcaagagaaccgtgctcgtaaatgatatatatcaactatgccatgcaaaatccaccggcagaacacactatgtcattccccggaacgcctggtgatttaccagctaacaaggtgctgtaaaccagttcccaatgcgaagaagattgaaaaatttccataagcaaaggaaaaaaaaaaaagaaaatacaaaacctctagaaaagaaaaatattatttggcaattgatataacaacaaatcaccatagacctcaatagatacatgctattttaaaatatatgtccattacatttgttaattatattttctctttctccgtgtatcttgtaaatgagctttgaatcagctttttgcgcacaaaacccaatgtttcagtgggctatctttcagtaacaatctttgcggtatttaaaagtcagtt

SEQ ID NO: 20663 - DNA, 1257 bp, DROSOPHILA
atgaaagtgttcgcggcggtttttctttgcattctgattgcccacgaggccaaagcccagtcagattcgaggtgcctgaatcccaatcaaacccctggactttgtgtgctcattaatgaatgccagacactctactccgtgctgaagcgggccactttgactgatcaggagaagagcttcatcaagtcctcggcctgtggaaggggcagcaataatcagccctatgtttgctgcacccaggataccggctatgtgaggatccaacgccaggatcgcacctttccggactacggtgcatttggcggtgattgggaggaggagcggccacagagtttcgtttttcccagacaagaaagacgtccctggagctttggcaaccagccagccaccagcagaacaccttttcgaaaatcatcgactagcgatggctccagcttactacctcagcctccatcctgcgggggagtgggtattaggaacaggatttacgatggccaggacaccgatgtgaacgagtttccctggatggttctgctggagtaccgcaggcgatctggaaatggtctgtccaccgcctgtgcaggatccctcatcaatcggcgatatgtcctcacagctgcgcattgtttgactggcaggatcgaacgggaagtcggaacacttgtgtcggtgagactgggcgagcatgacactcgcaccgctgtggattgccccccaggtggaggaagttgctcgccggaggtccagcgtttgggcttcgaggagatccgggttcacgaaagatacagcgagaaggcctccaatcaggtgcacgacattggtctcattcgcatggagcgcaacgtccgctactcggacaacattcagcccatttgcctgccctcgtctgtgggcctggagtcgaggcaatccggccagcagttcaccgtggccggctggggccgtactctgaagatggcccgcagtgctgtgaagcaaaaggtgacggtcaactacgtggatccagccaaatgccgccagagattctcgcagatcaaggtgaacctggagcccacccaactctgtgccggcggacagttccggaaggacagttgcgacggagactccggcggaccgctgatgcgattccgcgacgagtcctgggtcctcgagggcatcgtatcattcggctacaagtgcggactgaaggactggccaggagtctacacgaacgtggctgcctacgacatctggatcaggcagaatgtgagggcttag

SEQ ID NO: 20664 - protein, 418 aa, DROSOPHILA
MKVFAAVFLCILIAHEAKAQSDSRCLNPNQTPGLCVLINECQTLYSVLKRATLTDQEKSFIKSSACGRGSNNQPYVCCTQDTGYVRIQRQDRTFPDYGAFGGDWEEERPQSFVFPRQERRPWSFGNQPATSRTPFRKSSTSDGSSLLPQPPSCGGVGIRNRIYDGQDTDVNEFPWMVLLEYRRRSGNGLSTACAGSLINRRYVLTAAHCLTGRIEREVGTLVSVRLGEHDTRTAVDCPPGGGSCSPEVQRLGFEEIRVHERYSEKASNQVHDIGLIRMERNVRYSDNIQPICLPSSVGLESRQSGQQFTVAGWGRTLKMARSAVKQKVTVNYVDPAKCRQRFSQIKVNLEPTQLCAGGQFRKDSCDGDSGGPLMRFRDESWVLEGIVSFGYKCGLKDWPGVYTNVAAYDIWIRQNVRA

SEQ ID NO: 20665 - DNA, 3685 bp, DROSOPHILA
ttcaaactcaaatccatctgttcgaatcttttcggttcgttcgtatctttctgtttcgcttttggccaattttggtcagtggcccactggcactcggcacttggccacaacacctgcgcatcgcatacaaatggcacatggagcgctcttttctgggcttctggctattttcggatcccaggcaggcctgatgaatgggcctgccatcgatttgggcaccgattttggctgacttttggacacggcttgtgtttttggcagccattgcatcactcgacttgcgagttgaccattttttttttttttatgctttttaagcctcgttttgagtgcacgcgaatggcgggtgaaagcaaagtgtggcaatcaatgacgacatcaaacccaagactcactgcatcggcgggtttgagcagctggccaagcggacaaacagctgttatacagctgatattgaaaagatacttgaagaaataaatacatatatacatcatattcatacataaacttatgacaccaatgaatgaacagactgattcagtcataagccataatgatgacaagttcaatgaactgactacattttcgagaagtaatcattctcaaacgttgaatcacaacaaatttcagctgctctacatgtaacagaagtaaaatgactattttccggcagtttagagttacaatttcccggctgagtcagcggcaatcttcaacagcagctcatttcaattaaactccaccgacggggtaaatattcagtagtttatttaaatagaaacatgtttttcagacttttgttaactcgcacaggcactccacattccgcactcattcactcacacgcttaaccaaatagttgatggctgttagataattagcaaaatatgtacaaatacggtagatacaagtatgttagaggtaaacatatctgaatcggaatcccgcccgcttcaattaggcgccaattgttcctttcgcagaataaagaaatctgacgtcaagccattttgtcctgcgtctgttggctctttttcctctgctgcacaacactgtcgatccagtccgtgtattcggccacgttagtataaacagccggcttaccggccataccgcactgtgtaaatccgtagctgaccacgccgtaggccacccaccgggagtgctgtctatcgaagtacatcagaggtccaccggagtcgccggcacacgtgtccttcgcgaactctccgccggcacagatttgcttgggacccaatcgcactccgaatccctcgagaatcttggtgcagttctcattggagacgtacggaatgcgcagctttagcttgatgggactatgaatgttgatgaagtacttgttgactgcaataaagtaaatcatatattatatagtgaatggaatattttccacagacattgtacaaacacaagactttcgtgctgaatgaacccattagacagcaactatggaaagtcccatgttttggttttcaaaaacttccattaatgaagaggtaaacattattgttctcccctttggcatggattttccactttaaaacatagaggaatatatcatagcttcaagatatgatataataattcttataactggtttatacttacataaatccgtgcgaccccatccggaaacggagaacatctggccctcggccaatgtcagtggctcggatttgttgggcaaacagatgggcatgacgaagtgagtgaaggacacgggatgctttagccggataatggcaatgtcattgtacttgtagttcgagaactccttgtactccggatgcacatggatcttttcgtaggcaatatccaaagcggcgtctgcacagctcaaatagtttggctcctcgatgcagtcgggttcagttttcacgttgaattcgcccaaacgcacatgctttctaaacggattgtaaaattctttgtttgaatatttaaacataaattggtttaaattcaactcacaatccttggcgatcacgaactccctcgccttgaacacaatgggcagctgttaggatatgacgatcatcgattagggctccactgcaaccgtagtcatctaaaaatatttaaaaaaaaaaatggttgaaaaaataaaggaaatgaaaataaacacttttgtaacacttaattagactcactcgagttgtagacaagcagtgccagccaaggaaactcatccagttcggcgatttcccctccgtaaatcctattagtcacttgtttgccgcactcattgagtaaattgaatcccgaacttggctccaccgtttgaatgcgccgcttgagtttcttccgcttgaatcgagcggtaacatccagaaatcttcggtactcgaacttagagaattgtagcacgggaaataggtaatcctggccattcgccgggcagcaaaccagtgattcgtacgaaccctgcgcctccgacacttgctgctccacctcgcactgcaccttcttcaggaaattaaccttctccgccggcaaattggtggcattccgcacctgtagatacgccttgcacctgctgacctccaggcaaactcccctcttcgtctcattgggaatgtcgcactcctgcaggacctcggccagagccaagaagcggtagaaacagccgaagagtatccatagtcgcagaaccgaaccgagcatgggtaatagtatctataagtgatcttgaaccgctacaacagatgcaatccaaatccaaatccgatcgtctggcaagaagaagcggcggcaaaggcttacgaaccgaaactgaatggcaacgcagtttgtataagcggagtgccaaaaagcgaaaagccgaagaccccgaaaagtcggaagagccgaagagccccgggtcttcagtcttcagtcttcagtcttcagtctccagtctccggtctttagtctaccagctcaaagctccaactcaggtgtcaacaaatgcgacacccccgccccacttaggcggcgaaaaaacgagtccaaaagtgcagtagtcggcaggtcgaccgataccgatcgtccggctggtccggttataatatatattgcataaccgacacagctggccagctggtttcactttcgttcaaggcgagagtctggctcttggctggtaaaagcttctcgtgaatggattgcacacttttaggcggcggcggttgggcaaagctcagccactttgttttggccaaagtccaagtccacggctcaaaacaatacacacctgccgcaaaccggaagttttcttgtggttttctggcgccgaattatccgccaattaaagcgcggtggcaatgtcattgggatccgtgctttttgaaggtatcgcattctgttgggaaatccaaaggttttctgaccaggtcagccacctcgttggggtgatatcaatataaaatgctaattatattacctaataatatgtcagtatatcagatttaaaacttgtatttgcattaataaatatttatgtctactaaaatctaagttagttactatattaatctaagagtgctaaagatcacaatttttgttttgaacattcagtttgaattcgggacctaagccctcacattctgcctgatccagatgtcgtaggcagccacgttcgtgtagactcctggccagtccttcagtccgcacttgtagccgaatg

SEQ ID NO: 20666 - DNA, 1275 bp, DROSOPHILA
atgctcggttcggttctgcgactatggatactcttcggctgtttctaccgcttcttggctctggccgaggtcctgcaggagtgcgacattcccaatgagacgaagaggggagtttgcctggaggtcagcaggtgcaaggcgtatctacaggtgcggaatgccaccaatttgccggcggagaaggttaatttcctgaagaaggtgcagtgcgaggtggagcagcaagtgtcggaggcgcagggttcgtacgaatcactggtttgctgcccggcgaatggccaggattacctatttcccgtgctacaattctctaagttcgagtaccgaagatttctggatgttaccgctcgattcaagcggaagaaactcaagcggcgcattcaaacggtggagccaagttcgggattcaatttactcaatgagtgcggcaaacaagtgactaataggatttacggaggggaaatcgccgaactggatgagtttccttggctggcactgcttgtctacaactcgaatgactacggttgcagtggagccctaatcgatgatcgtcatatcctaacagctgcccattgtgttcaaggcgagggagttcgtgatcgccaaggattaaagcatgtgcgtttgggcgaattcaacgtgaaaactgaacccgactgcatcgaggagccaaactatttgagctgtgcagacgccgctttggatattgcctacgaaaagatccatgtgcatccggagtacaaggagttctcgaactacaagtacaatgacattgccattatccggctaaagcatcccgtgtccttcactcacttcgtcatgcccatctgtttgcccaacaaatccgagccactgacattggccgagggccagatgttctccgtttccggatggggtcgcacggatttattcaacaagtacttcatcaacattcatagtcccatcaagctaaagctgcgcattccgtacgtctccaatgagaactgcaccaagattctcgagggattcggagtgcgattgggtcccaagcaaatctgtgccggcggagagttcgcgaaggacacgtgtgccggcgactccggtggacctctgatgtacttcgatagacagcactcccggtgggtggcctacggcgtggtcagctacggatttacacagtgcggtatggccggtaagccggctgtttatactaacgtggccgaatacacggactggatcgacagtgttgtgcagcagaggaaaaagagccaacagacgcaggacaaaatggcttga

SEQ ID NO: 20667 - protein, 424 aa, DROSOPHILA
MLGSVLRLWILFGCFYRFLALAEVLQECDIPNETKRGVCLEVSRCKAYLQVRNATNLPAEKVNFLKKVQCEVEQQVSEAQGSYESLVCCPANGQDYLFPVLQFSKFEYRRFLDVTARFKRKKLKRRIQTVEPSSGFNLLNECGKQVTNRIYGGEIAELDEFPWLALLVYNSNDYGCSGALIDDRHILTAAHCVQGEGVRDRQGLKHVRLGEFNVKTEPDCIEEPNYLSCADAALDIAYEKIHVHPEYKEFSNYKYNDIAIIRLKHPVSFTHFVMPICLPNKSEPLTLAEGQMFSVSGWGRTDLFNKYFINIHSPIKLKLRIPYVSNENCTKILEGFGVRLGPKQICAGGEFAKDTCAGDSGGPLMYFDRQHSRWVAYGVVSYGFTQCGMAGKPAVYTNVAEYTDWIDSVVQQRKKSQQTQDKMA

SEQ ID NO: 20668 - DNA, 2687 bp, DROSOPHILA
gatatacaaacgttgccaaaacagtatgtgggataagggccattagtgccggtttccatccaaaaaagaagcccttgtagccatgttttcggataattttccgatacagatatggataggaagtgcggccatagtgtgaggattcgtttaacgttagagtagccaacgcatccactggtgtcataatgactgtgataatactgcctgttagcgccatagttatgagatcgctaagccacggctcgtcgagtctgtggaaccatgatatcactgtatggaccttatcactaataggagtatacagcacggccacggctgtgctactaatcgagtttattttccaaccggtaaataggtaagtaaatcctcccttcgcgtacatacatttgagtcctctccagaaatttcgatagctacaaaaaagggttaactttcatagctttggaagattaaacgatacacatatagatatttgctggtttcaaaattaaaccggaaaatgcctatttatgtttattcggccatattcttacttgcgcctctcgtaggatccgcgcgtaagatcagcttgccgaatgaccgccagcttggcgaacggtgttgccaatacgccgccccaaaatccggttatacccaggaccatgctagtgttatacggctgcagcattaggacgtacttgttatcctgtaagttgtagaacaacgtgtacgttgacatcgtgtgaacagtacagcgtagacaagcagccacaatgccgtaataaaatccgggtaatccatgacgggccatcagccggaacatatggtttatgcttaaacggctatggtggattacgttcgcctgcatattcacacgaactagctccatgggatgcgacaacagttgggccgtagtcttaatcagcaggccgacgtagacgggcatctttataaattgttcaatcgaactccccgcatcactattattcattatctaaataaatttgtatattctcaagaaatttaaaatgtagtgtacttaaaaagcttaggctactcgcattcagcacgcagtttggcgatctccagctgtgtctttttcgcctccaacaaggtgacggtgcgtttcagttcggatatctcgttcatcttggtaaagtactcggatttgaccaccagatactccgtttccgccttgatcagatccttctgcagtcgattggcgtcggatgacgggatcaccagttgatccagatcggtcaagtagctcaccaagttggattcctgattgcgtgcactgctatcatcctcgtcgatcagtttgtccagtagaatattcgaagtgaagtcaattgtggagccggaagagctctgttctgccggagcggcgtccgtagcctccaccttaataccgaattcagcggttagatcctcccggaacttgagacatgacttcctgtatccacatacatacattttacggactgtacttgcaaatgagcgggaaaaattataatacatacctatggataatcagcctgtctatgctggtgtttgattggcatttccgacagtgggtgcacagcgctcggtacttcttcggctccccatccttgccgcccttgaacgcgggtagaaagcccagtttcttccaagtttcatccttcgaaaggcccgagggtcgcttggccttttttgcttgcgacatttttacatacggtttgtgttaaattacgtgacagtgttgctgctgtaaattcaaccgatgtatcgataacatgccatcgaattctatcgatggtcgcttgcatttgaatattaattatatttttacttttgaatcatctgtgaaatgactgaattgtaaaaaatgactttgtctgggtcataaataacaaatttttgaaaagaataagtttaatatttagctttgtatatttaacgattaattaatcgggcagtaaatagtaccatgaatgtatctgaaaatatatgcgtggaacctttaaaaaatagactatattgaagggcgttcatatattacaaatacatataagtaaaattaagaagcaaatccttttaaaagtttactacttcacccgttatatacatataaaattatttctgatctttattaaatatcgttttgactaaaagaaacgcatcgaactgatcaatatcaaaatggttttatcgatatgtcgatacatgtctatcgtatgcaagcgtggattttacatgcatctgtagtgaagccatttttatttgcatcgtgtatagtacattggaatttactgcgattgttgtattttaaaatgccccgaaagaagtccgaggatttttacagaacccacggatttaccgccaatttggagaatggcaaatactcggccacctgtcacttctgcgaaaaagtactccaaaatacggcgctatcccggctatcgttacacaggtaaccatacaaacatacaccaaacattgtgtttacatgcgtcaagtaattctcattaaattgtaggcaaacctgcgatgcccggcgaagtagaagcgctgtagtgtacacttctgccgacgagaaggatcatgacgaggctcctaggataaaggtaattcgatgcttccaatttggatacattggatgtatgtatatgtctggtgtaggacgtcagtggacaaatgcacttcaaaataaatcccaaagatac

SEQ ID NO: 20669 - DNA, 620 bp, DROSOPHILA
atgtcgcaagcaaaaaaggccaagcgaccctcgggcctttcgaaggatgaaacttggaagaaactgggctttctacccgcgttcaagggcggcaaggatggggagccgaagaagtaccgagcgctgtgcacccactgtcggaaatgccaatcaaacaccagcatagacaggctgattatccataggaagtcatgtctcaagttccgggaggatctaaccgctgaattcggtattaaggtggaggctacggacgccgctccggcagaacagagctcttccggctccacaattgacttcacttcgaatattctactggacaaactgatcgacgaggatgatagcagtgcacgcaatcaggaatccaacttggtgagctacttgaccgatctggatcaactggtgatcccgtcatccgacgccaatcgactgcagaaggatctgatcaaggcggaaacggagtatctggtggtcaaatccgagtactttaccaagatgaacgagatatccgaactgaaacgcaccgtcaccttgttggaggcgaaaaagacacagctggagatcgccaaactgcgtgctgaatgcgagtagcctaagctttttaagtacactacattttaaat

SEQ ID NO: 20670 - protein, 195 aa, DROSOPHILA
MSQAKKAKRPSGLSKDETWKKLGFLPAFKGGKDGEPKKYRALCTHCRKCQSNTSIDRLIIHRKSCLKFREDLTAEFGIKVEATDAAPAEQSSSGSTIDFTSNILLDKLIDEDDSSARNQESNLVSYLTDLDQLVIPSSDANRLQKDLIKAETEYLVVKSEYFTKMNEISELKRTVTLLEAKKTQLEIAKLRAECE

SEQ ID NO: 20671 - DNA, 3394 bp, DROSOPHILA
aaactatgcgtcacccagcgagtatgtggtcctcttcggctgcatgtgtatgacctgcgtgggcggttcgagaccaaaggggtaactcacttgcaaacaaatttttcggtcgttcggccattgtgtgtggtggctgaaagtatcgatgcgcctttgtgtggctgtcctaaggatgttttgtccgttttctgcaggcgccgcgccccgaatacaacacgtcgacttgatgctcctttggccctccgatcgcctggttactgggccgcctttgatgggctcttcgccgtttgcaacgcaactactttttcagcaatcgagcgcactgatatgcactttttccgcaatttcgctaaacatttacataaatagcaaccaaaacttaaaagagctagagatgaaacattgattatttgcggccaatcgatagccatcgatagtatgcgcactagcttgcgataagcagtcctgcaaggtgcaaaagtagtgaggtgggtaataaaacgaatataaaaatgtcacctataaataattatttctttaaaaccaagagatttgagtttctatttttcacaaattaatcccagctttgttaaagtttttactagttgaaaagttacatttcgtcaataagtgacgtcgacgcctacataaaccaatctgcgccaccttaaaatcaatgcacaatcaccagtgatttaaaaccagaaaattaaaacatacataatcatgtccagcggatttgttcgcagcagctacaaattgttcgtcggcaacctgccatggacgataggtagcaaggaactgcggacctacttctcaaagtacgggcacgtggccaacgcggaggtggtctttgaccggcaactgggcctgtccaagcactatggctttgtggttttcagccaacgggatgccttcaacagcgccagcaaccagaacacccatttcctcgatggacgagtgctcacagtccagcgggcgaatgaaagtcctcagagttaatcaatgaagaatttaatgatttattggttagaccaaaggaaaagcatgagaaatgtttgttaacagcttagttttacacaaatgaatgcagcacttgcttcaaatcgtggcatctttgattcatttgggcaagtagaacttgctgttggtgcccaccacgtccgcaacattagtgtgacccagccgtgtgatcagcgccgacagctccgccttaatgtcttccacaagagcgggtccctcgtacactaaagccgtgtagatttggacgtaggaagctccagcttcgatcttttcgtatgcatcatagccggaagccactccgccgacgcctatgatgggaatctttccatcggtgagctggtacatctgggcgatcatctctgtggagcgggccttgagtggaggaccacttaatccgccagtttcctcggccagcttgttcttttcgatgttttcccgcgacaccgtggtgtttgaaacgatcaggccatccacgcggctcttcttgcgcttgattacccacacgatgtccttcatgtcgtccaaagatagatccggcgaaagtttcaagagtataggcacattcttgttcttatccagggaggatttcgtgtcgttgacctgttccaggagctctcttagcttctccttgctctgcatatcgcgcaggcccttggtgttcggactgctcacattaatgaccaggtagtctgctacgggcccgaaaacccgaacaccctgtacataatccgctatcgggctcatggtggtcttgttccggcccagattcacgcccacaactccattgaagttctcctttttgcggagcaagcgcagccgttggagcacggcctgatgcccgtcgctattaaatccgtaccgattaatgatggccttgtcctcggtcaaccggaatactctcggcttgggattgccctcctgagccgccggggtaactgtgcccacctctataaatccgaatcctagatcctgcaggccgtccaccgcctccgcgttcttatcgaatcccgctgcaatgccaatgggattgctaagcatccggccaaagaacgacgtgtgcaagttctggtcatcatggtactgtgaaaccgggcacaggcggtacttgcacgccagcacggccagttgatggctggcttccgccggaagaagtcgcaccgctggcatcacgaaggtccggaacaactggtcctggttcttgtatgccgtaatgcccgccaccaaggcagctcctccgactgtaacgattcccagcgaccgcaaacgaccctgtgggcggaatcattctgtaatccggtcccgtttaagccgtactttactcacaactctccgcgtggcgtttttagcattctttaagtgatcctgatccatgacgactatcgccggatatcgattgtacccgatagagtattaaaagtataatatgtaaaaaagtaaatgcatgtactagagttttaacgaaaattcaatttgggagtaagtctggccattttgaaggaaaactcatgcgatatatagttactacggcaagcatcaataattttcttttttttctgtgtagcaaatgaaccccttctattcacaaccatgccgaagagaatcgatagtcctccagtgtcacctctaatggttgagtcagtttgttatggccagctaaaaattagaaatttcgttctctaaacgctgatttggccacccgaggcaaccatgaagggcggcacctttcgcaacacgcagtgggatcccacgctgctgtcctcacagattgtgtccatgcagttctgcgtgtacttcacccttggcctactcgtcttcgtggccaacaagttgtccggggacaactatagtctggatcacttgttcgaataccatgtatgccatatgctatataccatatatcatggaaacccctctccttactttgatttaatgttgcttaaaggagatccacatctacgacatgggtggccgcctggtgatctgcgcatttgttttaaatgcgttcttagcctccctggcactgtggtgcattgtgagaagagccaagctctgtctggactttaggtgggcttatagctagtgcacacacttaatcttttgcttttacaactcatgcttccctttcatggcagttgcaccttccacgtgctgcatttgctgatctgctggtggtacaaccgctcctttcccgcgaacgcatcgtggtggctactgaatgtcatcaccggcacaataatgtgcataggcggcgagtttctctgcctgcagaccgagatgaaggagatcccagtgggctatgcggccctcaatcaaaagtcggacgtctgactcgaagccaccaacttgtgatgcctgctacccccccaaccaa

SEQ ID NO: 20672 - DNA, 1340 bp, DROSOPHILA
atggatcaggatcacttaaagaatgctaaaaacgccacgcggagagttggtcgtttgcggtcgctgggaatcgttacagtcggaggagctgccttggtggcgggcattacggcatacaagaaccaggaccagttgttccggaccttcgtgatgccagcggtgcgacttcttccggcggaagccagccatcaactggccgtgctggcgtgcaagtaccgcctgtgcccggtttcacagtaccatgatgaccagaacttgcacacgtcgttctttggccggatgcttagcaatcccattggcattgcagcgggattcgataagaacgcggaggcggtggacggcctgcaggatctaggattcggatttatagaggtgggcacagttaccccggcggctcaggagggcaatcccaagccgagagtattccggttgaccgaggacaaggccatcattaatcggtacggatttaatagcgacgggcatcaggccgtgctccaacggctgcgcttgctccgcaaaaaggagaacttcaatggagttgtgggcgtgaatctgggccggaacaagaccaccatgagcccgatagcggattatgtacagggtgttcgggttttcgggcccgtagcagactacctggtcattaatgtgagcagtccgaacaccaagggcctgcgcgatatgcagagcaaggagaagctaagagagctcctggaacaggtcaacgacacgaaatcctccctggataagaacaagaatgtgcctatactcttgaaactttcgccggatctatctttggacgacatgaaggacatcgtgtgggtaatcaagcgcaagaagagccgcgtggatggcctgatcgtttcaaacaccacggtgtcgcgggaaaacatcgaaaagaacaagctggccgaggaaactggcggattaagtggtcctccactcaaggcccgctccacagagatgatcgcccagatgtaccagctcaccgatggaaagattcccatcataggcgtcggcggagtggcttccggctatgatgcatacgaaaagatcgaagctggagcttcctacgtccaaatctacacggctttagtgtacgagggacccgctcttgtggaagacattaaggcggagctgtcggcgctgatcacacggctgggtcacactaatgttgcggacgtggtgggcaccaacagcaagttctacttgcccaaatgaatcaaagatgccacgatttgaagcaagtgctgcattcatttgtgtaaaactaagctgttaacaaacatttctcatgcttttcctttggtctaaccaataaatcattaaattcttcattgatt

SEQ ID NO: 20673 - protein, 405 aa, DROSOPHILA
MDQDHLKNAKNATRRVGRLRSLGIVTVGGAALVAGITAYKNQDQLFRTFVMPAVRLLPAEASHQLAVLACKYRLCPVSQYHDDQNLHTSFFGRMLSNPIGIAAGFDKNAEAVDGLQDLGFGFIEVGTVTPAAQEGNPKPRVFRLTEDKAIINRYGFNSDGHQAVLQRLRLLRKKENFNGVVGVNLGRNKTTMSPIADYVQGVRVFGPVADYLVINVSSPNTKGLRDMQSKEKLRELLEQVNDTKSSLDKNKNVPILLKLSPDLSLDDMKDIVWVIKRKKSRVDGLIVSNTTVSRENIEKNKLAEETGGLSGPPLKARSTEMIAQMYQLTDGKIPIIGVGGVASGYDAYEKIEAGASYVQIYTALVYEGPALVEDIKAELSALITRLGHTNVADVVGTNSKFYLPK

SEQ ID NO: 20674 - DNA, 2358 bp, DROSOPHILA
atagaatagctcctcttggcaatgtaaaaaagtggtagatttatcaggatgctgctcatattagtaatatgcatgtgcgaagaacaatgtggacaacagctacatttggcgtaattaactagccaatttatacttttaccgagccttcacattgttaatggctttccttctattgctaaactatcagtatcagtttggtattctgcccttagaaggtgcatagtttcattaacaatccatgtgctaagtggttgcttgccttgcagaaataaacattttatatctatacacactgctcatgtgcgacagcatagttcattgaaatttagtcatgcggacttggtaaggttaatctttagatttaaatcattccctttttggtgaaatggtggagctgccttgcttcaatatatattgtgtcttgttttctattccatttcgacaaataaaatctgcggataaagaactttctgatatacttgaagtaaacttcttgcattgattgaagactaaaaagacgtagccttttattttgtcgatcgaacattgttatacaaattcaaaaggagatggccaaaatctttcaacaagtaaggcactaatagccgaaaataagttaaattaacaaagaaatcaagaagccaagcatttgtataaaatcaaaggcacaaaaattgatttggaaaccaattatgtgtaaagctatctgtgtttgcatttcttggaaaatacatttgctagtcttggcgacgtcatttaaagtggcaatcttccgactcaagttcccaatgcagtaaatccacaaagtacgcaatattattaaatattttcgacttattttccaaactgctcatataaattgtcagttcaaaaaggggtatctttgttatagaatttattcaagagtttgtgtgtttcttctgactatgaatgttacggagccttaagactaagcactacggctaacgatgctcgacgagatcgggttccgaggcgggtgctagaccctgtccagggcctccaccatgacgatgctgttgccgcggataacctggccaggtgggaaaaacgagtgagtcgatagtttatggcagggtatgctgcgcatcttaccaccatgccgatgttgttcttcgtgttgtccttgcactcctccaccgtgtcgtccaggaccacgttcatgaagggatcgaagcctcgcaaaataccggtcaccgcgcgtccgccgttcagtttcagcatcatgcgcttgtccatgtatctgcaagttgtattgttaattgcatttatggagcgctatctttttcccacatgggttgcacttactttttcacctctgggggatgggccttcgacattttgatggtttaatttgcgcaaaatgggaaaattaagtaaaaacgcggaccgcaagctagagatgtcactattgattggagctatactatcgtcttggtcactctaccaactggtcacactttcgggcgggaaaaatatttttccgccaaattcgctggcttttaagtgctcacataaatgaaattttcaaatagcaaataacataggaataatccttctaaatcgcaatataaaaacatatatacaaggagtggtaaatgacagtattctattaatggcaaaacgatttatttaaacagacgtcgcatccgcataaacgatctttcacactttttattaacggttagtataaataaaaaaaaacattaatccttagtttatttaaccaattttgtttgctgaaatcgattcttgaaagagaagctgacattttttttatatatgcctccctacttcaggcagtgcgaacataccgcatcaacgcgacttgtagcggccgtgtgaaaaggctattttgtggttagcgcagatctgcgctgcagtgtgaccccggctacaggtatttcggcatcgcacagggtcacactcgcccaggcacccgtataaaatccccgcccccctgatcgacgatagtatttcgaaaaaaacgcgaggaaaagtctgatgcgcgttaaaatcggagcgcaaatcgtgcatatatttttttttacacaccgcgcgccgtgtttacgactgaaaacggagactgactgaaaagccttggcgcacaagcacgcaatgaaaacgcaacgataagaatgtgatattgtgataaatacatgattcgctgacaactctattttatattggaatgcattcgaaatcgaacgcagcgcagcgtgtgttgtttacttaacgattttcggtgtttgtttgcccaacttgcggcggtgaaattcagcattttctgattttccatttgccaacgaaagagaggaaaagtgaaaagtgctattcgac

SEQ ID NO: 20675 - DNA, 231 bp, DROSOPHILA
atgtcgaaggcccatcccccagaggtgaaaaaatacatggacaagcgcatgatgctgaaactgaacggcggacgcgcggtgaccggtattttgcgaggcttcgatcccttcatgaacgtggtcctggacgacacggtggaggagtgcaaggacaacacgaagaacaacatcggcatggtggttatccgcggcaacagcatcgtcatggtggaggccctggacagggtctag

SEQ ID NO: 20676 - protein, 76 aa, DROSOPHILA
MSKAHPPEVKKYMDKRMMLKLNGGRAVTGILRGFDPFMNVVLDDTVEECKDNTKNNIGMVVIRGNSIVMVEALDRV

SEQ ID NO: 20677 - DNA, 8340 bp, DROSOPHILA
cactgtagatggagccctgaaccggaaaaaatatacctaagctatgaactcatccgaccaggttcgtgtctccggtgaaaccaacaaagcaagagctttcaccagaggcgtagcgagtaaaagctcttgggggattcgctcacctgaccggcggtcgtctggcagaacatgaggaaaaccttcaggggcttggaggcggtgaaggtcctgtgcgcccacaaacgatgaacgcccactgtcacgcccaaagtgccaaggagggtgagcagggcggctgagttggagatattgagacagatatttggggttaagaagccagccacttgttatgcggcacgtggagctgattagcccaaccgaactcactgaataaaatcgtggcccacgacgcgctagtgagcagaacgtaaatcccatagacaccgaggatatttaagtggatatagaagagaaccagtggccagatggcatcacgtttcttgtggatggagtccccactctgatccggctccttcactttagttgtctccattgtggcttcccaagtcctttgggttcctattttgtatcccaattggttccgcctttcgtggctgccctgactgtactgaaagcccgccataattacaaaatccaatggagcgagggttctggattattcatagacccattgcctatgcattagcctcaggtggtgttcaagggtgttcagagtcgagtggtgttataatacaaaacatagtttattgaaccgcaggtaagtaacgaaagcaacgatgggagattagcttgcctaaacggcgatcccagagatcctggtggtccgggatggcatgggatggtggatgggcgttgggtgatgggtcatagcctagtttagaggatctgagtcacatatgaagactcaggtcccgataaaaaacagagcataaggcatggcttggtgctacaacttaatactaggaaaaccacaggctgaaaacataatacacggcctagcttagttctgcatcttggccagctccacgatatcctctcggggaatgtccttgtccccgaagccccacaccggatccttgtgggcatggtcgtcgtccaggaagcgagttccatcgccgcatttcttggctctcctcaagaccatgtcaggggataccgatttacctgtaagtatgtaagtatgtaaataagtatggattcattgtgtcttgtaagtagataaaactcacgtcctttggccaggcctagccaggcgcaaaagtcgatgaagccggtggtgatgttgaggctgtagttgccaaactcgcccgtcttgtagtcccaggggaaaacgtggtggtaattgtgccatccctctcccatggccagcagggagacaatgggagcctcagtggacatgaggttcctagagtaggattagggattagtttcgctaacttgggtacactgatcccacttacttgtcgtacggcttgttgccgtacatgtgcgccacgctgttcacgaagaaggccacgttgagggtccaggtgaagcgcatgttgaagttgatccagaaggacatccagagatcctcgttccagaagtaccagggcacggccaccggcaggatgatggagcagagcgcgaagagcggtatgtagtacttccgctggaacatgcagacggcatccgcctccagatcggacatgtcgatgaccttcctcttggccaccaccttgggatggggcgttaggaacagccagcccacgtgggcgaagaagaaaccacgcttcgcattgtgcggatcggcgtctgtctccgagaacttgtgatgtatcctgtgatcaagggcccacgtgtaggcatctctctgcgagacaaatacaaacagtaatattctacttggactgatgaatgagatgtaacacccacctggccggcgatcgaaaaggcaaaggccagcagaatcctcaggggcagcgatgcagtgtaggacttgtgggaccagaggcgatgggctcccgccgtgatgccgatgccggagacccaaacggtgaccaccactgaaagggagcgaacagtcggatgtcattgtccaaacaaacaaataaaacacatgcacacacatgccatatatgtaccatatatgtatgtatattcccgctcgtctgaactgtttggggtgctggtgacgcttctcgcttgattcgctcgacggatgacacaacgcccggctctaaatatatctacgaattcggggtggcctattttgtcgttgctcggaaatcttgcccgctcttcctatcgttcgatcaccagccgaatatcgggcaattgaagcgttcgttaactttaattgccagcggtcaaagttcacggggcagcattgcacacagatacaacctgatggttgtttacctcttgcataacattaacttttttcaaatgtgcctgccatgcgtcattttcgacaaaaaacattgagaagcaacattgttgtggattgcgtactttgatctttactcatatattttatatcaaaagaatgtcaacgtttaggctgaattatttcgtataattaactttctcataaattgaagctattagtgttcctaatcatcatgtatctgcattagagactaatgaacacaccatatatctgcccaggggatttgtaatacagacagtcaatttaaactggcccagttaacagatactggcgtttggttacaaaatacctaatagccgaccatcggaacgctgtttgcatgttggcagatgcaattacgcagattggcgaccaggtcgcaggggcgttagcttattagctgcccagttgttaattacacggggacaccacaccgtggacactcaccccagaggaatgtgtagaagttcgcgtagaagagctggtacagtccgtagagggcaccgatgtgcaggaatgcctgtgctcccagatccggccatctgatctgcgggtggtactcctcttcctcctccacctgctccgcctccttcagcgtctggtcctgttgctgcagcagctgctgctccttgtagaccgcgttctcctccttgtagcccaaattgtcgtcatctttgaccagggtgtgtgatgtagcgtctgtggcatggcctctgtgcttcagctctcctccattcgggacaatggctgcgctgcggttgccattcctgtccaggctgcacgatccgttgcagtggccaacagacgtcgcctgtttctggccgggaatcggggatgaaaggcacatgctgcaatagaagacggcatagttggttttagcataatttgatgacttttatgtaaactgagacccgtcatgagtaatgccaaagcaaacaaccaaaggctaataaaccttttcttactgtaaacatcttctgttgtatgctaaactagttgtggcccacaacagtgctcatcatccacaatccagaatttttttcgctgagctatcaaagcaaatgtacagagacttgctaattaaagtttaggatagctataagcacgcactattagcaggccattctgagagtttcgactgtaatgggtgtgaaatctgttgccagcctcacgtgccacgccccacctgcccaatccgcccccttggagtcgaagggtttgctctggatattaacagaattccgtttatttgcagaataaacgccggcactcagggtaagcgttatcgcagcttatcgccagccaagttccatgttgcaatcaccgatctgcaagtggccactatcagggcgacagctagcggagctacactacatcattatggccatctagtcacaacaagagtgagtcacacgcaggtggctaacaggtgaacctttgcccacgcaggtgagcctgaattcgaactaatttcatgaagcatggtgtgacagtgcctgcaatcagtggacgatgattccgcctcgtcattaaactcccgaaatggcgaggatttcggcgattcctaatctcatgagtccaattgcttcgcagtttccttatcttgccaccccattctctttcctaccaataaaaatatgatattataagcccataattagtttcgtactcacatttaggcaataacaaacataaaatggctgtaatttataacatttacacttcctcattttatgtttgtagttatctcatttatattttcaaaaccaataaacagacgtagtgaactttaatttgctttttattgttatatggaacagtaaaatcaaatcactaatgtaccaaagctaaataaatatctgtgggaagtgggaaaatcgtgaatatatctttaaaaacatctaaatagctggccagctgagaaaacaaacatagcacaacttatgattttcttggaccgaaaaacgaatgcaacatacctctgaaatcttcaatgtctagctaatattacttaaatcaacattttataagacattaatgttccttccctctttccgtctatttgatctaatgttgttccaattggctaccagtctttgaaatattccactctgcctattacaataaatgtgaaatgtttgacacttgcaaaacaactcagaattgcaatcataaattgccgagagttgatttcaccgactcgtactcccacccaaagccatatacctttggaccctgcgaatactgggtatagttgaatagtcgacgcccccgcagaacatttcctatagtcttggcccgaaagagggaatggtcgatccgtttctcgtgcgtgcgatggcttattgccttgccgataagcattgcacacctggcacacctggcccatattttccccactggactgccgccccccttggccccctctccaccattcgctcgattcattcaaaattttcgggttagtagcgttgataagagcctatcgaccattgcaaatactcccatgcgattgccgccggcgtgattcatcctctgtctgacccctccaggtgtttcgggtggcatgagtaatgggggtgccgaggaatcgttccccttacgcaagtcttgcggcgataagattgggggagtctgatcaatttacatattgataataaccccgtcgggttcggcgcggtggggctgccaaacacgccccatcttttaattagaaaatttagccacgaacgctaatttcaacgggggaatcagtggggaatggggaatggggaatgtgagcagagccttttgacgaaggctgtcacaagaattgatcaacattttcattggccacgagcacgcgactttcgcatgaataaattaggtaccgaatacgaggagagccacttcagtctcgtttgtttaatttccaacccggcgcaacttggcaacgcactgcagtcgggcatggaaaacaatctatttcgcccaataataaataataataaacatagtacccctactagcccgccccgcccctccatttggccactattttattggcattcgacgcgttcgctctggagtgttttcattttgctgcccgcgataaagctgaccgccccatcgagaggttcgcggtatccgataccgtactcctctccgatttctagagtcccccagacatggctaattgcctgatggctcgcacgtcgtcgtatcaccaactattttcccatgccgccactcagcgagcgattttaatgccggaatgccaaattttattggaaattttccatgcccccaaagaacagcagcagggagcttgttccgtgcgtatcgcttacggagaggaaagccaaccccacagatttcccagcactacgatttaatggagcagcggctagagatcaagtattgtatcgtatcgccacttgttgcctggctggcacctttaattggagcttttaatggtcgcggagcaattgaggcactcgctatctaaagataattcagaccagatcgctggcaaactatggttacactgaggaaatccggctaatcaaagacggaattgcttcattaatattattattattatatagcaacacaatgctacatattcatggtcattccattaaatcctcccaagggaatctgaaatttaaggaaataaaaaatgtgcaaaaaacgaacatcaagtgagcacatagattaagaatttaactttttcaagaaatttgtttggtacttgtaaagtatttcaagaacttgaattgtttgttcctgataaagggtgtcgataagggtttccaaggaattatcaagtggagtttggcttatggtaaccacattttgtgagtttattgatatagggataatataccacataagtgacacaatggatattatttgatttggttgacactcttgcgttttgaaatagggattatcacaatatttgcgactctcaacatatatttcatttttttcgaaaggaaagtcaccaactagtcaccaaaaaagtagtatatacgttctatgagtttaccacaacattaggatttcaaatttcgttaactggaaactccctaataggtaggtgcttaattaaatcgttcaatgaaattaagtgccgttcacgagcgatttctttcttcaaagcccgacttcatgggtagtttccagacccctcttcctgagaccactaagttaccaagttagtcagtccggctggtcggtttattgatgtgggtcaacgcgtgtcgcggcaatcaaatcgtgagggataataatgtgtatacagtctagggctaacacctgggggaggttcttttggaggttttttttccggcggtggggtgtgcatgttactcgctctgttgactcccacccaactccccgtccactccccctaatcgacgcgggtaatgacagaaatgagcaaacaattgggttacaatttgcatgtgagcagtgtgtttgttgaggaggtgggcgggaattcgaattcggactggaattgggattgggaatactattcaaatatcactcgaagtgggcgtggaccgataaatggactttccctgtcacagattattcttcataatgtgagttttcaagagtttcagaggtagataaaacacagccatatagtcgccggttattcgctcaacactattatgctatacaatcgatctcccagtgagtttttttttaacaaaaaccatatggggttgcgcgattattcagtctgtgatcacttgtttggaacctacttttggtgtggttcgggattctgggttactcagtccgcggcgatatacttcggtactacggattgtggggattctcgggatacggactcgccgggattcggattcttcgcgctcctcactctctgctctactcttttcgcttcgctttctccgctgttgttgaccaggcgaacgaactcaagtgactaacgacgccctctgaattcggtcgacattttacatccagaagagcgggcgctgccggcgtcgatgtcgactgcgctgccatagaactatcggcgacagcgacgccgacagcggtaaagaccattcaatttgtagtttatttgttgtcgcttcgctgcgtccacagttattatctaccattccgccattccctgttcgccccgacccgaccaccaccctcaagccatcccctctgtttgcattctctgttgtgctcacacattccgtaaacattacacaaacaactctcggttcaaagtcaatgctgccgcttcggaacatgaacaactttcaggaaaaccgcgggttgtaggcgaacaaggaatgccctacgtggtcaatccagcataggcttggtgacccaaaagagcaccttggactaatgatcaccaaataagtccaaacaccacatctacctctcattattagatgaaaatagatttgaaataaccgagagagaggtaaggcacaattactttgcagtatcttttctccttttttgaaccaatcgtagttaactaatgtttcgtagggtatatcgcagtaagtaggcgtcagcgccgacagagctatagcgcagacgtcggcagagcagcaacagtcgggcgagcgaagccggcaacgggtggtatactcaatgcgagtggccaagagggaacccacaacacgtatacgagtagtgggctgcgagtggcgcatttcgtcatcgcgtgagatcccagagccgtgaatatcggccaagttcccagtcgctggtgcttacttctcctactggcccactttcccagagagcgggagaggaaaacccatttctctcaatctgtttgttgccaatggcatcattatcgtcgtgtcgcttttatctatcttttctgtttttaagactgcctaccatattttcatgttttgcccggagataataatattgaaagagcgtggtggggg

SEQ ID NO: 20678 - DNA, 1434 bp, DROSOPHILA
cgcctggtcaacaacagcggagaaagcgaagcgaaaagagtagagcagagagtgaggagcgcgaagaatccgaatcccggcgagtccgtatcccgagaatccccacaatccgtagtaccgaagtatatcgccgcggactgagtaacccagaatcccgaaccacaccaaaacatgtgcctttcatccccgattcccggccagaaacaggcgacgtctgttggccactgcaacggatcgtgcagcctggacaggaatggcaaccgcagcgcagccattgtcccgaatggaggagagctgaagcacagaggccatgccacagacgctacatcacacaccctggtcaaagatgacgacaatttgggctacaaggaggagaacgcggtctacaaggagcagcagctgctgcagcaacaggaccagacgctgaaggaggcggagcaggtggaggaggaagaggagtaccacccgcagatcagatggccggatctgggagcacaggcattcctgcacatcggtgccctctacggactgtaccagctcttctacgcgaacttctacacattcctctgggtggtggtcaccgtttgggtctccggcatcggcatcacggcgggagcccatcgcctctggtcccacaagtcctacactgcatcgctgcccctgaggattctgctggcctttgccttttcgatcgccggccagagagatgcctacacgtgggcccttgatcacaggatacatcacaagttctcggagacagacgccgatccgcacaatgcgaagcgtggtttcttcttcgcccacgtgggctggctgttcctaacgccccatcccaaggtggtggccaagaggaaggtcatcgacatgtccgatctggaggcggatgccgtctgcatgttccagcggaagtactacataccgctcttcgcgctctgctccatcatcctgccggtggccgtgccctggtacttctggaacgaggatctctggatgtccttctggatcaacttcaacatgcgcttcacctggaccctcaacgtggccttcttcgtgaacagcgtggcgcacatgtacggcaacaagccgtacgacaagaacctcatgtccactgaggctcccattgtctccctgctggccatgggagagggatggcacaattaccaccacgttttcccctgggactacaagacgggcgagtttggcaactacagcctcaacatcaccaccggcttcatcgacttttgcgcctggctaggcctggccaaaggacgtaaatcggtatcccctgacatggtcttgaggagagccaagaaatgcggcgatggaactcgcttcctggacgacgaccatgcccacaaggatccggtgtggggcttcggggacaaggacattccccgagaggatatcgtggagctggccaagatgcagaactaa

SEQ ID NO: 20679 - protein, 420 aa, DROSOPHILA
MCLSSPIPGQKQATSVGHCNGSCSLDRNGNRSAAIVPNGGELKHRGHATDATSHTLVKDDDNLGYKEENAVYKEQQLLQQQDQTLKEAEQVEEEEEYHPQIRWPDLGAQAFLHIGALYGLYQLFYANFYTFLWVVVTVWVSGIGITAGAHRLWSHKSYTASLPLRILLAFAFSIAGQRDAYTWALDHRIHHKFSETDADPHNAKRGFFFAHVGWLFLTPHPKVVAKRKVIDMSDLEADAVCMFQRKYYIPLFALCSIILPVAVPWYFWNEDLWMSFWINFNMRFTWTLNVAFFVNSVAHMYGNKPYDKNLMSTEAPIVSLLAMGEGWHNYHHVFPWDYKTGEFGNYSLNITTGFIDFCAWLGLAKGRKSVSPDMVLRRAKKCGDGTRFLDDDHAHKDPVWGFGDKDIPREDIVELAKMQN

SEQ ID NO: 20680 - DNA, 4183 bp, DROSOPHILA
gcaaacgtgcgaaatcaacagagagaacgagtgagcatgcccacagagtgcgagagagagcaagagcgggggtgcgagcgcaaaagaccgacaatttattttacttttattaacatgcgcgcaaaatatttatataaattgattacacattttcttgttcttttatcatcacccccttttttatattcaccctggcaaatgaattacgctgccccagccaaattgtttatatattatttatcaatcgattttaggggcatgccaaatttgatcagacgccagtcgcacacaaacacacacttgagcacacacattcacagaccaacactcgcgcatacatacacacgcaccagggtgtttgttttgtttttgtttgcggcttttttttttatcaatttgtgatcttttttcgcagccgcaaatttgattgtgatttaccgccgattggaaatgtaaacaatgctgtcgaactatcagcataaggctggcagttttaaaatacttttcatattttatagctgttgggtactcacaccttagcttatttgaaaaatttacatattacaagcacgccgttctaggtctgcttcttcttacgcgcgaacatttagtgtgaccgcagctcgaccgttcaaatataccattgcgaagcgcactgagaaacactctccaatagttctaagataccaaaaatttagcatactactatatgtaagttataatttcatttactatcccattagagaaattaattgatttttatgttctataatgcatttaactagttgccctagttttaatgttgttaaaatagcattacaacaattaccgtttataacttcactttcttcagagtgaccatataatgtaaagtacagtgaacactgtatataaagaatcaatacaaccatggatttacatatttttccatctggtttatatcaatagataatatatgttaaatgatatatataaaaactaaattacacaaaatttttttaggtatagtaggtttatttaaacttgtatacgattgaaatttctgcaatcaaatcaaatttgttgttacaataaagttcagttctacttcggaacttgaaatcttccccaaatatgttatttatgtgttatttatttggtaatttcaatccaagttgaaatcgttttccgagctatgtgtcgtcattacagtgcagtgcagttgtaaacggtttgtccgatttctcagcaataaatcggaatatatatgtagacaaagtgtgttgttttaggaggggaaggttctctaaagtccaagtaggtcctatccatttttgtgttttcttctcttacttgcagattttttttcgtttttttttttttgcttttacaacattcttttttttttgtgttgatttttggggaggggtgtgtggaaatgtttataaattgtatgttttaggcagctaccgattcggaatcgttgtagttatccgaaacataaccgtcgttggcatcattttcgccatcggagttccatttgaggccatctcctttggttggtgtcccatccacggcacggtcctcgtcgttcgactccttcttggagttgtgttggccctgatcggcggaatcagcatcatctgcatcgtcatcaatatttttcgctgggcgactacggggctttgttgtttcctctttggacaccttgccagcggcaagagagggacgtccacgtttcttcggcgccactaccgtcttctcaggcgagctgtgttcctcctccccggagttctcatcgtcctgatcgtcgtcattgtcctcgtgcttctcgacgggtgcagcattggcctttggacgaccgcgcggacgaccggtgggtacgtagccagtactgccaccgctacccgacttgttctgtggtggacgaccgcgtttcttgggcacttgtggctccccatcgccattggactcgacagcccgcttcttgggtcttcccaggccgcgtcccgtgcgcgatatgttcaggttgacggatccagccgacggtcggcccactgggcgacgttcttcgatgctgctgttgccgtcgtcgtcctcatcctgatcgtctgttttgaaagaaacaaagcaatgttagttaataggtataataatgaaatgaatccaggaatatatttaaagtaatatttgtgaaggtaaatcaatggtctatcgaccatttacatatttttgattttgattgattgcatggttgcggaatgttgaaatcatgactctacctgtgatcttcgaaaaaaaatcaccaggtagcgtaaagataaaagtgcaagtttggtggaagcaaacagtgcttaaatttccattaattgaattgagaccatgaaatgttggggatttacgtactaactgcactaccataggctcaccttcattctcgctatcgctgggctggtgcttcttgggcctgccggccttgcgcttcttggcggaaccgggcgtcttcaccgaatccccggatcctgatccggcgccaccactgctcttgggtcgtcccctgcccttcgtcggcgagggtgatgagttgtttgcaagctcagcgccggagccatcgccatcgccgtcctcctccccctcgtcttcgggatcttcgtcattttggatttttgacgccttcggtgggcgaccccgctgtccaccaccgccactggagcccttgttcttggcgggacgaccgcgctttttgatgcctggcgagattgctgcaaccgccgctgttgaagatttaccaccgacggatgcctttgacggtcggccgcgcttctttaccgcaacttcctccatttctctgtacgggattcaattagcaagcgaataaaaaaaatccttgtttcttcgcgtcccctcacacacacacgcgcacaaatgctctctctcacgaacacacgctcactcttttcgcttggctccgctcttcttcttcacctttttgtttgccgaaaatcaagctggaaaaatatacagaaaaacaattttgcattagggcttgaatgcgcataaatgctgcaaaaaatattctcaaaaaattcttaaaaattctagtttttccagatccgaaagggaattacttgcgttacttactttgccttctcaatttgtaattgtaaaatacgcgcacgctagtacagttcaaagtagtgatgtaaaaaaaaatatgtcggtgcatcgagcagcgataatttttgcgatatttttttcgatttgatatcgattaagcgctgcatcgatgcgttcaaaattgaggccgtttaatttaagtttgcgtaaaacaattccctttcatttggtcatattgcattttaactatgtattaacataaaatgaaacgtagcttttgtgaaaaactctttttacttttggaaattgtaaggtgtaaaaattgtctacttacagtttaggaatatcaaaagaaacaaatttataaaaaacttgaactaaagcaataaccaaaaattattttttgaacttccttcttgcgtgaacaaccaagttaagctatccatatgtccaaaagttaaacaagtttgaagtgactacatgagacggctggcctactattttaaaatatggtatgttgtgttcaaatttttttttttgcttgaagcgccaagctccaagtttttaaaacaagagagtacagtttagaagcaaccgtttattaaatagttacacatattgcagtttattaggctaatcacagttgaataattaaatactatttagtgggcgctcacttccacagcttgatgacaccgtttcgcgatgcagatgctatgtagatctggcccttgtccttgcacatcagcagatccgtgatggcatcgtggtgactggccgttggcatatccggccccgagcggggattctcctccgtggacgatcgcagctgctgcgagtcgcccgtgctggccatggaaatgatttgctcctcgatcacttggctgccatcgattaaccgggcactgaagggtggaatgaattgataattttattatattatcattataataacagatcaataattacccatagttgaaagccacatctgccaggttgtcattggcagcgggtactttaagcgatgagttctttgggttggtgatgtcccagtaccggatccgctgatccgaactgccggtgagaa

SEQ ID NO: 20681 - DNA, 1732 bp, DROSOPHILA
acatcactactttgaactgtactagcgtgcgcgtattttacaattacaaattgagaaggcaaacttgattttcggcaaacaaaaaggtgaagaagaagagcggagccaagcgaaaagagtgagcgtgtgttcgtgagagagagcatttgtgcgcgtgtgtgtgtgaggggacgcgaagaaacaaggattttttttattcgcttgctaattgaatcccgtacagagaaatggaggaagttgcggtaaagaagcgcggccgaccgtcaaaggcatccgtcggtggtaaatcttcaacagcggcggttgcagcaatctcgccaggcatcaaaaagcgcggtcgtcccgccaagaacaagggctccagtggcggtggtggacagcggggtcgcccaccgaaggcgtcaaaaatccaaaatgacgaagatcccgaagacgagggggaggaggacggcgatggcgatggctccggcgctgagcttgcaaacaactcatcaccctcgccgacgaagggcaggggacgacccaagagcagtggtggcgccggatcaggatccggggattcggtgaagacgcccggttccgccaagaagcgcaaggccggcaggcccaagaagcaccagcccagcgatagcgagaatgaagacgatcaggatgaggacgacgacggcaacagcagcatcgaagaacgtcgcccagtgggccgaccgtcggctggatccgtcaacctgaacatatcgcgcacgggacgcggcctgggaagacccaagaagcgggctgtcgagtccaatggcgatggggagccacaagtgcccaagaaacgcggtcgtccaccacagaacaagtcgggtagcggtggcagtactggctacgtacccaccggtcgtccgcgcggtcgtccaaaggccaatgctgcacccgtcgagaagcacgaggacaatgacgacgatcaggacgatgagaactccggggaggaggaacacagctcgcctgagaagacggtagtggcgccgaagaaacgtggacgtccctctcttgccgctggcaaggtgtccaaagaggaaacaacaaagccccgtagtcgcccagcgaaaaatattgatgacgatgcagatgatgctgattccgccgatcagggccaacacaactccaagaaggagtcgaacgacgaggaccgtgccgtggatgggacaccaaccaaaggagatggcctcaaatggaactccgatggcgaaaatgatgccaacgacggttatgtttcggataactacaacgattccgaatcggtagctgcctaaaacatacaatttataaacatttccacacacccctccccaaaaatcaacacaaaaaaaaaagaatgttgtaaaagcaaaaaaaaaaaaacgaaaaaaaatctgcaagtaagagaagaaaacacaaaaatggataggacctacttggactttagagaaccttcccctcctaaaacaacacactttgtctacatatatattccgatttattgctgagaaatcggacaaaccgtttacaactgcactgcactgtaatgacgacacatagctcggaaaacgatttcaacttggattgaaattaccaaataaataacacataaataacatatttggggaagatttcaagttccgaagtagaactgaactttattgtaacaacaaatttgatttgattgcagaaatttcaatcgtatacaagtttaaataaacctactatacct

SEQ ID NO: 20682 - protein, 355 aa, DROSOPHILA
MEEVAVKKRGRPSKASVGGKSSTAAVAAISPGIKKRGRPAKNKGSSGGGGQRGRPPKASKIQNDEDPEDEGEEDGDGDGSGAELANNSSPSPTKGRGRPKSSGGAGSGSGDSVKTPGSAKKRKAGRPKKHQPSDSENEDDQDEDDDGNSSIEERRPVGRPSAGSVNLNISRTGRGLGRPKKRAVESNGDGEPQVPKKRGRPPQNKSGSGGSTGYVPTGRPRGRPKANAAPVEKHEDNDDDQDDENSGEEEHSSPEKTVVAPKKRGRPSLAAGKVSKEETTKPRSRPAKNIDDDADDADSADQGQHNSKKESNDEDRAVDGTPTKGDGLKWNSDGENDANDGYVSDNYNDSESVAA

SEQ ID NO: 20683 - DNA, 7044 bp, DROSOPHILA
gaactaaaaccaaagaacaggcaacttgccaattcttatcaatggagctaactcaaaaagtgatatcagtaagtaaataaatcttaattgaacatatttatgaaaagataatagggcgccaaggaattagtaaacgttggtgctttacagcgttatcggacacgatctgccaatcccaaaaaaatcacctgttacaccaaatgcagaaaaaattaaaaacaaccatgcgagttctttttctcatttgctaaattattaagctttagtttagcaaacttgttttttttttgttttaattacttgtttgtgttggtttcttgtttcatatagtacattctatctcgatctatatatttaataatatatataccattactatttttatgttttcttcgtttaaaatcatcaattgaagttcaaggatttgcgctttcatcgtttcgatccgacattgacaatatttatgtctagatatatatatatatatatataagaatacatatatatatatatatatatatgtatattaagagttccaagaaaaatgatgtgtgagaattgtaacttatggacaaaaattcaaaattttatcatttgcttaaatattcttaatatttgtggttgtttagcatattttaaatatgtatgtgtttgcttgcatatccttcaactacgcgcatcgaattcataaaatataatgatgggtgagatggaaatggagggcggcttgggctggctatacatgaatgtaatatactttcgcgatggacttgcacagtttattattaacgcttgctcctggtttttgaggttgtgagagaggagtgaattgctaaacgagggtggggtggagggtgcatctgtgtatcttttctgtattttcgtgatttgtgttgcgctgcgcacagacagtttctctttcacatttgctgttcctatatagtatacgtgtgtacacatatatagttgttatcgactttgttttactccgtttggttatttgcgaaagtggctacgatgcgactgctgatgctgctgctgctgctggcccaggtcctttgcctgaagctgaggccttgctcattgagcccaccagtcgggtgcgttcgaagagtgcgaggcactgccgccgccgtaggagccgccataggagccaccaccggcgccgccgccatagtatccaccgccgcccgaattgccgcctgtaaaggaaatccactgttaagtttctgcctttaaactgattactgctgatggatgattccacactcaccaaacttaccgtacgagtttccattgctgcggtaactgccgccgccgcctcctgatccggaaccaccgctacgtggtggcggtccactgcgtccgccaccgccgccgccagagctttgacggtaatccctggagccgaagccgccaccataacgtccaccaccgcctcgtccagcccgcttggctccgccatgtccgcgatccgaactcatatcctccatgaaactggggatctcctgcttcgtttcgatcagcagctccaagagatcggagcaaatgttgcggttcttttcgttgaaaaaggaggtggccacaccaagattacccatacgtccggtacgcccgatacggtggacatactcctccacatccgagggcaggtcaaagttaataacgtgcttaacgtgcggaatgtccaggccacgagcggccacggctgtggccaccaggatggggcagtcgcccgatcggaagcagcgcagtgcctcctcgcgctccttctgcgtgcgatcaccgtggatgctagtgacgggatgattgcactggtacaggaactcctccagcgagtctgcacccttcttagtctccacaaagatcagtgttaggctgtctttggtgtattcggggccatcgcggatagacgagagcagatccagcagatacgagcgcttgtcgggttcatagacccacaggattgtctgcgtaatgttctcagatgtggagcccacacgaccaacggccaagaaaatgtagttgctgaggaaatcgctggctaactcctggatctgcttggggaatgtggccgagaacataagcgtctggcgctgtccggttggcggcatgtttagctgttcgacgatgcgacggatctgcggctcgaaacccatgtccaacatacgatcagcctcatccagtacaaggaatcgaatgttctccagtcccacctttccgcgtgtgatcatgtcctctaggcgaccgggtgtggccacaatcagatggcaaccgcggtccagctcgcgcatctgctcgctagtattgtttccgccgtacagcactgccgggcgcatccgggagcgataggcgaacttcttggcctcctcaaagatctgggtggccagttcgcgggtcggcgccagcaccagacccaacggatactgcttgcgccggctgtactgccgggtgctttgcggcgggggcacatgtcccagctcgtacatctggttgagaatcggcaccaggaaggcggccgtcttgccggatccagtctgggcgcaggccattagatcccggccattgataatgatcggaatggcgtgcttctgcaccggtgtcggtttgtcataacgtgctaaggccacgttgttgcggataatctccgtcagctgcacatcatcgaacgatgtgatgttcgggggcacattctggcccgtcgcctccacgggtatatcctcgtatttgtcaaaattgattcccgtattgcccacgccgaacagctccacctccaggcgctcatctcgggcgcccagctttgtgtagtcgacgtttgagccgccgccctccttccagcggctgttgtaaccgccgcctccgcgctcgccgcgattgttgtagcttctgttgccgccggcagactgtccgccctcgctgccatcgaatccggcaggacgttctggctcctgccaacgatcgttgcgcggctgctgctgctgctgtgcctggccatcctcggcagtctgctcgttgaggttgctaccgcttccgccgccaccgccgcggtacgatggtccgcgtccaaatcctcgacctcctccgccgcctccgccgctgcgattccagtcaccgccgcgacgcgaatcgaattcaccacctgcaaaagtaattacattttctctaataatatgggcatattagaggaccaagtataagtcgtacgcattacgattttaaggatcattacattatggagctgtaaaaattaattaaatgtccttgtgcttcttgatagtgaatagaccacctgttagccaatagtacccaccgttgtagttgtcctcgaaacgtccaccgcctccacgtcgtcctccgccgccgcttccgtaaccgtagtcgccgctctggcgattgaagccgcgaccaccaccgccgccgcctctgcggtattcgcctccgcctccgcgcgactgttgagggtccctagtctcctggcgcggattcccggatctggagtcgaagccctgaccctggccctgtccttggccctggctctctgcgtccgctgcgttgttattgccaccaccaccacgaaggtgcgggggcacatacacaccaccggtgaccgagttagtggaagtcttgctggttatggggccgctgtagtcagcagagccgccattcaagtccagaccagcaacctgcaagtgataaagattaaatggttagtcttcttcagaacttgtgcaaaaaatgtggcatcaaatgtggtttcctaacacttaaattataggttttgttctattttttttgtacttaatcattggtttaagattacttttctttgttatataccaagtttacgggaacacagtgcatttaatgataagatctataccagcaatgcaaaactaagctacacaaataatctttgctccactaatacaattgatttatagtacacatggccaattaacatatgttgcctgtaagttagccggcaccagttcaagaatcaagttcaacagtttggcaaaagattcgccggggaaattttctccagaactgccaaaatgaattcgttcccgcttagcaacatgtgctatttaccgctcttcctcttagcaacgcaacgtgtatatatacatagatacatatgtatgtacgtgcaaatctccggaatacacagatagagagaggcgcaactagtttaaagcttcgaatttagtgctctccctgtaagcgtctctctcgcactcgcaggcaagctattacacaaagagagtccgcctggtaacccaacaaaaacaacacgtgaacgagccacccacacatgggaaaacaaatcgcaccgtaggggcaaaacacaaagcccggttgcgggacccaagtggacagaatggtgatgaaagcaagggaactctttcaagaactagtttaaatgtatacaatgattattattcccgtatatcttgtaatattcaatattttgccttcttcatttatattaattaacaaaggcagctaaatatgtaattcgcagattttgtggggcgtcacttaacggctagatcgttgctagattcattgcgtgcatttgaggcatacagaaatagtagtatttaactaaactatttccatttgaaagcattaacgtttgtttatttcacatctctaataaagtttaattctttttaaggacctaacaaaggcttgttaaaatagtgtatgtagattacatgctttgcttttcttccatttttttttgccaaatcacccttgaaattaatcaccagatcgcttactcctggcaaccctatttacaacagcttccacatgtgtgagcaagcgagagagagcgagatataacacacacacacgaccagccttagaacagcggcactgctcgcacacacgacacactcaacgtgagaggccgaatggaaactttcatatgtatatattatacatgtcaaattggaggcaagcgagcaaaaattatacaaaagaaattacaaattggaatgacgaagagggacccaggcgcacacacacacgcacatatatgcaagccattgacaccgacacaattcaccgttgtaaaacgagcgatagagacattagtgtgttatgaaatcaataaatttctaggcgaactttttcaaatagccgcatgagcatcacgaacacacacacacagccaccgcatacacatgcgtgttccattcttatatagatggtaaatggtattttcagcagttaaaaacgctacttacttgctgctctagacctgtgccattttggttaatagcattactcatattatcctccaatcagttgctttttttttcttgctttccgtttaggaaaattttgcaatggttacgctttgaatttttttttttgaatgcacacttgcaatttgcgacaaaaaaatgtatacgatcgttgtgttggtgttgcactttgtgtctatacgtttttccttagtttttccgacaaaaaacttcttacgttccacaagctactgcgttctcgtgtgaaatttcagggttcttttcgttcctcgcacacaattccctttgttcggcttgaaactgagacgtttccgtatcggatttggctggcctgcttgtgccaacaattacaattacaagcgctatgggcttggaaaatgctgcttctccgacgagttcacgtttttttccgctttcagacgcgtgtctaaaaaatcagggctgctttagcacgtatatcgatgaggaatcgatagatgcggtcggtggaggtagagcagagactccaacctgggctctcggcggcggttactggcaaagactccggcaagggcgttgccagatctatatcctcgtctcgcggtctatgaaattcaaattgaattttttcacttttgctttttcggcgcgtcgatcccttctaggctgttgttgttttttgaatggaagagaaatgaggctgggcagttaaattttgtttcttaaaggccaaaaatgtttgtgtttatgtttaggaatagttgtttataaggcgtcagccgctgtaccccatttcgttatttgaagcaaaagtcaaagaaattcaaattaaatttgaaatttagtatatatatgtgattgccgtaaaataggtattaaaaatttccaaacaattccatactcaagttccctccaagtctgttaaagaaaactaaaattcgaagtttcgaactctggaatatattcattcactttcgtcttcagaatatacatattgtgaatgtacatgtttatatagaataaatgcttttggtattggccttagcttgagattagttagtggaacaataaatatggctataaagtatcgtatatatgtatataataataattttcatatcgttcagcccttgagcaggcagcgggagtagaactcccggtcgatagcgtcgtttggaatgtatgagctccacttgaagatcagcgccagcgtgtccccggcggacatgtgatccagagcgatgttgaggaaacagttccagttgtagaagaagtggcgtcccaactgttcctgttccacgccagatatgcactcgcagttggcgcacaccagtcgtccgccgcgttgcagttccacgaactgttcgaagcagcggccccatgcgctcacgctcagttgtttgcccacgtcagccagaagttcggggagtccgtagttgaggacgatggccaccactttggtgagattctgttcggctaggtaaaatttagctaagacgtctaatagtgccggcactgattgaacaacatcaaagcacttcagttgctcgccacgggaccagaagtatcgcaggagcactgctccaagctcatgatactggcaggaggtatcgaagcgaagggggaacgagcaatgctcacacttgacaatctccgcattttgcgaagtatttagcagcacaaatccggcagctatgtgatcccgcgtagcgtcgtccacttcccagatcatctccggatccaggtaatcgaaatacatctcgtagcaattgcgttgcgcttggtc

SEQ ID NO: 20684 - DNA, 3218 bp, DROSOPHILA
acagcggctgacgccttataaacaactattcctaaacataaacacaaacatttttggcctttaagaaacaaaatttaactgcccagcctcatttctcttccattcaaaaaacaacaacagcctagaagggatcgacgcgccgaaaaagcaaaagtgaaaaaattcaatttgaatttcatagaccgcgagacgaggatatagatctggcaacgcccttgccggagtctttgccagtaaccgccgccgagagcccaggttggagtctctgctctacctccaccgaccgcatctatcgattcctcatcgatatacgtgctaaagcagccctgattttttagacacgcgtctgaaagcggaaaaaaacgtgaactcgtcggagaagcagcattttccaagcccatagcgcttgtaattgtaattgttggcacaagcaggccagccaaatccgatacggaaacgtctcagtttcaagccgaacaaagggaattgtgtgcgaggaacgaaaagaaccctgaaatttcacacgagaacgcagtagcttgtggaacgtaagaagttttttgtcggaaaaactaaggaaaaacgtatagacacaaagtgcaacaccaacacaacgatcgtatacatttttttgtcgcaaattgcaagtgtgcattcaaaaaaaaaaattcaaagcgtaaccattgcaaaattttcctaaacggaaagcaagaaaaaaaaagcaactgattggaggataatatgagtaatgctattaaccaaaatggcacaggtctagagcagcaagttgctggtctggacttgaatggcggctctgctgactacagcggccccataaccagcaagacttccactaactcggtcaccggtggtgtgtatgtgcccccgcaccttcgtggtggtggtggcaataacaacgcagcggacgcagagagccagggccaaggacagggccagggtcagggcttcgactccagatccgggaatccgcgccaggagactagggaccctcaacagtcgcgcggaggcggaggcgaataccgcagaggcggcggcggtggtggtcgcggcttcaatcgccagagcggcgactacggttacggaagcggcggcggaggacgacgtggaggcggtggacgtttcgaggacaactacaacggtggtgaattcgattcgcgtcgcggcggtgactggaatcgcagcggcggaggcggcggaggaggtcgaggatttggacgcggaccatcgtaccgcggcggtggcggcggaagcggtagcaacctcaacgagcagactgccgaggatggccaggcacagcagcagcagcagccgcgcaacgatcgttggcaggagccagaacgtcctgccggattcgatggcagcgagggcggacagtctgccggcggcaacagaagctacaacaatcgcggcgagcgcggaggcggcggttacaacagccgctggaaggagggcggcggctcaaacgtcgactacacaaagctgggcgcccgagatgagcgcctggaggtggagctgttcggcgtgggcaatacgggaatcaattttgacaaatacgaggatatacccgtggaggcgacgggccagaatgtgcccccgaacatcacatcgttcgatgatgtgcagctgacggagattatccgcaacaacgtggccttagcacgttatgacaaaccgacaccggtgcagaagcacgccattccgatcattatcaatggccgggatctaatggcctgcgcccagactggatccggcaagacggccgccttcctggtgccgattctcaaccagatgtacgagctgggacatgtgcccccgccgcaaagcacccggcagtacagccggcgcaagcagtatccgttgggtctggtgctggcgccgacccgcgaactggccacccagatctttgaggaggccaagaagttcgcctatcgctcccggatgcgcccggcagtgctgtacggcggaaacaatactagcgagcagatgcgcgagctggaccgcggttgccatctgattgtggccacacccggtcgcctagaggacatgatcacacgcggaaaggtgggactggagaacattcgattccttgtactggatgaggctgatcgtatgttggacatgggtttcgagccgcagatccgtcgcatcgtcgaacagctaaacatgccgccaaccggacagcgccagacgcttatgttctcggccacattccccaagcagatccaggagttagccagcgatttcctcagcaactacattttcttggccgttggtcgtgtgggctccacatctgagaacattacgcagacaatcctgtgggtctatgaacccgacaagcgctcgtatctgctggatctgctctcgtctatccgcgatggccccgaatacaccaaagacagcctaacactgatctttgtggagactaagaagggtgcagactcgctggaggagttcctgtaccagtgcaatcatcccgtcactagcatccacggtgatcgcacgcagaaggagcgcgaggaggcactgcgctgcttccgatcgggcgactgccccatcctggtggccacagccgtggccgctcgtggcctggacattccgcacgttaagcacgttattaactttgacctgccctcggatgtggaggagtatgtccaccgtatcgggcgtaccggacgtatgggtaatcttggtgtggccacctcctttttcaacgaaaagaaccgcaacatttgctccgatctcttggagctgctgatcgaaacgaagcaggagatccccagtttcatggaggatatgagttcggatcgcggacatggcggagccaagcgggctggacgaggcggtggtggacgttatggtggcggcttcggctccagggattaccgtcaaagctctggcggcggcggtggcggacgcagtggaccgccaccacgtagcggtggttccggatcaggaggcggcggcggcagttaccgcagcaatggaaactcgtacggcggcaattcgggcggcggtggatactatggcggcggcgccggtggtggctcctatggcggctcctacggcggcggcagtgcctcgcactcttcgaacgcacccgactggtgggctcaatgagcaaggcctcagcttcaggcaaaggacctgggccagcagcagcagcagcatcagcagtcgcatcgtagccactttcgcaa

SEQ ID NO: 20685 - protein, 798 aa, DROSOPHILA
MSNAINQNGTGLEQQVAGLDLNGGSADYSGPITSKTSTNSVTGGVYVPPHLRGGGGNNNAADAESQGQGQGQGQGFDSRSGNPRQETRDPQQSRGGGGEYRRGGGGGGRGFNRQSGDYGYGSGGGGRRGGGGRFEDNYNGGEFDSRRGGDWNRSGGGGGGGRGFGRGPSYRGGGGGSGSNLNEQTAEDGQAQQQQQPRNDRWQEPERPAGFDGSEGGQSAGGNRSYNNRGERGGGGYNSRWKEGGGSNVDYTKLGARDERLEVELFGVGNTGINFDKYEDIPVEATGQNVPPNITSFDDVQLTEIIRNNVALARYDKPTPVQKHAIPIIINGRDLMACAQTGSGKTAAFLVPILNQMYELGHVPPPQSTRQYSRRKQYPLGLVLAPTRELATQIFEEAKKFAYRSRMRPAVLYGGNNTSEQMRELDRGCHLIVATPGRLEDMITRGKVGLENIRFLVLDEADRMLDMGFEPQIRRIVEQLNMPPTGQRQTLMFSATFPKQIQELASDFLSNYIFLAVGRVGSTSENITQTILWVYEPDKRSYLLDLLSSIRDGPEYTKDSLTLIFVETKKGADSLEEFLYQCNHPVTSIHGDRTQKEREEALRCFRSGDCPILVATAVAARGLDIPHVKHVINFDLPSDVEEYVHRIGRTGRMGNLGVATSFFNEKNRNICSDLLELLIETKQEIPSFMEDMSSDRGHGGAKRAGRGGGGRYGGGFGSRDYRQSSGGGGGGRSGPPPRSGGSGSGGGGGSYRSNGNSYGGNSGGGGYYGGGAGGGSYGGSYGGGSASHSSNAPDWWAQ

SEQ ID NO: 20686 - DNA, 6904 bp, DROSOPHILA
accgacggatgcctttgacggtcggccgcgcttctttaccgcaacttcctccatttctctgtacgggattcaattagcaagcgaataaaaaaaatccttgtttcttcgcgtcccctcacacacacacgcgcacaaatgctctctctcacgaacacacgctcactcttttcgcttggctccgctcttcttcttcacctttttgtttgccgaaaatcaagctggaaaaatatacagaaaaacaattttgcattagggcttgaatgcgcataaatgctgcaaaaaatattctcaaaaaattcttaaaaattctagtttttccagatccgaaagggaattacttgcgttacttactttgccttctcaatttgtaattgtaaaatacgcgcacgctagtacagttcaaagtagtgatgtaaaaaaaaatatgtcggtgcatcgagcagcgataatttttgcgatatttttttcgatttgatatcgattaagcgctgcatcgatgcgttcaaaattgaggccgtttaatttaagtttgcgtaaaacaattccctttcatttggtcatattgcattttaactatgtattaacataaaatgaaacgtagcttttgtgaaaaactctttttacttttggaaattgtaaggtgtaaaaattgtctacttacagtttaggaatatcaaaagaaacaaatttataaaaaacttgaactaaagcaataaccaaaaattattttttgaacttccttcttgcgtgaacaaccaagttaagctatccatatgtccaaaagttaaacaagtttgaagtgactacatgagacggctggcctactattttaaaatatggtatgttgtgttcaaatttttttttttgcttgaagcgccaagctccaagtttttaaaacaagagagtacagtttagaagcaaccgtttattaaatagttacacatattgcagtttattaggctaatcacagttgaataattaaatactatttagtgggcgctcacttccacagcttgatgacaccgtttcgcgatgcagatgctatgtagatctggcccttgtccttgcacatcagcagatccgtgatggcatcgtggtgactggccgttggcatatccggccccgagcggggattctcctccgtggacgatcgcagctgctgcgagtcgcccgtgctggccatggaaatgatttgctcctcgatcacttggctgccatcgattaaccgggcactgaagggtggaatgaattgataattttattatattatcattataataacagatcaataattacccatagttgaaagccacatctgccaggttgtcattggcagcgggtactttaagcgatgagttctttgggttggtgatgtcccagtaccggatccgctgatccgaactgccggtgagaataaagggtgaaccatcgaccacgccactgagaatgccgcacgtggtggccggatcgctgggactagcgctcgataaagccgccaccggacttgcccacaaaaccgtctggcgctgtcccgtttctatattccacacggatacctcattgtttgactgcgaggctgagatcaggtatgaaggctctgtgggatggcaggccaccttgcgtatccacgaatccgccggatgcttgatttccgcaatgggcagacggaagcgtagatcccagcagatgtgcttaccgccgctggtaccggtggccagccaagatcccgttggatccgcacagatcgttgtgatcaccccatgacggagttcattctgtagcctccaggcgctgtgctgcatcctcgtgtcccaggccacaatgccgccatatagcgtggcgtacacgatgacactttgcgtggcctgatcgtaggcgtgcatgtccacaacaggaccgtctttatgatcactacgaatgaaatgattatgttgtaatagggtaattaagtaagtgaagtcatcttacttttgatttagggcctgttgaagcgtcattttggcggaattccgatcgattcgcatcatcagcatgctgccatccttgccgcccaccgccagcgattgtccactatcacaggccgccagtgcatagatgggtgtattggccgaataaacctgcctcgatttgtttacaccctgattgccattcagtttgctgcaatcccacaatcgcactgtgccgtctatgctgccgctggcgaagagtgatccgtggggccgcaatgaagccagcttgatcacggattccgaatgctcgtgcaggtgagccaccaaagtgccagtcatccgccagcctggcggatagggtgtcaccagcttgtcgtagctgcaacgctgcgagatggccaacacattgtagcgactcttaatcttggccgtcagcgattcgagatccttgcggcactcggaggagcgttccagccaacagtttcgttccggcattgtgtattcacccagcgaagtggccgcactcactgtggcagttggcactccaaggactacggctccagaagccggacttccggccagtccgccagctcccagcggtgtgattgctgcatccgaggcgggcgaagctagagttggaccctcgctggagcctgtaaagaaattggcattaattcaagcaagtattaaatggtttcctcgttgatatcatacgacttaacaagaatataaagtttataaaagcataattttatttcaaacacgtaagaaaaacaaatcgagtaacaaacaaggttattaaaaagcatataaaaaaatgaaatattggtttaattcggttcatgctcccaacattttatccttcagcgaataaattcccataatccggaactaaaaataactaagaaattcaaacaagcgattactttcaaactaaaaaccagggaaaaaggaaattaagcaatttagtggacttgttactacccaattaagttaagtgagatgaaatccagaatataactcatttacttacggttatcgaggggcattttgctagctttgtccgccagcggatattcatgacaagcgacttgcttgcgactgaccacgatgcgtccattccccgaggcggtgtcgtccagatcctgcagggccttgtgcttcatggagataaggaacgggttcatggccagtagctgcatctcaattagatccgttaatccctcagagcttaagcgtctaaagagctgcacgttaaaggaacaatttacaatttatacaattttgatctaatccacatacattacgcaaggtctgtcccatctcctcgtactgcggcagagctccctgcctcgtctgactacgaacacgtgatcgtgcctccagtgctctgataaaatgatgaatgtcttggaagcgcagaacgctgtcgaagatctgccgcggcacaggcggatgcacacagtccaacaggatgtgcggtttctccacctggatgagcggggccttgagaaatgccccaatcgccggcataatcttgcactgcacatcgatggcgctgagattacgcgccgtggtggcaatcatgccgcagatttcgtgacgaacccaaagatttggatggcacagataacaggctgtctcttggacaatttccgtaacggctggcttcttaatgtgacccagttcgataagaatggtcacagcacgaatggcttttgcaatgacgaactcctcgcgatccgtgaaaccttgctgcagaagtggcacgagaatgtccgacgcctgccagcccacatagccagccactccggcgatgttgtcatagaatgctcctctcaagttcttgtcctcatcattaaggaacgtcatgatgtgcgagagtatcacatcgttcgctttttccttgccaaagaaggcacagagatcgcagatgcccgactccatcagtgtttgcttgaccaccggttgggaatccgttaacagactgagtactgcctgtctaactatgtcatggagggcgttcagttctgcctcgtaacgtggagtgggcatatcgttaggagcatttcgttgcgtttcctccaaaaagtagacagcgctcttggccagtgcagctatattccgggcaaaggccacgcgaacaataactgcactcgtctcgctggccaaatcggtgatggagggcagaatgtactcgggaaacacgttggcatcgctgcgtggaatgtcctttaccatgcccaaacaggcggtcagagtttcgatggcctgaacctgcaccttggctggcgatttctgggccaaatggagctaaaaagatttgtaggcataagagaattatcaattgcactctacaaaaaaatagagtacttacaatgtagggcaaaatgcgatccaggatggtctcggatgttgtgtacttcgacagcttttgcagaagttccaaggctgcaattttggtattcgactgcttcagtcctcgtatgcaggatgtgactaccgtgatgatcaaaatgagaccatcatgctccggtggcagtcgggcacacaacgtgggatccttcttttcttccttttcctcctcttccggtgttaaatcctgggcctgtgtcagcactttaatacagtgcccaatgtccttatgcagacactgaatcttgtcatccggcgacatgatcggtgttgagctgaacatttgcaagtacgactgcaggaaggagtagaagtattcgggaaacaactgaccgcgctcctggtccaagtaatcctcggcgctctttcggttcatcgagtgtatgtcaatcatagaggccagcagattgcgcaacctttcgttttcgatgcccgccagatgtttctccaccagatctcgctcgccacgcctgtaagccagcagctgggagagttcaaagggcgcagttccctctgtccagagttccagcaaggcacagcctgccgaaaagatgtccatggctggcaacaaagtgttacccgcatagctaggagcaagtcgaattatggaatcggtgtgtatgaccgacatattaccattgccaccatcatcatcggaggccagtgttttaacgaatcgttcgggtgcaatatagcaggttcgccttctactcgtatcgaagaagtacgtataatccgccggattgtcctccggcaaatatgtgggcttaaaggaggcaaagtcggagagcagaatccagttccaagacgtaatcaagatgttctccagcttgatgtccccgtggcagatcttctgtttgtggcactgattcagggcacacaaaatttggaacgttatccactttttctccaatacggtgagaaatggtcgtgtggatacgcgatcatagagactgtgcttcacatactcccgcattatgtaggctgccttgtcgataagctaaaaatgatgattaattattgtcgtacgcttttaataggattatgtgttagaaacatttcatggaacacaccaaatattgaaatttgatgactcaatatagacgaagctaggtggattgtggctccattgcattgtgcatacccttgcacagtacatattcatgtgataaatctatttgtagaataccaacctcgacccgctgaaagggtaaacaattgacggcattggccagcgagagtgtcttcttgatgccctccaatcgctccttgtgatcctccagtggcaaagtgggatcgtgcttcacaaacaccttgaccactatttgcccctcatccgttttagccttggccaccttgaagaatctcgtgctgcccatactgtgcaaaattcgtgggtgtcaacaattttcttttggcaaatcatcatattttcacttacttggaactgaaggcgatctcggatccaaactggccggaaaaatagtgttccaccgcataaatttgcgaaggggcaatgcccaccagttgattgcccatcctgattgctattgcactttgtagtgccagcaattataggtaattttgttagtttattcaacaataacaagaaaacgaagtcttcgtcttttctgcgcagccaaacagctggtggcgaaaaccaatcgatgttatcgataagtacactggccaacatattcacttctttttttaagtttcctaaacattttatcaacattattttatcattttttatattggcaatactttttcaaaaatcgcggatttaaatatttcctaattgaaattttattttacacacttatttcattaaggaacatcgatataccgcacaccaactaataacaatcgataatatggtatgagttcaaatacataattcaatttaaaaaaggccgcgaattttgtatgtgacaagtactttagagtggagtttattccaataactttgaatttacaaacataagaatgaaactctattcgaattatttaatatgctaataactaatttatggggaaaggtcatcttgcttcggagttggaagaacgtgaagaaagtaaagaagtgaacaagatcgatacagatacacctctttagttcggcatgacggacccattaaactgattataaatttatgtaacgggcacactgcaatctgtttgttgaataaattcgaaatgggccatgacgagagccaaaatcaacccaccaccaagagtccaggtgacaaatgtgccgagtatttcattgggttgcttaaagaacttgaaatgagaactttaatttaaggtgcaaaccaatatatacccttgtatatagcggatattcaatgttattaaatatttaatataacttttatttagattgaaaatgggtatagtgtgcattgagaattcaatcgaaaaggtttataaacgatttaacatttacacaaaattaatttgtgaaaaaatatggtttaaaatgtagttttaatttaattaatgttaatttttcaattttccaagaccagttcttt

SEQ ID NO: 20687 - DNA, 4030 bp, DROSOPHILA
gatgggcaatcaactggtgggcattgccccttcgcaaatttatgcggtggaacactatttttccggccagtttggatccgagatcgccttcagttccaatatgggcagcacgagattcttcaaggtggccaaggctaaaacggatgaggggcaaatagtggtcaaggtgtttgtgaagcacgatcccactttgccactggaggatcacaaggagcgattggagggcatcaagaagacactctcgctggccaatgccgtcaattgtttaccctttcagcgggtcgagcttatcgacaaggcagcctacataatgcgggagtatgtgaagcacagtctctatgatcgcgtatccacacgaccatttctcaccgtattggagaaaaagtggataacgttccaaattttgtgtgccctgaatcagtgccacaaacagaagatctgccacggggacatcaagctggagaacatcttgattacgtcttggaactggattctgctctccgactttgcctcctttaagcccacatatttgccggaggacaatccggcggattatacgtacttcttcgatacgagtagaaggcgaacctgctatattgcacccgaacgattcgttaaaacactggcctccgatgatgatggtggcaatggtaatatgtcggtcatacacaccgattccataattcgacttgctcctagctatgcgggtaacactttgttgccagccatggacatcttttcggcaggctgtgccttgctggaactctggacagagggaactgcgccctttgaactctcccagctgctggcttacaggcgtggcgagcgagatctggtggagaaacatctggcgggcatcgaaaacgaaaggttgcgcaatctgctggcctctatgattgacatacactcgatgaaccgaaagagcgccgaggattacttggaccaggagcgcggtcagttgtttcccgaatacttctactccttcctgcagtcgtacttgcaaatgttcagctcaacaccgatcatgtcgccggatgacaagattcagtgtctgcataaggacattgggcactgtattaaagtgctgacacaggcccaggatttaacaccggaagaggaggaaaaggaagaaaagaaggatcccacgttgtgtgcccgactgccaccggagcatgatggtctcattttgatcatcacggtagtcacatcctgcatacgaggactgaagcagtcgaataccaaaattgcagccttggaacttctgcaaaagctgtcgaagtacacaacatccgagaccatcctggatcgcattttgccctacattctccatttggcccagaaatcgccagccaaggtgcaggttcaggccatcgaaactctgaccgcctgtttgggcatggtaaaggacattccacgcagcgatgccaacgtgtttcccgagtacattctgccctccatcaccgatttggccagcgagacgagtgcagttattgttcgcgtggcctttgcccggaatatagctgcactggccaagagcgctgtctactttttggaggaaacgcaacgaaatgctcctaacgatatgcccactccacgttacgaggcagaactgaacgccctccatgacatagttagacaggcagtactcagtctgttaacggattcccaaccggtggtcaagcaaacactgatggagtcgggcatctgcgatctctgtgccttctttggcaaggaaaaagcgaacgatgtgatactctcgcacatcatgacgttccttaatgatgaggacaagaacttgagaggagcattctatgacaacatcgccggagtggctggctatgtgggctggcaggcgtcggacattctcgtgccacttctgcagcaaggtttcacggatcgcgaggagttcgtcattgcaaaagccattcgtgctgtgaccattcttatcgaactgggtcacattaagaagccagccgttacggaaattgtccaagagacagcctgttatctgtgccatccaaatctttgggttcgtcacgaaatctgcggcatgattgccaccacggcgcgtaatctcagcgccatcgatgtgcagtgcaagattatgccggcgattggggcatttctcaaggccccgctcatccaggtggagaaaccgcacatcctgttggactgtgtgcatccgcctgtgccgcggcagatcttcgacagcgttctgcgcttccaagacattcatcattttatcagagcactggaggcacgatcacgtgttcgtagtcagacgaggcagggagctctgccgcagtacgaggagatgggacagaccttgcgtaatctctttagacgcttaagctctgagggattaacggatctaattgagatgcagctactggccatgaacccgttccttatctccatgaagcacaaggccctgcaggatctggacgacaccgcctcggggaatggacgcatcgtggtcagtcgcaagcaagtcgcttgtcatgaatatccgctggcggacaaagctagcaaaatgcccctcgataaccgctccagcgagggtccaactctagcttcgcccgcctcggatgcagcaatcacaccgctgggagctggcggactggccggaagtccggcttctggagccgtagtccttggagtgccaactgccacagtgagtgcggccacttcgctgggtgaatacacaatgccggaacgaaactgttggctggaacgctcctccgagtgccgcaaggatctcgaatcgctgacggccaagattaagagtcgctacaatgtgttggccatctcgcagcgttgcagctacgacaagctggtgacaccctatccgccaggctggcggatgactggcactttggtggctcacctgcacgagcattcggaatccgtgatcaagctggcttcattgcggccccacggatcactcttcgccagcggcagcatagacggcacagtgcgattgtgggattgcagcaaactgaatggcaatcagggtgtaaacaaatcgaggcaggtttattcggccaatacacccatctatgcactggcggcctgtgatagtggacaatcgctggcggtgggcggcaaggatggcagcatgctgatgatgcgaatcgatcggaattccgccaaaatgacgcttcaacaggccctaaatcaaaatgatcataaagacggtcctgttgtggacatgcacgcctacgatcaggccacgcaaagtgtcatcgtgtacgccacgctatatggcggcattgtggcctgggacacgaggatgcagcacagcgcctggaggctacagaatgaactccgtcatggggtgatcacaacgatctgtgcggatccaacgggatcttggctggccaccggtaccagcggcggtaagcacatctgctgggatctacgcttccgtctgcccattgcggaaatcaagcatccggcggattcgtggatacgcaaggtggcctgccatcccacagagccttcatacctgatctcagcctcgcagtcaaacaatgaggtatccgtgtggaatatagaaacgggacagcgccagacggttttgtgggcaagtccggtggcggctttatcgagcgctagtcccagcgatccggccaccacgtgcggcattctcagtggcgtggtcgatggttcaccctttattctcaccggcagttcggatcagcggatccggtactgggacatcaccaacccaaagaactcatcgcttaaagtacccgctgccaatgacaacctggcagatgtggctttcaactatggtgcccggttaatcgatggcagccaagtgatcgaggagcaaatcatttccatggccagcacgggcgactcgcagcagctgcgatcgtccacggaggagaatccccgctcggggccggatatgccaacggccagtcaccacgatgccatcacggatctgctgatgtgcaaggacaagggccagatctacatagcatctgcatcgcgaaacggtgtcatcaagctgtggaagtga

SEQ ID NO: 20688 - protein, 1342 aa, DROSOPHILA
MGNQLVGIAPSQIYAVEHYFSGQFGSEIAFSSNMGSTRFFKVAKAKTDEGQIVVKVFVKHDPTLPLEDHKERLEGIKKTLSLANAVNCLPFQRVELIDKAAYIMREYVKHSLYDRVSTRPFLTVLEKKWITFQILCALNQCHKQKICHGDIKLENILITSWNWILLSDFASFKPTYLPEDNPADYTYFFDTSRRRTCYIAPERFVKTLASDDDGGNGNMSVIHTDSIIRLAPSYAGNTLLPAMDIFSAGCALLELWTEGTAPFELSQLLAYRRGERDLVEKHLAGIENERLRNLLASMIDIHSMNRKSAEDYLDQERGQLFPEYFYSFLQSYLQMFSSTPIMSPDDKIQCLHKDIGHCIKVLTQAQDLTPEEEEKEEKKDPTLCARLPPEHDGLILIITVVTSCIRGLKQSNTKIAALELLQKLSKYTTSETILDRILPYILHLAQKSPAKVQVQAIETLTACLGMVKDIPRSDANVFPEYILPSITDLASETSAVIVRVAFARNIAALAKSAVYFLEETQRNAPNDMPTPRYEAELNALHDIVRQAVLSLLTDSQPVVKQTLMESGICDLCAFFGKEKANDVILSHIMTFLNDEDKNLRGAFYDNIAGVAGYVGWQASDILVPLLQQGFTDREEFVIAKAIRAVTILIELGHIKKPAVTEIVQETACYLCHPNLWVRHEICGMIATTARNLSAIDVQCKIMPAIGAFLKAPLIQVEKPHILLDCVHPPVPRQIFDSVLRFQDIHHFIRALEARSRVRSQTRQGALPQYEEMGQTLRNLFRRLSSEGLTDLIEMQLLAMNPFLISMKHKALQDLDDTASGNGRIVVSRKQVACHEYPLADKASKMPLDNRSSEGPTLASPASDAAITPLGAGGLAGSPASGAVVLGVPTATVSAATSLGEYTMPERNCWLERSSECRKDLESLTAKIKSRYNVLAISQRCSYDKLVTPYPPGWRMTGTLVAHLHEHSESVIKLASLRPHGSLFASGSIDGTVRLWDCSKLNGNQGVNKSRQVYSANTPIYALAACDSGQSLAVGGKDGSMLMMRIDRNSAKMTLQQALNQNDHKDGPVVDMHAYDQATQSVIVYATLYGGIVAWDTRMQHSAWRLQNELRHGVITTICADPTGSWLATGTSGGKHICWDLRFRLPIAEIKHPADSWIRKVACHPTEPSYLISASQSNNEVSVWNIETGQRQTVLWASPVAALSSASPSDPATTCGILSGVVDGSPFILTGSSDQRIRYWDITNPKNSSLKVPAANDNLADVAFNYGARLIDGSQVIEEQIISMASTGDSQQLRSSTEENPRSGPDMPTASHHDAITDLLMCKDKGQIYIASASRNGVIKLWK

SEQ ID NO: 20689 - DNA, 3855 bp, DROSOPHILA
acactttgtttacctacgcaatgaaaacaaaaacaagcataagcgtaaagtcgacaacgcgttagtattaactatgcgatagttttatattttacctcagtatttttttaatcttagcaaattttattttacagagtaaaacagagtaattattgttaagatttttgtaccgtataatctcattatttgactttagtggatctttttctcaaactcgaatatttacttttcaaagttgtttacgtttcttacattggagatggaagcaagtgcgcctaacagcacgcagataacagcacgatatcttcacgtggttggcgttatttagtcccttttctgcgctctatgacagcctctctggctttcccttcttttccatcgcgtttccgtaagtgtgctccgcgtttttccaattggctatttttatttataatatcttcaattgcagctaggaattccagtgtgcgaaaaacgtaggtgcctaatacacgagaaatgcaacgaaaatttcaacagttgttggctttttgttcaactggcgttggctaaaagtgaactccaagtgttaaccccaagctaaaattataatggcgaacattttttctgttttcatgtgccgccccatcaacgaatctttggatacccggagtagtttaagatggccaagtccaagaaccacacaaatcacaaccagaacaagaaggcccatcgtaatggcatcaagcgcccgctgcgcaaacgccacgagtccactctgggtgtaagtattcaaaaatatgcatatttagttagcatctagagttgattttaacaaccttcccgtctttagatggatgtgaaatttctgatcaaccagcgctacgcacgcaagggaaacctttcccgcgaggagtccgtgaagcgctacaacgagcgcatcgcttcccagaagggcaagccaaagcctgttactctgtagatgattgccccgcgtgtggataattaaaggacaattcagtttaacaaagaaccgtctttatttgtgttgccgtcgttagtagtagatgctcagcaccttgtggaagggaatgtgctccaggtcggcattgtgccgacgccggtagtcccacagatattggtcgatcacaatggagttgacgttgtccagtgagatttcggggtgctgctccttgagtatcttcaccacagcatccctaacttgttcgatgatgtatatagatgcgccgcgtatctccacctctcggggatcgccgttctccagaatagtatccgtctttaggaactccattagctcactggtgtactccaaactgccgaagtgcactagcacctggggaattcggtagtcagcgaacatggttatctgatcgatgtcattaaagaacccaagtccctgacctctgtagcaggaccacacatcgcccactaggatttgcgctcgttttaggatggaaactcgctttccagcaaactcagcctcatcgcgaaaacagggaaactcctccacaacgagatccagcaagcgaactgccgatttctccgccttcttgataacattctcaaaactgccgtcgtacttgtcgatcagaacttttcccacttcatggagcgattccagacgcttttggagcagcggaatcactgtctcgccatcgtcagagcggaaaatgttctccacggttttcagatcaatctgggaatagaacttgggattgatcacatccacgccttccttgatggctctcttaatcgcagcacacagcgcaaagtagccggtatagccatcgaccttatatttggtgtagttatctgcggaagattaccattgaagatagtggatgctgctataaatatcaattactcactgggggtccaaaagcaaaagttcagggtgtccaacacaaagacccagtcggctgctttggaataatcctccggctgatttggattgggatgtaattcgtgctgcgagaagttttccacagcaatgcgtttttctattaggccttttacgatttcctgggtcagtttctcaatgcctgcaggcagaatacgaacatgcttggcattttctacgatataggctccagattcccggggacttagtttgctgctggacattttaacaattttattaatgtttttaattaagatgtcgcgacttttggcgctgtaacaggcgttttggtttatttaggagattcgggatggtaagtagtctggtaacgccaccagggctgcagacacgccagaacagtttcggcccggtggcagcgctgaaataacacatgaaggagctgcgaatttcgctcgttgctcgcggaataaaataagcaaataatagttaaatggcaatagtgggtcaccaactagccgccagttttttctaactgattgtgtaatgttctaaaagtgaagtgcgtacaaaaaagagaacgcgtacagtgccgttgattgcttaaacaaaaagtcatcaatttgtttttgtgtggctttgttgtttgtgaatgcccaggaaatatttaattcacacgacagttactcaagtgccgcacgttctttgtgcgattaagaaaaatattttatcgacgtttcagttggcacccacacactgagccacccgcactcacacagatacggctacgcggatacagatacatatacagatacacgtgcgctcagctgttgtcgagagctgctcagctgtagtttgttgtcattccgtctcgagatccagatcccagaaaatcccaaggatatacccccaaaaatccggacacgcagatatatatgcccttgatccagtcagcaggtgagctatccggttctggcccgatccgctgaatatgccgcatcacacaggcttcattttaatttgtagacacgactgaatccgataattatatagtatactactttagcagtggcccataagtagcctcaaaatgtgctaacagattgtacacttaaatagttgacttattctccatcgtattattcactcttgagtttcccacacacaccaaagtaaagtatacgtagtttacataaataaacttagagacctagaacttgcaatatacacacttacagtatagacgcatttatttttataataataataatctattccgagccccgcgcggatttcgctttcatctagcaatcgtcactagtttaatttagttatttgtttacttttaaagggagcgctatcggctgtaggtttttatttaaactgtaatctgtcatgtaatcagtcataataccttgagtgctcgaaagtaaggcactctttatctttccccttatcgtgcactccacattttgtatcctcgaagtggggaggtagcttaaatgcgatctagatacacaatttcaatacatcatcgtcagtaattgaccgctcgtcaaatttaatgtgctaatttgaactgatcgtgcattgatttctatatttttccacaacgatcttgtcaagcgatggaatccaaatccgtaaaggtacttgagatcttctttaagccatccgcctcacaatcatgtgctaatttgcgagataaatcagacatttggcaatcattgatcgcacctgatttcatcgattggagtgtctcagtttgtttttgtatcgttccgacatctgacggtaagctgcataaatatatagtgcaaaatcgtgaagatggtcgaaaatgttccggtgtattccatttcgcgtttcgtggaatcgcatttagccatatcagcaaatggcgaaagacgcatctcgatttcccgagtgagtgattcaaataaagtggacacacgaactccaatatgaatatttatattttctttactctcagcaaatga

SEQ ID NO: 20690 - DNA, 1213 bp, DROSOPHILA
atgcggcatattcagcggatcgggccagaaccggatagctcacctgctgactggatcaagggcatatatatctgcgtgtccggatttttggggttacagcgccaaaagtcgcgacatcttaattaaaaacattaataaaattgttaaaatgtccagcagcaaactaagtccccgggaatctggagcctatatcgtagaaaatgccaagcatgttcgtattctgcctgcaggcattgagaaactgacccaggaaatcgtaaaaggcctaatagaaaaacgcattgctgtggaaaacttctcgcagcacgaattacatcccaatccaaatcagccggaggattattccaaagcagccgactgggtctttgtgttggacaccctgaacttttgcttttggacccccaataactacaccaaatataaggtcgatggctataccggctactttgcgctgtgtgctgcgattaagagagccatcaaggaaggcgtggatgtgatcaatcccaagttctattcccagattgatctgaaaaccgtggagaacattttccgctctgacgatggcgagacagtgattccgctgctccaaaagcgtctggaatcgctccatgaagtgggaaaagttctgatcgacaagtacgacggcagttttgagaatgttatcaagaaggcggagaaatcggcagttcgcttgctggatctcgttgtggaggagtttccctgttttcgcgatgaggctgagtttgctggaaagcgagtttccatcctaaaacgagcgcaaatcctagtgggcgatgtgtggtcctgctacagaggtcagggacttgggttctttaatgacatcgatcagataaccatgttcgctgactaccgaattccccaggtgctagtgcacttcggcagtttggagtacaccagtgagctaatggagttcctaaagacggatactattctggagaacggcgatccccgagaggtggagatacgcggcgcatctatatacatcatcgaacaagttagggatgctgtggtgaagatactcaaggagcagcaccccgaaatctcactggacaacgtcaactccattgtgatcgaccaatatctgtgggactaccggcgtcggcacaatgccgacctggagcacattcccttccacaaggtgctgagcatctactactaacgacggcaacacaaataaagacggttctttgtt

SEQ ID NO: 20691 - protein, 343 aa, DROSOPHILA
MSSSKLSPRESGAYIVENAKHVRILPAGIEKLTQEIVKGLIEKRIAVENFSQHELHPNPNQPEDYSKAADWVFVLDTLNFCFWTPNNYTKYKVDGYTGYFALCAAIKRAIKEGVDVINPKFYSQIDLKTVENIFRSDDGETVIPLLQKRLESLHEVGKVLIDKYDGSFENVIKKAEKSAVRLLDLVVEEFPCFRDEAEFAGKRVSILKRAQILVGDVWSCYRGQGLGFFNDIDQITMFADYRIPQVLVHFGSLEYTSELMEFLKTDTILENGDPREVEIRGASIYIIEQVRDAVVKILKEQHPEISLDNVNSIVIDQYLWDYRRRHNADLEHIPFHKVLSIYY

SEQ ID NO: 20692 - DNA, 5134 bp, DROSOPHILA
cacctctgcatcgcggttcacttacaaatagttttgtattgcactttatccgctcggaaaactattccggacacgccactcgccaaaaaaagaggcttaaagtcaaaacacaccggaaacactgggtcgccaagaacgttgtggagtagaatccgaaatgaaagcgacttgtggaaccattcgcgtcgacgtaccaaactcaactgaagcgtccgactcggcctggtcagaaaataacgaaattataggcatgtccagggggtttggaatggattccaggttgggtgcctgctgggtgggcggtgtttcgactcctggcacggcacaatcaaccaactattgttgttgccacgtttttttactatggcattgttcaaatgctaatgcgccattttgcatacattcctggcgggttccacctgccgctggccagttgtgggttaaagtagtcgttcaaagagtccgtcttcaagctgttcaggtccactccaataattgttcacaaataaaggtatttccatatttatgtatgtatagttgaggggcccaaaaagtgggcaacaatttagcacattttatgcaaatcatgccagcactccacttttttctggcatttccgccacgtcaactcctcgaaacctgataataaatttagcaaatgggtaaaaaaccttccacatatcaccacgaaagcattaatttacccggagccgagttatggaaaagttttccgggacgagacattgaattgaaatcggtttgtagagcaaagtgtcgattataatggattgattgactgactgaatgaccccaatgagtgttggcatttgcaaatatttcaagccttccatcacacgacttgaaatttgcatttgagatttcgaatttgaatttggcaggccacagagccttgccccaattacggatttttactgacatccggggctcgactcacgagaaggtcagcgcaaattacacggtcatagaacaagggcttgcggtttagtaattgaaatttttattagctattatttttaccatatagagcgtatgtgtacttgtattgtttaatttaatttgattcctttgctggcaattccattttaactaaacgttcgcaaaaaaaagacatcgttgcggttcgtaaaagtataaacaaaagttccaactggccaatacttaagtattaaatgctaactgaaatttatataacctacagtattgctgggggcataggttcgggtagtattggtgtataatagccgggcatatcaaagcgcaaggcaaacagaaatcgcttgataaaactgtgagcaaatatttaaagtatttggattggcggcaggagcaggacagaattcgtctacggttgtggaacagttttataatatcgcataagttattcacgggtatccggtttcactttccccttcttgcatcgttttcggctactaaagtgtaaatagttttagttgggcagcaagcggtatccctagcccgtggattctgtgtgtttgtgtgctcgtttatattagactaaatgcggttggctgatgctaatggaattcgctttctctggcctgctgtgcttgtgtaggtgtgtaattgtataattgtccttattaatatgctcaaaatcttatcgtcattgtcagctgagtctgttgcggtcctcagtctaactctccgataactgaattgaaattttttggagctcttgagaagcagcagaggactggaacagaccagatgatgcagattattgtaatggttggcatgtttagaatatcgatgcgaggcttagacacaaggctctacgtagttgcccggaaacagaccggtaacaccatccatgacgccctcccaccagccgtcgtcgtttttcttgagcacgtacagcactgagctttcctggaagctcagctcgtcgtccttgtcggcatagtagtcgtaaatggctaccactggaatgtttgtaagaattagtaaggtatattgttagttgctccaatcagcctacccttctcaatgaagttcttgggcacccagccgggtaagttctgatcctcgggcactatgggcgccagctgcggtcccgtcgatgtgcgtggtcgtccgaagtcttgatgctcatcctccggcggcggcggaggtggcaagggaggcgactgtgagccgggacgagcgaagttcaagctgaagtgattcctttggaaaaatacgcgtttaatatacaagataacatatgaatttcatggagttatacacagtacaaacacgaaaacctagtataactttttttagctgagtataaccctatgataaacagagaaacatgcaatttacctatttggattcctggatttgcacagagaacaataaataggttatatttacacaaagaagggattgcattttccagaaacttacctgttgatattgcgtcccaaagtgtgcatgccaatgtgactctgctcggtcatctcgtgctgcgaaaccgtaagtggtgaaggaggagctgctacgaattgcaaaccgcattattagtattgagctattgcagaataatcaaattaactcacgtggcatgctgctgcgatcgtcgtacgtagtgggcggcggtggtggcagcgattgcatcatgcccgcggagggcaggtttacatgtgtggctatctgctggctgggtggcatcggaagtgcactgtagccagcagctcgttcattgcccgccgctccgccgcctgtggtggtggtagtcatcgttgaagaagccgtcgacattcgctttggatgcccaataggatagttgggagcgtagtgcgatggcacctgtggtggattgaccacaggcggagtgcggtactcccgcgaactcttgcccagtgtcccggtattgctgaccgacttgcccagtgtgccagtgttcccagctcgcgacatctgcggcggagttgggggcttcgtggttggcggaggtcccaccgacggcggcaataaggattgcacggacccatggctggagccccgatgtttctgtcgcacctgcgagtgctgggccgagttaatgccgtggccaatctcgtccaacatcgagtagtcgatgggcttgcgcacatacttgatgggcttctccggattgatgggcgccacgatcttaaactggcgcgagctcaccttgttagccgtaagcacgccaatctctctgagaaaagacaatgaagataatcaaaaataattaatacaaataaagtgaattgaaaaaactaaatagttatgtaggaaaagaatgaagaaagagacgttcagtcttatcagcacgtctgacgacgcatgtatgaatgtacatttcttctctatgaagcttttatcaccgatgagtcgtacttacagacaaaaatgttcattccgtattctttgtcgttttaaaatatgcatatccccttttcctattctagtttaagcaatttgttgttcttacctcctggccaccttctccttgtggatatgcaccgtctgggcgatgtggttcatctgggactccatctcgccgagctgctgggcctgaagctcgaggagctgcatgtagctataggcgagcgtgttaatctggtaggccacgctggccagcgactgggtggtgtagttcttggtggcctccagggccgccttcttgttgtccgcgcggtagtaggtgtcctcgcagtagtcggccacccgctccaggttcgtgtagctgtcccgcagactctggcggccatcggggatctcggtgcgtatcagagaggctagttcgtccatgatgttctcgctggccatgggggtttcggtcaacatgggtgtggatgctgcgggcaaacgggaaacgaaaacccaattaaattcctcgcttttccgcacttttcacgcccgtaaacatttggggcgtgggctggcctctgccgacgtcgacgcccagctgctccagttgatcgctggagcggtttaatcggacgaatctcgcgtgcactcactttattgactatgcgattgcacaacagatgcttttccgggctagttgctacgttttaaatgcagttaaatgcagtttttcattacattttccgtgaaaaaagaaagaacgctggcctgtgctgcaaagtactggagcttgaagaatttttcaacactgtatcagtgcagacacatttggtattatttttgaaatgtatgttctataaaacagagtgttaaaaattttcccaaaatttagttataaaaatagcattacagtatctttttaattaataattcttttttttttacacatttaaagccgctttgaagtgattgccaatcagaatcggtacatatttcccggtttagtatttccctactcgcgctttgcggtcacactggttgtgagtaatatattttttcggcaatattaattttagctgttgtccaaatgtctcaccaaacgggtatccgaggtttgttatctttgggaaccacctaatccgcatccttagaacaccctttgtattttcagccaacgagcagctggccaaggtgttcggcaaagcgaagaatggtaaatttcgcgtgataaaagtttcgatcgagaatggtgagtggatttaatccagaaacgtatatacacaagatatatactaggcatacgatttgataacgaacccgcatccgttttcaccccgccccaaattacagagcagcttagttgcggcgccacggcggagacgaaaaaggattgggagcgcgactacgacaagcttataggtcccctactggaaaaggatgtgccctgctatattctctatcgcctggacgccaagatcccgctgggctacagttggctacttatcagctggacgccggacacggccagcatccgacagaagatggtatacgcttccacgaaggccacgttgaaaacggagttcggatcagcatacatcacagaggagctgcatgccaccactctggatgagtgcacgctggagggctatcgccggcacaagcaggatttcgcagccccagctccattgaccagcagggaggaggagctgaaagagctgcgaaagacagaggttcacactgagatcaatacgaatacgcggcaccaaactctggg

SEQ ID NO: 20693 - DNA, 2354 bp, DROSOPHILA
gcacaggccagcgttctttcttttttcacggaaaatgtaatgaaaaactgcatttaactgcatttaaaacgtagcaactagcccggaaaagcatctgttgtgcaatcgcatagtcaataaacatccacacccatgttgaccgaaacccccatggccagcgagaacatcatggacgaactagcctctctgatacgcaccgagatccccgatggccgccagagtctgcgggacagctacacgaacctggagcgggtggccgactactgcgaggacacctactaccgcgcggacaacaagaaggcggccctggaggccaccaagaactacaccacccagtcgctggccagcgtggcctaccagattaacacgctcgcctatagctacatgcagctcctcgagcttcaggcccagcagctcggcgagatggagtcccagatgaaccacatcgcccagacggtgcatatccacaaggagaaggtggccaggagagagattggcgtgcttacggctaacaaggtgagctcgcgccagtttaagatcgtggcgcccatcaatccggagaagcccatcaagtatgtgcgcaagcccatcgactactcgatgttggacgagattggccacggcattaactcggcccagcactcgcaggtgcgacagaaacatcggggctccagccatgggtccgtgcaatccttattgccgccgtcggtgggacctccgccaaccacgaagcccccaactccgccgcagatgtcgcgagctgggaacactggcacactgggcaagtcggtcagcaataccgggacactgggcaagagttcgcgggagtaccgcactccgcctgtggtcaatccaccacaggtgccatcgcactacgctcccaactatcctattgggcatccaaagcgaatgtcgacggcttcttcaacgatgactaccaccaccacaggcggcggagcggcgggcaatgaacgagctgctggctacagtgcacttccgatgccacccagccagcagatagccacacatgtaaacctgccctccgcgggcatgatgcaatcgctgccaccaccgccgcccactacgtacgacgatcgcagcagcatgccaccagctcctccttcaccacttacggtttcgcagcacgagatgaccgagcagagtcacattggcatgcacactttgggacgcaatatcaacaggaatcacttcagcttgaacttcgctcgtcccggctcacagtcgcctcccttgccacctccgccgccgccggaggatgagcatcaagacttcggacgaccacgcacatcgacgggaccgcagctggcgcccatagtgcccgaggatcagaacttacccggctgggtgcccaagaacttcattgagaaggtggtagccatttacgactactatgccgacaaggacgacgagctgagcttccaggaaagctcagtgctgtacgtgctcaagaaaaacgacgacggctggtgggagggcgtcatggatggtgttaccggtctgtttccgggcaactacgtagagccttgtgtctaagcctcgcatcgatattctaaacatgccaaccattacaataatctgcatcatctggtctgttccagtcctctgctgcttctcaagagctccaaaaaatttcaattcagttatcggagagttagactgaggaccgcaacagactcagctgacaatgacgataagattttgagcatattaataaggacaattatacaattacacacctacacaagcacagcaggccagagaaagcgaattccattagcatcagccaaccgcatttagtctaatataaacgagcacacaaacacacagaatccacgggctagggataccgcttgctgcccaactaaaactatttacactttagtagccgaaaacgatgcaagaaggggaaagtgaaaccggatacccgtgaataacttatgcgatattataaaactgttccacaaccgtagacgaattctgtcctgctcctgccgccaatccaaatactttaaatatttgctcacagttttatcaagcgatttctgtttgccttgcgctttgatatgcccggctattatacaccaatactacccgaacctatgcccccagcaatactgtaggttatataaatttcagttagcatttaatacttaagtattggccagttggaacttttgtttatacttttacgaaccgcaacgatgtcttttttttgcgaacgtttagttaaaatggaattgccagcaaaggaatcaaattaaattaaacaatacaagtacacatacgctctatatggtaaaaataatagctaataaaaatttcaattactaaac

SEQ ID NO: 20694 - protein, 473 aa, DROSOPHILA
MLTETPMASENIMDELASLIRTEIPDGRQSLRDSYTNLERVADYCEDTYYRADNKKAALEATKNYTTQSLASVAYQINTLAYSYMQLLELQAQQLGEMESQMNHIAQTVHIHKEKVARREIGVLTANKVSSRQFKIVAPINPEKPIKYVRKPIDYSMLDEIGHGINSAQHSQVRQKHRGSSHGSVQSLLPPSVGPPPTTKPPTPPQMSRAGNTGTLGKSVSNTGTLGKSSREYRTPPVVNPPQVPSHYAPNYPIGHPKRMSTASSTMTTTTTGGGAAGNERAAGYSALPMPPSQQIATHVNLPSAGMMQSLPPPPPTTYDDRSSMPPAPPSPLTVSQHEMTEQSHIGMHTLGRNINRNHFSLNFARPGSQSPPLPPPPPPEDEHQDFGRPRTSTGPQLAPIVPEDQNLPGWVPKNFIEKVVAIYDYYADKDDELSFQESSVLYVLKKNDDGWWEGVMDGVTGLFPGNYVEPCV

SEQ ID NO: 20695 - DNA, 7214 bp, DROSOPHILA
atattcctcaagtgctcgtatttgtaaggtcaaactaaattagcttgaaaaaattaaaaaattagagggccctttgaaaaattctttacttaaactaactttttatcataaaatactatcaatactagtacagaaacttaatctgacggaaatatcacccatttttttgggataacgtgtcatagctctattcattttttgtgactcactaccagaattcgcatctcgcaactaattcccgcattgacgtcaattgttcatatagactaggttatggtaatcctaggaatatatattcaaaaacagttttcgcacttcttgtttaccatacttaatattcgctcagggcttcctagaacgaatcatccaaaatttaatggaagatttacctcattgtcatggtaaattaattctagaacagttttcgcacttaggctcatttacataaggaggttttttccagacatttacgaggtttccaagctcgcatctttgggatcggtcgccaaaattgaataaaagatatacctgtatctgagaggcacccgattattgaccaattgaaatgcgatttactttggatttttgaattgtttttatttgcaaatatttattttctttttatttgtctcggactgagagcatattttgtagttgtcgtctatacgtaaatttgtgtgtgacttataacttatgtcgtaccgtgctaaatacctaaacctacacaaatgaagatacgaaaatgaggggatgtgggtgttaggtgttgggtggttgtgtgagtgttaaccattgcggtgcaggtgtgttggtctggtgtgaagatatagataattatagaatagaatagggtttaatttaaaaaacgattatcgactatgtcccgccctcgcatagacagacgcaagattaagtgacgatccttcccatcggtgatccgcgagcccatctcgatctcgacctggatgcctggacgccagtatcccgatcctcgagctccctagttggccgccttcttcgacttcttcattcgctcgccctcattctcgttctcatctaatttggcgctctccgtgctgctggactcggcatcgtactcgagctcgggatctggaacctcggcgtagtgcacgtgacccaccatggtggctccggccaacactccgtccttgaactcctcgggaccgcccagctgggaggcgtgggtgccatcgccgtacttctcgagggtgcgacgcaccagctccttggatggctgcttcatgttccaggcccaccccaacttgtggaacgcatccagcaccatggtggtgaagttcacggtgtagttgcccagctcagctgctttgtagtcccaggggaatacgtggtggtagttgtgccatccctcgcccatggccagcagggacacatagatgttctcgctgggcatgatccgcctggagaggaagataggaccagatcagttagatatgtctgtagaggtgggctactcttgtattggcatgtacccattccccaaattcaatatgatagtgtcagcactaagttgacataataataaactacaagttaatcacacttacttatcgtatggacgggatccccacagatgggcggcactgttcacagaccaagtgaagttcaagctgctcacgtagcggaagaggcactgctggataaaggccagggtccaggtctcgccccagcagtagactgggatcacggtgggcaagatgaagcagaagaaggtcttcagggggatgaagtacttctggtggaagcggaccacgggatcagccagaatgtcgctcatgtcgatctggcgaccacgacgaagtacctccggatgcttcagcatcattagccagcccacgtgggagaagaagaatcccctgttagcattgtggggatccgcatccgtctccgagtatttgtgatgaactcgatggtcgcgaacccagtcgtacagggtgttctgaaaggcgttatttgatattacataaaaaagtaatatgtctaagaagaatttaactcttttaactctaaaatcatgagtatcacgtataaatgatatatattttaaagtatccttatctaaacgctgaaatctttgctaggtcacggggttcacttaacacgccgtcggatttgattgcttctcttaatatccaagtcgctcagcatatatacatatgtagatattaagtatatatgtatcttttcgcgctccgcatctaagcttctgcggctgcgcttaatcgctccagtcattaaataagacaaatgtatctgcgggatacacaaagcacttttgcgagtagttggaattgtcaattttacagtttgtcagccgcgacaggcattaagttgttatacttaatgatgcaattaatgttaattgcattatagccccgaaaaaacgcaaaaacgaaggtggcgcgtcaaatgaattggcaaattgcggacaagtcttcaggtggcattacgagggccaaaggtcgggcatccgaacttgcattctgcccaaaaacgaaaaactcacctgtccagccacgcagtagcagaccatcaggatggatcgcagcacggtgttggccttgtagctcttgtgggtccagaacctatgggctccggccgtaactccgaatccggccacgccgccaacgaagaaggctaaaatgtattaataaaaagatagatagatgtaagtgtcggctataaagattttggacaaaagcagtgctaattggttgcctatagaaaacccgaaattacatttccgcaaattgagctatttgaggctgggcgctaattcagcgaacaaacaaatggagtataaaaaagaaccaagctcgcacaaggttgtcgatagggggaactttataatagtccaatgaatgactgatcacgattccgacagtcatcagaaatatcaggtgcaagcccttccagacgatctcttctcccattagttcctcaattagaatatgcaaaatgtcattgtcaccatcccattgaattcgataattgctatgggcacaattagaagtaatgactatttgatagcaaaagggttttccgctttaactaacgatcggtgttatggggggatctttgaaaatatgctcacatctcgcatagttcggcaaccaactaatgaaaaattaacgatttctctgaatgtatcgtccaattcaatcgaggaaagattagccttcaaaatgttgcgacaaaaccagttccgtcccaccgaaaaataaaatgaacaattaaaggccgagccgagtgcggaaatgatcaaattcaacattggtgtgcccacaaatggtttacttatgaggtgagcttcgaggaactaataattttaggtacaccaaatctccgcgcatatgtatctatgtatcttgagatacgcctatttcatgatatgcttttttgttgcggtgatgcaaatgggagtgcacgtttatttttgggctgccatttgaatgactatataacgatatctaatttggatatttgcatttcaaatgcagtgcatcttggggcaccgaagatacaggtcaagttcagattgtttcgaaattagattttcagttgactacggaatcactatatggcgctatctgtttcgccgttcatcttttttgattccaaatccgaaaacatcagtgtccctgagtctcgaagaaggtgcgttgactcgctgccactttatacaaatgttagtttttggccagtttcattaacgcccaatgttaatgcgtttatgtaagtcccctcggcggcttttgctcccttgtttttcaggcccgtcgaatttaatcaatatctcggaccgagcacgacaattttcgccatctacgaaaaaccggcaagagatgataattcccatcatgccagccagcgagcatctttaaccactgcacgttcgcccggcaatttgccaaaatatttacgagctcgacgccccaaaaagggatacgcttggtgcaaggatactccttgtacccagtttttcagatctttttgtacctgtcataccacacaatgcgcaataaatattgaaaattaccaggtattaaggcatttttcgctgtactaccattaagggggaagtgcccaagagctgaagtagccaagtacacgagtacctggagcttcggatgacctggtaattccaatgaaaacgaaatcgctgctggaggatcccccctccaactgatttctgtctcaatgtcaactgattttttgccccactcgcatgtgtagtgctcataaattgagtcagtgctcaccgcacagataaatcatcttttgtctggctttgggtcttggcagttgagatctaaaatggttacaccttggtaactttgaaaatctgcagttaaaagccagataaatcttcttactgtgcctcgaaccattcgagttaagatctgataatcgtagagttatctagagcgacctttggaaccccgaactatttacaacatgaataaatcatgattcaccaaaaacgctgaagtaatggctaacagacccagaaatttctagttcagccttgtttacccgacttcgaggttcgacgacaatggggtagatcttccaaagacccaattaaaattgtgtcaagtgattcttgtttcttcttcactcgacaagcgctcttttggccgcatatctttaccagggcagcacgttttggttttgttttctgcaatccacctgtgtcagtcaatttttatgctgagactgaaattgcatgccagccgaaagctgaaagctgaaaaccgaaaacccaaccccaaagtaaagcgaatgaaagagatttcaacacacacgtcgtataacaaaaggcagaagctgaagggcaatataaatagtgggtctttggggaaagggcggcgtagtgttaagcggcaatcaattaaaggcaataacaaggggacgcattttgtaatggcccagagagagagagaaaaagccaacgggcttaaggcgctgggcgcgctaaattgcaaataattgttggggcagcggatttttgggggagtggaggccgcaaagacaacatcatcggcgacaccagcaacacatctacactgcgagaaatatgtggccctactagctgagctagctgagtttacccgataagccgaaactgcaaaaatatatattaaatttcatatccagttgaaattggttaaaatatatttctgacatatccgaacaatcccaacacccatatgactatgattttctctctgtgcatcatttttccctttcagcatcgatcagagatgactctttgtttccacacctatccccgtccaccatttccaaattcgaggcgatagaaagagagagtgggcattacgcaatgccggatgggatggagatggtatggtatggatatggatatggatatggatggcttagatgatgcgaaaaagtgtagcaatacttacaccagatggtggtgtatggattgagctcccgcagcggatacgtcagcaggcagattccggccacgatgtgcaggagcgagatctggatgactttgtcccacttgagcggagcctgaaactgccaacccaacactcgatctccgacgaaggtgcgggtgtactcctcgagatcaattgcatccttgggcacatgattggcgatctccttgggcaccaccgacctgggcagctcctcccgcttcgggggcagttggagcttgccacggggcggcagctcgggcgaggagtcctctcccctgcgcacctgctgctgggcgtctccattggggaacttcgacctcctggccacaagcggaggactggagtccgtcgcgatggctggcgtcttgctgcacactcgctccgaggtggacaggtgacccatttttgccctcacagatctttttgtgtatgtaattctctagatatatgactggaacccgggtttctttttgggttcgccggcggaaaccgcgtttcgtaactgccgcgcgcacactcgacgaactttcttcacagcttaacactcttaacactcgggggcccaattgccgcagtacttggcccaaaagtacgagcaggaggtggagttggctttcgtccaaagacacacagtcacttctgcgaacgcggctcgcttagggttttcgtcggcgtctcaagacttcctttccttttcgcgtctaacgaactcaacgcggcgccgttccgtagacaaatgatcgtagccaaatgtgtaagttcctacctacctatgccgctgctggagctgctcacccgggcagcgacgcgactgagccaaagttgactgattgaccgactgactgacggagtggagtttccgatccgacgcacaaaggtaaccaaacgaaaagaaatggagagacgaaatggccaagaaggccaagattatgccaccacctcacctcacacacacgctcgagcagcacctgtagccgttgacttcggctatggcttcggctacagcttcgtgtttcacttcggatcggagcgaagctttgccgcagaatcagcagcgcagtcagcagctccgaatccgaatttacgctacctcgaaattacgccaaatgtgtgggtctttgggtgtcatgcatcagtaggtcaaactgtgtctccgctggaaatccaagactccgaagaaaggtttaaaaatattgggcaagctccacgttcacttgtgagctggcaccgaaatatcattagcttttcagaagcagatgccctagctatatgatatcacttaaacataaggctttcattctagatatacatatatccctttttcattagccctaactactttcactcagatgcttgatctcgacatctctggatgagcagtttggttctacttcaagcaatttcaagcaataactcgttacacagtaccacgcggtctgccccaatatgtgggttcttatttgaccgaccagacgtgtctctctcactcgcccgacttttgcccctctggctgccacgaacattcaaaaacaagacaagaagtctgccggcacttttcacgattactcacgaatgcctaaattttactggcgatctgcaagtcgcacagacgattctaattgcagtcgctaattgaaatcgaattcgaaacgtggacaatgagattttggccgctaattgaaagagtttacttcctccatgaccaaatcgcatacttga

SEQ ID NO: 20696 - DNA, 1702 bp, DROSOPHILA
ccgcgttgagttcgttagacgcgaaaaggaaaggaagtcttgagacgccgacgaaaaccctaagcgagccgcgttcgcagaagtgactgtgtgtctttggacgaaagccaactccacctcctgctcgtacttttgggccaagtactgcggcaattgggcccccgagtgttaagagtgttaagctgtgaagaaagttcgtcgagtgtgcgcgcggcagttacgaaacgcggtttccgccggcgaacccaaaaagaaacccgggttccagtcatatatctagagaattacatacacaaaaagatctgtgagggcaaaaatgggtcacctgtccacctcggagcgagtgtgcagcaagacgccagccatcgcgacggactccagtcctccgcttgtggccaggaggtcgaagttccccaatggagacgcccagcagcaggtgcgcaggggagaggactcctcgcccgagctgccgccccgtggcaagctccaactgcccccgaagcgggaggagctgcccaggtcggtggtgcccaaggagatcgccaatcatgtgcccaaggatgcaattgatctcgaggagtacacccgcaccttcgtcggagatcgagtgttgggttggcagtttcaggctccgctcaagtgggacaaagtcatccagatctcgctcctgcacatcgtggccggaatctgcctgctgacgtatccgctgcgggagctcaatccatacaccaccatctggtccttcttcgttggcggcgtggccggattcggagttacggccggagcccataggttctggacccacaagagctacaaggccaacaccgtgctgcgatccatcctgatggtctgctactgcgtggctggacagaacaccctgtacgactgggttcgcgaccatcgagttcatcacaaatactcggagacggatgcggatccccacaatgctaacaggggattcttcttctcccacgtgggctggctaatgatgctgaagcatccggaggtacttcgtcgtggtcgccagatcgacatgagcgacattctggctgatcccgtggtccgcttccaccagaagtacttcatccccctgaagaccttcttctgcttcatcttgcccaccgtgatcccagtctactgctggggcgagacctggaccctggcctttatccagcagtgcctcttccgctacgtgagcagcttgaacttcacttggtctgtgaacagtgccgcccatctgtggggatcccgtccatacgataagcggatcatgcccagcgagaacatctatgtgtccctgctggccatgggcgagggatggcacaactaccaccacgtattcccctgggactacaaagcagctgagctgggcaactacaccgtgaacttcaccaccatggtgctggatgcgttccacaagttggggtgggcctggaacatgaagcagccatccaaggagctggtgcgtcgcaccctcgagaagtacggcgatggcacccacgcctcccagctgggcggtcccgaggagttcaaggacggagtgttggccggagccaccatggtgggtcacgtgcactacgccgaggttccagatcccgagctcgagtacgatgccgagtccagcagcacggagagcgccaaattagatgagaacgagaatgagggcgagcgaatgaagaagtcgaagaaggcggccaactag

SEQ ID NO: 20697 - protein, 461 aa, DROSOPHILA
MGHLSTSERVCSKTPAIATDSSPPLVARRSKFPNGDAQQQVRRGEDSSPELPPRGKLQLPPKREELPRSVVPKEIANHVPKDAIDLEEYTRTFVGDRVLGWQFQAPLKWDKVIQISLLHIVAGICLLTYPLRELNPYTTIWSFFVGGVAGFGVTAGAHRFWTHKSYKANTVLRSILMVCYCVAGQNTLYDWVRDHRVHHKYSETDADPHNANRGFFFSHVGWLMMLKHPEVLRRGRQIDMSDILADPVVRFHQKYFIPLKTFFCFILPTVIPVYCWGETWTLAFIQQCLFRYVSSLNFTWSVNSAAHLWGSRPYDKRIMPSENIYVSLLAMGEGWHNYHHVFPWDYKAAELGNYTVNFTTMVLDAFHKLGWAWNMKQPSKELVRRTLEKYGDGTHASQLGGPEEFKDGVLAGATMVGHVHYAEVPDPELEYDAESSSTESAKLDENENEGERMKKSKKAAN

SEQ ID NO: 20698 - DNA, 2552 bp, DROSOPHILA
aaagagctacgataaagttttcccgcttcggttttccccccacctttttctcctttgggccagaagagaagacaaaagcgacacaaaaatgcctgcaggatgtgtggagcgagcgataaaaagcggaagtgcagattgccccagcctcaacgacgactaaagtgtggaaatgtcaatttgctttgcggccaacagttgaaggccaagggggaatcgggcggaatgagcagagagagatcgagggaggatatagcatcggtaactgcaacaacgcatattgattttcaatttggcagccaagggagaagggctgcctgttggttgtttgctagatataaagctgaagttaacagaaagaaatgacattgactggggccggaatacagtctgcactcgcagagagaggaatattaaatatggaatattaatgggattccaaacggttaaaacggttcaggaattttggcattgagtctaatctctattgttagtaactgaataaaactaaacattttattattaaatttccaaaccaaaaattggtcattcgttttcccttatcgagtgcccactgtaaccgcaggaatgtgagcgagcctaaccaaaggctggtttgacagccactggcacacagaagcaccagcttaaaagcaattttgtggctaataaatccgatttccgttttgtttcgaaataaattgcatgcaacgagatgggcactgcggaggatgtcggatggtaaatcgagaaatggagagtggtgcattgggactcagttttgtgcaaggctggcggaaatggctaccaggggacgcaacagccgcatccggcggatgtggaaaattaggcagccactgtgactccagcacacagttgacttgcctactcccataccacccactcacatgacccaaattttcggttgcgaacccacaatgaaaatgtcactctggggaccatggaaacaacaaactgttcggtaggatttatttcaactcacctgaacatcaaaattttgctgctgcaagagatttccgggagattccatgtgattgggtccagctgcctggtgattcaacattggtgactgatacggctgattctcggcaccctgctgcgagggggtgagggggcggcgcggctgcgttccctgttgcggaatcagattgcccggatacatgccccatggtgctacgccatagtacggcatctgggcggcggcaatcatgcccatatacggggcagcctcctggcccggattgatgacgtaggacgtggcctgttgggcggcataggccgcattttgcgcctgctgctgggcggccaaaaattgttgcgacgcggccgccatgtgcatctgttgttgctgctgctgttgttgctgctgctgctgttgctgctgcgactgctgcagcgatccgttgggaacgggtggtgcgcccaccgctgccgcagcactcgctgccgatgtggcagctgctgcggctgctgctgcggccgctgcatttgtggcaactgctgctaggcccggattctgcgagcgaaacagttgctgcgggaagaaaagaaaaggtgttggagtttagttatcggctcatcattgcaattatggtgagggttaaaagtgcttaggaagtaagtaccttgagttgcattaataacacacttaaactaaaatctaatatgattagactctatatatgtatatatattcataccccacaaaacagcaaattctgaattggtttattcaatttctctaccatttttaattttagtccatgtaatgacatttcctggaataattcgttttggcttatggttaagtctagcctaatagggcgcaacatattgcgttaagccgtgattattagtcatatcaagtaaccgccccgttgccccatacatacacacataacccgatggcatctgctcgtattgttctagcatacgtgcaccggtaacatgataaagtgttttcaattggaaaattaaatcaaatccaatcaaatcagcatgaagaatgcagaaaagagagtgaaataacaaggatctaaaacgggaaaacgcatgactgagtgttgtgttacttgttttttcccccaatgctccacatgttctctttcatttttcctcctattttatgccttgtctctctggcaatgtgaatatatcatcaccaggagcaacagccactcaggcattctagaaataaagcactagaaactacatgcataaattgcgttgtagaagctaaaccggatctgaagctcattttagctgtgtgtatgtttctgattaattcgttatgtatttaacaattcatagtaaatagaaatttcctatcctataggtataccttccagtgccccgctattcacacattttccatccactttgatgtagtcaaggcattagtgccttttcccttggaattcaacgtatttgtagtatcaccgaggaaagtcagtttcagactgtacaaaaggcataaatttgcagtcccctttggaggacgcacctggagtcgtagccgagcataaggatatgtg

SEQ ID NO: 20699 - DNA, 6594 bp, DROSOPHILA
aagaagcagacctagaacggcgtgcttgtaatatgtaaatttttcaaataagctaaggttttgtgtatattttcatcattaaaacgtcgtgtaaattaaaattcatcctaattataattaataaactacattaataaacggaaattccacaattctcaacaagaaatctgtaaaaattcaagttttaaccaattctcatacgtaattaaataaataaagttcagttttgttaagtcccaaaaacaacagctgtgcaactgtgtaaaatattattcataattttgtgtaaatttatgtaaaaaaaaaaaaaaaaacaaaccaaccacgacaaccaaaccaaacgaagcaaattcaatttttttgatcaaaaagtgtgtgaaaaatctcagcaaagcctgtaaaataaatattaaatatattaagcaaaaagtgtggtttcttttacaacaaaataaataaaagcaaaaaacaagtgtaaatctgaagcgaaaattaaaaaaaaattatatgtaacatttgtgaatatttccgagcgaatagtgttgcaaaacgcgcgtgtggttctttgtgctgcaagttaaaatacaattcaagttggcaatacgcgcaaaattgtcagctgcgatagctaggaaaagcctccaaaattgagctcctaaccgcgcccacaattgccatatcgacgccctcgccgcagcagcaacaccaacagcagcagcagcagcagcagcagcaactctatcagcaacatcaacagcagcagcagcaacattacggtccaccaccgccctactttcaacagctacaccagcaacaccaacagcagcagcaacaacagcagcagcagcaacaccagcaacacatgaagtttttgggtggtaacgatgatcgcaatggccgcggaggcgtcggcgttggcacggatgccattgtaggatctcgaggtggcgtctctcaggatgccgccgatgcagctggtgccgccgcagccgccgccgtcggctatgtcttccagcagcgtccatcgcctggtggggttggcgtcggcgtgggcggagtgggtggcggtgtgccaggggtcggagccgtaggctcgaccttgcacgaggccgccgccgccgagtacgccgcccactttgcccagaagcaacagcagacccgatgggcgtgcggcgacgacggccatgggatcgataacccggacaaatggaagtacaatccgccgatgaatccggccaatgccgctcctggcggtccaccgggaaatggcagtaatggtgggcccggcgccattggaaccattggcatgggcagcggattgggtggtggtggcggcggcggagctggcggcggaaataatggcggctctggtacgaatggcggtctgcatcatcaatcgatggccgctgcagctgcgaatatggcagccatgcaacaggcggcggccccagcaacaacatcagcatccacaccagcagcatccccagcagcagcagcaacagcagcaggcgcagaaccaggggcatccacatcaccttatgggcggtggcaatggactgggcaacggcaatggattgggcatacaacatcccggccagcaacagcagcagcagcagcaacaacagcagcagcaacatcccggccagtacaacgcgaatctgcttaaccatgcggctgccttgggtcacatgtcatcttatgcccaatcgggtggcagcatgtacgaccatcatggtggagccatgcacccgggaatgaacggcggcatgcccaagcaacagccattgggtccacccggagccggaggaccccaggactatgtctacatgggtggccagaccactgtgcccatgggagccgcaatgatgccgccacagaatcaatatatgaacagctctgctgttgcagctgccaatcggaatgcagcgattaccacatccactgccaagaaattgtgggagaaatccgatggcaagggcgtatcctcgagcactcccggtggaccgttgcatcccctgcagatccccggcatcggggatccctcctccgtgtggaaggatcacacctggtccacacagggcgagaatatattggtgccgcccccctcgcgagcctacgcccatggaggcgcctccgatacttcaaacagcggcaatgcgggcatactgagtccccgcgattcgacttgcgccaaagtggttgaatatgttttcagtggctcgcccaccaacaaagatagctcgctttccggattggaaccgcatttgcggaatctaaagtttgacgacaacgataagtcacgcgacgataaggagaaagcaaactctccgtttgacacaaacggtttgaagaaagacgatcaggtcacaaactcaaatggtgttgtcaacggcattgacgatgacaagggcttcaatcgcactcctggttcacgtcaaccatcacctgcagaggagtcccagccacgtccccccaatctactctttcctccactgcccttcaatcacatgctcatggatcatggccaaggcatgggaggcggcttgggcggagttgttggatctggcaacggagtcggcggtggcagcggcggaggcggggcaggcggcgcttatgcggcccaccagcagatggccgcccagatgagtcaattgcaaccgccgatgatgaacggcgttggcggcggaatgccaatggcagcacagtcaccaatgttgaatcaccaggcagctggacccaatcacatggaatctcccggaaatctcttgcagcagcaaaattttgatgttcagcaactgtttcgctcgcagaatccgggcctagcagcagttgccacaaatgcagcggccgcagcagcagccgcagcagctgccacatcggcagcgagtgctgcggcagcggtgggcgcaccacccgttcccaacggatcgctgcagcagtcgcagcagcaacagcagcagcagcaacaacagcagcagcaacaacagatgcacatggcggccgcgtcgcaacaatttttggccgcccagcagcaggcgcaaaatgcggcctatgccgcccaacaggccacgtcctacgtcatcaatccgggccaggaggctgccccgtatatgggcatgattgccgccgcccagatgccgtactatggcgtagcaccatggggcatgtatccgggcaatctgattccgcaacagggaacgcagccgcgccgccccctcaccccctcgcagcagggtgccgagaatcagccgtatcaggtcatcccggcattcctcgatcacacgggctccttgctgatgggaggacctcgcaccgggacgccgatgcgtctggttagccccgcccccgttctggtgcccccgggcgctacccgtgccggccccccgcccccgcaggggccacagctgtatcagccgcagccgcagacggcccaacagaatctctactcgcagcagaatggatccagtgtcggaggcctcgccttgaacacgagctcgttgacgggtcgccgcgactccttcgaccgcagcacctccgccttcagtccctcgaccatggactacaccagcagcggtgtggcagcggccgccaatgcggtgaacagcacagtggcccaggcagcagcagctgccgcagcagccgccgcagcgcgtggcaagtggccgggagcgatgtcgggagcggccagtggagcctacggagccctgggagcgggcaatgcttcggccagtcccctgggcgcaccaatcacgccgccgccatcggcgcaatcctgtctcctgggcagtcgggcacctggagccgagtcccgccagcggcagcagcaacaacagcagctggccgccgttggtctgccggcgactgcagcagctgctcaggcagcggtggccgcggctgccaacaatatgttcggatccaacagctcgatcttctcgaatcccctggccattccgggtaccgcagctgtggcagctgcagcggcagcagcagcggccgccaactcgcgtcaggtggctgccacggcagcggcagcagcggcggtggcagcagcagccggcggagtgggaggtgccccacagccaggaagatctcgccttctcgaagatttccgcaaccagcggtatccaaatcttcagctacgcgatctcgctaaccacattgtggagttctcacaggatcagcacggctcgcggtttatccaacagaagttggagcgggccaccgccgccgagaagcaaatggtgttcagcgagatcctggcggcagcctatagcctgatgaccgatgtctttggcaactatgtcatccagaagttctttgagttcggcactcccgagcagaagaacacgctgggcatgcaggtcaagggtcatgtgctgcagctggcgctgcaaatgtatggctgccgagtgattcagaaggctctggagagcatctcgccggagcagcagcaggaaatcgtccacgaactggacggacatgtgctgaaatgcgtcaaggatcagaatggcaatcatgtggtgcaaaagtgcattgagtgcgtggaccccgtggcgctgcagttcatcatcaatgctttcaagggtcaggtttactcgctaagcacccatccgtatggatgccgggtgatccagagaatccttgagcattgcactgccgaacagaccacgcccattttggacgaactgcatgagcacaccgaacagttgattcaggaccaatatggcaactatgttattcagcatgtgcttgaacacggcaagcaggaggataagtcgattcttatcaacagcgtgcgcggcaaagttctggtgctatcacagcacaagttcgcctcaaacgttgtggagaaatgtgttacccatgccactcgcggagaacgcactggtctcatagacgaggtctgcaccttcaacgacaacgcgttgcacgtgatgatgaaggatcagtatgccaactatgtggtccaaaaaatgatcgatgtatcggagccgacgcagctcaagaagctgatgaccaagatccggccccacatggccgccttgcgcaagtacacctacggcaagcacatcaatgccaagttggagaagtactacatgaagataaccaatcccattacggtgggcacaggagctggaggagtgccggcagcctcgtcggcggcggcagtcagcagtggtgccacctcggcatcggtaaccgcctgcaccagtggcagcagcaccaccacgaccagcactaccaacagcctggcctcacccaccatttgttcggtgcaggagaacggcagcgccatggttgtggagccctcctccccggacgcctccgagtcctcgtcctcggtggtgtcaggcgctgtcaacagcagcttgggtcccattggacccccgaccaacggcaacgttgtgctgtaaaggaaataacaaattaagccaggcagtcaaaggaaacttccttctcgaatcgcagtatagtttttagaagctgtagagcttaacataaacaacaagtacatataaatgtaatcttatttattggaaaagcagcgataaatggagctgcactcgaagatttgcaaagaggatagtaaaacacacatgcgccaatctagagaaacaaatagcaaacaaagaagcacactggcaagcaaaaaagcaaaagagcttaacagctaaaactaaaagaaatttgtatttttacgaacaaaactaataacgttctcatgaaaaaagatttcaaaatatttgtaaaatgcgctcgcataattaatttgtaaaaaaaaggcatgaaccgcaaagatgaaagaaaacaaaaatgcgtagtaaatcgcgatcaagaaaaaataatgaatgtaatgtaaaatgtcaatgaaacagatttgtctgcgtacattttcgttgtaactttgtataaattaattattatatagcaagtctatctgtaaatgattaatgtttcgactgtaaattaataagaagacaactgaagagccggcgagctgaaaaaaaagaaagtaaaaagagcgggctgcatgaattagcctacgatttataagttcagacagaggaaccatttctaatatacaaacatatatacgagggataacagcagaagccgcacttagtgtagaatgtagagtaataatgtttttggagccagcagctacaaagacacaatgaaaacagagacacacgagacacgcccacgccccctcacgcacactcggttgcatacacccacacaatgaacgactcttcagcccattcacgttgcttttgcactatgtaaaaattttgtataaaaaaaaaccccaaacaacaaaccatgtaaaccatgtaattttcaaatgtttcactgtaaaatgtatacatactttattttgtaaattttttttaagtcgcaagtaactcatacatattctattctaaacctcacgcatgtatttataattttatacacattagctggtgaccaccgatcgacgatctgcatggatattggtcagctggtggccagctaaaagaacctgttagccaagtaagccaaaaatgataataattggattttaaaacaataaccatcaaaataaaccaa

SEQ ID NO: 20700 - protein, 267 aa, DROSOPHILA
MKFLGGNDDRNGRGGVGVGTDAIVGSRGGVSQDAADAAGAAAAAAVGYVFQQRPSPGGVGVGVGGVGGGVPGVGAVGSTLHEAAAAEYAAHFAQKQQQTRWACGDDGHGIDNPDKWKYNPPMNPANAAPGGPPGNGSNGGPGAIGTIGMGSGLGGGGGGGAGGGNNGGSGTNGGLHHQSMAAAAANMAAMQQAAAPATTSASTPAASPAAAATAAGAEPGASTSPYGRWQWTGQRQWIGHTTSRPATAAAAATTAAATSRPVQRESA

SEQ ID NO: 20701 - DNA, 5251 bp, DROSOPHILA
taaccttcttttgaccttcgtaagtcttccactggcacttgaaaagctttgggaaaacagctgtgaatttgcccagcagagcttccgaaacgacggcttttagtacctccgccgtaacaccacccacagtgggtcggttctggtccatggtggggatggtgtggtggttccgatgatacgggaatcgctggagaagcgttactgatgcaatgcactggataccgttcctgttcagatcattgagtactccaggcggcatttctattgtggttacaatagtaagtaaggagtagtaaaagttattctgaaattatataaacggcttgttggggttttaaaaatgttgccggttttagatttagcagtgactccaaccatctgatggggaactttgagcaagtgagctccaatagttttggcgtcgcttccaaaaagctctggaaaagcttttatcaacaggcttgccaaaatccgctatactagcatatgtaaaagaaaaacttgtataccctaccaataggcatacatcgcatcaggacttatttaaccaacaaaaataaaacacaacatgaatgtacattctggtttaatcgctttatttaacttcaactttgaaattcatgtcgcatggcttaacttggttttcacagacgttcaggtatacataagctgacatatacacagtaaatactctaacaacattaaacatatgtatgtacataattaactagtccgtagaaacgtattatgaccatacactcaaaataaatgcgcatagctcctaatctctatatttcactaccgaactaattgatttagatccgatatagaatttgacaacgtttccgaaagagagcctaagagagctggaaagtacttaacgtaaaagctttgacttgcgagtatttcctcaggggtcaccccttacccctttcgcatccttgtgatcctcttccagtggactttcctgctgatcccgcttcttttccgaccgcgaaggtcaactctccgcgctggtcgccagaagggacggcgaggaggtggtcagacccactggaaccgattcctcctgagcctggcccatgggcggtggtgatggagtgggcgtggaggccgtggacgacgccgtcgatgaggtgggacgggcggcgtgaggctggaggaagtgaaacaagttggaatgctgcatgaaactgcccaccgatctcagcggactaaaaaagttctctgtgggatggttggctggctgcggatgctgtggaagtacagaggactcctgatccctgcagagattactgctgggctcgtcgtggacccctcgtcccttagcgatggagctacagttgcaggatcggctcttcttcagcgaactccgagtgaatgccgtgccctttcgatacttaggcttgtgcccatttgagccgggactcgcctcactatcgatcacaaagataccggattgctcctggggagcaggactcgccgtggatcctggcaggcagtgagcgctattggagttgccagcaagcagtttggccctcagaagagccggaagtgggccatttgtgggagatgtttgagtggagagcggtctctccctggactgttcatctatgggaagatcctgattgttgcccattggcctggagtccgtgtcatccgatcgcaatttctccctcatgaccaaagccagggagcgacgcagttccacgggatctatgccaggctgaacgggatttggaacagagctggccggcacgaatacgtcctcaaactccagatcatcatcatcttcgtcctcatcctggctgaaactgtagttgtggttgtcataggaggcggacggaactgagggcttcgcaggagcaggaggagctggtgggactgtggaactgctatttcgttcactgctgcgctgggaacccggagcgggggaagggaactcgtagctggtttcacccagctcggcgccactggaggcctccactatgttccacatttctcgctcgagatctgtggtcaccgaagccacggcggccaccgtttggttgatgttgttgaaacagggcgacaccactccgcacttgggcaggagctgggagttcttcagggcctcctgctgctgcctcaaccaaatgggtgaatctgcagggaatgttacgagagttatagggattttgccacagttccaaggagacaacgcgcactcacactcacccacatagaggcgcggctgcgtggagcgcatattggagtccatggactgcaggcgatgctgactggccaccgagaagcggtggattgcctccgcctgctgatcaatgtccacgcccatcatcttcaggagtaagttcttcagcgcggccctgaagtccttgaggtgataggcatacaggaccggatttaccgccgagttcagatgggacagaatgatgcagaagagcgtcagcttgggatgcacatagcagtcgggacagaaggccttgatgcagttgatcgtatagagcggtatccagcagatcataaagaacagcacgataatggacagattctgggtggccttgacgtcccgcttccttgcggcgcccaagacccgcagcatggttcccgtgtgtccacctcttccgggtgtcgtcacctgcaccacggccgccgaggagcgacgactgagatcggaggcggggttcatcgtaacaatctgacggacctttaaagttcaattgaaaacggatagttaatattccaaactctatggaatatataaaaaactttactggcgaaaatctatctaccactcacctgtttgatgatgacccggtagatgtgcgtgtagaaggccagcatcagcagagccggagtgataatggtggcaaaatagaggaagacgaggtagttgtagtccatcacctccacgaagagacactcctggttgtgattgacatcggcgtgccagccgaaaagcggcaggaagcccactatcgtcccggccacccagcacatggagatgatgactgcaacggaagaggaacattggtaatcagagtgccctgaactgaagcccttgaagtggagctcccccagacgtcatttgagcagattgcaggaatccctgccgtcttcgccaccaagcaccataaaaacttttatcgaattgcgggaaactaaacaaaactggcaggcagggtgagtgcacttcccaaatgacgcaaataattaccaattttccggacgtagcatattggaaagtaatcttgccttgagcggccatttataaagcactatatagtaggtgatatatagtgcttagaaaattatatatttatgagatatttttagctagaggccaattattctgattccaaacagttgctataaacatctaatatgaaaattcttagaatcaatttgaatctagttaggctagtaagactattatgttacggattttaaggatgtttattactgtgtactgttctcattgcgtccattcgtggtagttcaaatgaggcgtcttttgtttaactcaagtcgcaactcaaacatggtcgatggccggaatgaaacacaatgtgctgtatattagccatccagagtcattagtatcacggcaacaaaggcacaatactaaacaatggacaacttaaagtcgaaatagtttgacaaatatcctgacaagtaggtgaaaccagaaaactggtcctttaaagtgggttttagcataccattttgtacctactgattttatacaatacattgtatatacccccatatatacttacatatcgccgtgcgggtgcggacattccttgagtaggccatcggatataggatggcccagtatcgatccacggacacggccaccagacagaagatggagatggtacacagcaccacgagcagggagactgtgaagaggcaggcatgaaggtttctgggtagtcccatggaggccaggatggcgaagggaatacccaatgcgcccactagcaaatcggccatggccagggatactatgtagtagttggtgcggcgtcgcaactttctttcccggcggaagacgatgatcaccagcacgttgccgatgatgctgacgatggccaccaggacctcgaagacggtgtagggtatgttcagctcggaactggggctgtccgagtccttggcatccttgctcgtggtggccgcgtgcagcggtagcagaggtccctcgaaggagaaatcggtgatcgagaagtagcgaaacgcggacatggtgggcggtgttgcgggtattttacgggttccacggggttccctgccccgatcgagtatttaaggctagtgccgagctaatgaaagggcggaacaggtgtgggcttcaattacagtgcccgctggcctgtgaactccctaattgacttgaggtggccgtggcagtagcagcgatagtaatagcacatgctgcgcattgcgtatacgccatgcccgccgcgctgcggttgctcctttcccgctttctcgcttttccgattcgcttttttcgctctcgctctttattttcctttccgttgatgtatttgtttttctgctgtcgacgtaccctattaagctggaaaaaaaagggaaaacttaatcatcgttcggcacgtttgttacacacatgcagcaacttaattgtagcaattttttagtgtaataaattgataaatatttgccaaaaaatacatgtccatattgataacgtgtgcggcgagcaaaacaacaaaggccgtatcacaactatgcaataccctagataatcggccagtacttgagtatattatttgaaaggggccatcagttgcaggtcttccttaaagccagcagctcaaggatcacagtgaaatatgttggaacttcgatggcttttacgatgatggtgtttctggtttggcttatggggtatatatacccgcaactctgcgagtacacactgccacactatctgattcgcgtgcggcaaatacaaagctcgaaaagcaaacaactcccgactagcaacaaaatcaattgccagacaatcgaaccgggcgctgcagaacataataaaagtgtataaaaaggacggaacagcgagaacaacgcagaaacagacgtcccataaataaaagagcatcctacacagagaaaaaagaattaggcaggggtttacgaaaataattcatattcaattcaaaagtattcgctttttttgtaattattaagatagatgatgtattgctcctaaaaactc

SEQ ID NO: 20702 - DNA, 2325 bp, DROSOPHILA
atgtccgcgtttcgctacttctcgatcaccgatttctccttcgagggacctctgctaccgctgcacgcggccaccacgagcaaggatgccaaggactcggacagccccagttccgagctgaacataccctacaccgtcttcgaggtcctggtggccatcgtcagcatcatcggcaacgtgctggtgatcatcgtcttccgccgggaaagaaagttgcgacgccgcaccaactactacatagtatccctggccatggccgatttgctagtgggcgcattgggtattcccttcgccatcctggcctccatgggactacccagaaaccttcatgcctgcctcttcacagtctccctgctcgtggtgctgtgtaccatctccatcttctgtctggtggccgtgtccgtggatcgatactgggccatcctatatccgatggcctactcaaggaatgtccgcacccgcacggcgatattcatcatctccatgtgctgggtggccgggacgatagtgggcttcctgccgcttttcggctggcacgccgatgtcaatcacaaccaggagtgtctcttcgtggaggtgatggactacaactacctcgtcttcctctattttgccaccattatcactccggctctgctgatgctggccttctacacgcacatctaccgggtcatcatcaaacaggtccgtcagattgttacgatgaaccccgcctccgatctcagtcgtcgctcctcggcggccgtggtgcaggtgacgacacccggaagaggtggacacacgggaaccatgctgcgggtcttgggcgccgcaaggaagcgggacgtcaaggccacccagaatctgtccattatcgtgctgttctttatgatctgctggataccgctctatacgatcaactgcatcaaggccttctgtcccgactgctatgtgcatcccaagctgacgctcttctgcatcattctgtcccatctgaactcggcggtaaatccggtcctgtatgcctatcacctcaaggacttcagggccgcgctgaagaacttactcctgaagatgatgggcgtggacattgatcagcaggcggaggcaatccaccgcttctcggtggccagtcagcatcgcctgcagtccatggactccaatatgcgctccacgcagccgcgcctctatgtgggtgagtattcacccatttggttgaggcagcagcaggaggccctgaagaactcccagctcctgcccaagtgcggagtggtgtcgccctgtttcaacaacatcaaccaaacggtggccgccgtggcttcggtgaccacagatctcgagcgagaaatgtggaacatagtggaggcctccagtggcgccgagctgggtgaaaccagctacgagttcccttcccccgctccgggttcccagcgcagcagtgaacgaaatagcagttccacagtcccaccagctcctcctgctcctgcgaagccctcagttccgtccgcctcctatgacaaccacaactacagtttcagccaggatgaggacgaagatgatgatgatctggagtttgaggacgtattcgtgccggccagctctgttccaaatcccgttcagcctggcatagatcccgtggaactgcgtcgctccctggctttggtcatgagggagaaattgcgatcggatgacacggactccaggccaatgggcaacaatcaggatcttcccatagatgaacagtccagggagagaccgctctccactcaaacatctcccacaaatggcccacttccggctcttctgagggccaaactgcttgctggcaactccaatagcgctcactgcctgccaggatccacggcgagtcctgctccccaggagcaatccggtatctttgtgatcgatagtgaggcgagtcccggctcaaatgggcacaagcctaagtatcgaaagggcacggcattcactcggagttcgctgaagaagagccgatcctgcaactgtagctccatcgctaagggacgaggggtccacgacgagcccagcagtaatctctgcagggatcaggagtcctctgtacttccacagcatccgcagccagccaaccatcccacagagaacttttttagtccgctgagatcggtgggcagtttcatgcagcattccaacttgtttcacttcctccagcctcacgccgcccgtcccacctcatcgacggcgtcgtccacggcctccacgcccactccatcaccaccgcccatgggccaggctcaggaggaatcggttccagtgggtctgaccacctcctcgccgtcccttctggcgaccagcgcggagagttga

SEQ ID NO: 20703 - protein, 774 aa, DROSOPHILA
MSAFRYFSITDFSFEGPLLPLHAATTSKDAKDSDSPSSELNIPYTVFEVLVAIVSIIGNVLVIIVFRRERKLRRRTNYYIVSLAMADLLVGALGIPFAILASMGLPRNLHACLFTVSLLVVLCTISIFCLVAVSVDRYWAILYPMAYSRNVRTRTAIFIISMCWVAGTIVGFLPLFGWHADVNHNQECLFVEVMDYNYLVFLYFATIITPALLMLAFYTHIYRVIIKQVRQIVTMNPASDLSRRSSAAVVQVTTPGRGGHTGTMLRVLGAARKRDVKATQNLSIIVLFFMICWIPLYTINCIKAFCPDCYVHPKLTLFCIILSHLNSAVNPVLYAYHLKDFRAALKNLLLKMMGVDIDQQAEAIHRFSVASQHRLQSMDSNMRSTQPRLYVGEYSPIWLRQQQEALKNSQLLPKCGVVSPCFNNINQTVAAVASVTTDLEREMWNIVEASSGAELGETSYEFPSPAPGSQRSSERNSSSTVPPAPPAPAKPSVPSASYDNHNYSFSQDEDEDDDDLEFEDVFVPASSVPNPVQPGIDPVELRRSLALVMREKLRSDDTDSRPMGNNQDLPIDEQSRERPLSTQTSPTNGPLPALLRAKLLAGNSNSAHCLPGSTASPAPQEQSGIFVIDSEASPGSNGHKPKYRKGTAFTRSSLKKSRSCNCSSIAKGRGVHDEPSSNLCRDQESSVLPQHPQPANHPTENFFSPLRSVGSFMQHSNLFHFLQPHAARPTSSTASSTASTPTPSPPPMGQAQEESVPVGLTTSSPSLLATSAES

SEQ ID NO: 20704 - DNA, 3923 bp, DROSOPHILA
tccactaaatcctatgtctatccctagcgttagatgaagcatcaaataaatgataaattttatgaacaactcgttacctcttgcattttattgagctttatatctgtgtttatgttacgcctttaacctttgttctgagttaattggttgctttaattcacgtggttaacatacataaatttgttgggaaatagcaccctttgcaatgggtaatccctccaagaaccctaacttaatcttcctcatccctatgatttttagaactcgacacaccgagtgccggagcagcaatgacgaccccattgctcggtgcctccggctctgtgccagcgccgtcaggtcgggaatctattttaaagcagcagggaagcgtcaaagcagacaagcgagtatcgattcaacaaatggcgaccagcaacaacaacaacaataatagtaccaagctaacgccaaatgtggagtatgtttccgaacgccagccggaagtccaaggtgccggcaaacgcttgacaaccaagccgccaccaggtaatgttcaccaggtctaaagccaaaacacgtacataataataagcaaatccttaataggacctcgacccgcctcgctgatcatcaccagaaacgattccaactcacagttccagctgctgcgctcctcctcagtggactacgacgacgtggaggcccaggaacaccggaccacgataaggaccaccttgctggaacagcaggaggaagaggaatcagcccctttcgtctttacagtgcgaaaatgacacaatcttctctactaggtgaaaccagccaatgagatggccatttagtgccagctacgcttagttacaaattagttataacgcaattagctaataactggaggactttgtggaaactctgccttttgggtgacacaatgatgtagttgtatagtcgatacgctaagaaaagacactttgtttgcaagtcctggttgtaagtcacagaaaacacaacttgttataaatgtataatgcatgtgcatccttatattatataaagaaaatgaaagtgggttgttggattagactatctattgaatactatggctgtcgaccctttattattgccagagcaggtgccaatgccctggagagcttgacggccatggtggcactaggcagtgtttggtagatttcctgcagggctaacataacgttcgactgatgctgagtcaggttcatggggtcaaagtgcggattttgccaaaaggccccattcagcttgctctccaagcgaacctgggtgccagcatcgcgggtagccgttctgcgctccgtttgcgtagctgcattcttgtacagcgtagccgtttcttgttcctctgtcggagccaggccctgctcaagttgctccttcttcagcttcagtattcgctgcgatggcttaactgtgctctgtagctccttaaggcgcgccacatcgatgcccagtagacgcagtaacctcttagtagcctcaggcactgtttccaagccccatttagacaaatcaatcctggttccgggcgtggaattgaacttgtagaccacattcatgttattgcaaattggcgaaggattctcaaagcaatcctggttcctaaaggactcattaacagggagtttgcagatggtgtccaccatgtggaattccggtggctcctctttgttggccttctgctggatttgttccagcaccaactccgctcgtgctacggccagactacgcttgtctgccttggacagattcacagtgttgaactcaacctggggcggccttcgctctataagattggagaatttaataggtcggataaaatgctcatcaggccgcactggaacgtaatccaattctgtatcccgaagtttcctctccttcgaactctcattctgcgaactggcactaccccttcggttcttatatttcttgtgtcctcgataatcgcaatcaaactggtttttatcatctgcgccctcgtccgacgaactgttactgtgatttcgcttccttgactcctcctggtgtttatttgaccgatgggaccgctccttcttgtgtttcttttttttatgcttcaccttcctgttttcagctgtcatttctaacatctttagaatttctcgtttctgtgcaatgagatcagctgcctccgggtcatctatgggcgtatcattttgcgggaaactttgttgttcgtctggtacaagcgtcttggcggccttaagactgaacaaatccatgtcgtccaagttctcacgtttcgaaaattcgctgggcagcaattcgcaactacgactgccctgctcaacggagtccaacattgcattaggctttacatcggcaggggtctgcaaggttgccggggaattattttcgaatgggtccgccagcaagctgtccaacatcgcattatcggcatcttctttgatcttgggctccatcttcggttcaatggtgtctagggacggctgtagatgttcgtccgaagtcggcgtcgccgagtggtggacaaggttaccatcctcaggatcgctgcaccaacctgatccggacatagggactccgcaggcaaacgcatgtggcggagtctcgcctgtgccctcccgtaggggagtggcctcgtcctcgttaatgccgcattccacgtagttttccactttgacctctagcttcatcggagcttccatgatgaaaaatcgcttttcactaatcttatgtacaaattaaatttgacacctttgaatttgtccaccaaattttagctgatgctgcagttctagagatggcaaattaaaggatttccagtaagtgtatttccacaagtccttttcttcccattattagttttccagggttcttttaaatttaatgaaatagagcataaagtaatcctgttttgttattttttatttttacacaactctggagttgccatcccacttttctacaacgattcattcaatacagtcgatggacctgttgatatatcgatagcgttatatggaaaactcaccacagctgttatcgactagctactttaacaagcattttgtcaattaaatgttatattgcaacatgtacggtgaaagttttaattaggagtcatttgaaagcaacttgatgtcaattaattaacaataccccttaaaaaggaatttaaaatatgcacacatagcgactacaaacagattgagtgtaaataaagacaagcagctgttttttgtttacaagcttcgttccttagttgttgttgggggctgtttttcagcgcctcaaccagctgatgaccacaaaaacttcaaaggtcaccttgagcttaatagaatcaaaagcaattgcttaagaatttcggctggtaacgtaaagttcaatttcgcatcttcatcacagcccaaaaagtacgaaaaatcatttaaaaatccagtgataaaatgaaaataatcaaataatttgcatacccatgaaaataaacaattttcaccgagcgtgaatgtgaatgaaagtgggcagataagttctagagcagataaaaaaagaccacagattactcacatggagcacttttgttgtgttctaaaatcgggactcctaaaaaacgatctataaataaacactcataggccatctaccggcagccaagtgcaattcattgacccacatatgcgagggtgtgagtgtgtgcgtgtgtttgttgtgaacttggtgtgcacaatttttttattccctgacctgaattttgaatgtgaattttcaatgttgataacgttcgctaatcgtgaggatccacattctcacgtaggcgccacatgtcaatagcaatgcatctgaaactaaaatgccttataaccctataagaaagcagtaaagcaaccccccgttagccgacgcccctgtgtgcaaattgt

SEQ ID NO: 20705 - DNA, 1923 bp, DROSOPHILA
aaataacaaaacaggattactttatgctctatttcattaaatttaaaagaaccctggaaaactaataatgggaagaaaaggacttgtggaaatacacttactggaaatcctttaatttgccatctctagaactgcagcatcagctaaaatttggtggacaaattcaaaggtgtcaaatttaatttgtacataagattagtgaaaagcgatttttcatcatggaagctccgatgaagctagaggtcaaagtggaaaactacgtggaatgcggcattaacgaggacgaggccactcccctacgggagggcacaggcgagactccgccacatgcgtttgcctgcggagtccctatgtccggatcaggttggtgcagcgatcctgaggatggtaaccttgtccaccactcggcgacgccgacttcggacgaacatctacagccgtccctagacaccattgaaccgaagatggagcccaagatcaaagaagatgccgataatgcgatgttggacagcttgctggcggacccattcgaaaataattccccggcaaccttgcagacccctgccgatgtaaagcctaatgcaatgttggactccgttgagcagggcagtcgtagttgcgaattgctgcccagcgaattttcgaaacgtgagaacttggacgacatggatttgttcagtcttaaggccgccaagacgcttgtaccagacgaacaacaaagtttcccgcaaaatgatacgcccatagatgacccggaggcagctgatctcattgcacagaaacgagaaattctaaagatgttagaaatgacagctgaaaacaggaaggtgaagcataaaaaaaagaaacacaagaaggagcggtcccatcggtcaaataaacaccaggaggagtcaaggaagcgaaatcacagtaacagttcgtcggacgagggcgcagatgataaaaaccagtttgattgcgattatcgaggacacaagaaatataagaaccgaaggggtagtgccagttcgcagaatgagagttcgaaggagaggaaacttcgggatacagaattggattacgttccagtgcggcctgatgagcattttatccgacctattaaattctccaatcttatagagcgaaggccgccccaggttgagttcaacactgtgaatctgtccaaggcagacaagcgtagtctggccgtagcacgagcggagttggtgctggaacaaatccagcagaaggccaacaaagaggagccaccggaattccacatggtggacaccatctgcaaactccctgttaatgagtcctttaggaaccaggattgctttgagaatccttcgccaatttgcaataacatgaatgtggtctacaagttcaattccacgcccggaaccaggattgatttgtctaaatggggcttggaaacagtgcctgaggctactaagaggttactgcgtctactgggcatcgatgtggcgcgccttaaggagctacagagcacagttaagccatcgcagcgaatactgaagctgaagaaggagcaacttgagcagggcctggctccgacagaggaacaagaaacggctacgctgtacaagaatgcagctacgcaaacggagcgcagaacggctacccgcgatgctggcacccaggttcgcttggagagcaagctgaatggggccttttggcaaaatccgcactttgaccccatgaacctgactcagcatcagtcgaacgttatgttagccctgcaggaaatctaccaaacactgcctagtgccaccatggccgtcaagctctccagggcattggcacctgctctggcaataataaagggtcgacagccatagtattcaatagatagtctaatccaacaacccactttcattttctttatataatataaggatgcacatgcattatacattt

SEQ ID NO: 20706 - protein, 541 aa, DROSOPHILA
MEAPMKLEVKVENYVECGINEDEATPLREGTGETPPHAFACGVPMSGSGWCSDPEDGNLVHHSATPTSDEHLQPSLDTIEPKMEPKIKEDADNAMLDSLLADPFENNSPATLQTPADVKPNAMLDSVEQGSRSCELLPSEFSKRENLDDMDLFSLKAAKTLVPDEQQSFPQNDTPIDDPEAADLIAQKREILKMLEMTAENRKVKHKKKKHKKERSHRSNKHQEESRKRNHSNSSSDEGADDKNQFDCDYRGHKKYKNRRGSASSQNESSKERKLRDTELDYVPVRPDEHFIRPIKFSNLIERRPPQVEFNTVNLSKADKRSLAVARAELVLEQIQQKANKEEPPEFHMVDTICKLPVNESFRNQDCFENPSPICNNMNVVYKFNSTPGTRIDLSKWGLETVPEATKRLLRLLGIDVARLKELQSTVKPSQRILKLKKEQLEQGLAPTEEQETATLYKNAATQTERRTATRDAGTQVRLESKLNGAFWQNPHFDPMNLTQHQSNVMLALQEIYQTLPSATMAVKLSRALAPALAIIKGRQP

SEQ ID NO: 20707 - DNA, 3624 bp, DROSOPHILA
tgtcccttggccgcctggttgccccgctcctggtgcacatgaatttataattgcatcatttttggacacgccaatgtagccgaggatgacattcagtcggtcactcgactgcagttgcactcgctttcgtattcacagtcacattcacattcgcactcacattcgtattcgcattcgcaatcgcagttgtatgcaaattgtgaatgtgagtccgcgaaaagccgtgtgcggcaactggcaggccttctcgggaaaaatttcggggaaaattgaaaaaggcacgccgttgcactgggcggcatatatttcgtgctgggcgcccctttttttgtttattttcataactatgcaaaacagaaataacacgctggccaaaagcgaaatattgaaatatttacaaataaatacaaaaaattcttctttctctcgcagattatcaatttaaagcacattcttcttagttaaaactgacatttaaaagagcacttgctgtttttgtttgcgaacttaaatgctacttggctgcttaaccatctctgggtgttcattgatgttatttaatcaaaaatgaattaattcgcaattattatacaaactatagtattttggccaattatatacttgaatgcaattaaagttgaatttgaatgacttgaagctaagtcccatgtcagtcaattgagtatatgttacgcgaacaatgaaaaactccttacacccgacgaaaaaggcagtcccacttaaaatatttaaatatttgtagaaatatttctgatgacttaactaaatgcctgtagatgttgcactgattgtatctaattttgcttttataatttaagaatataatatatatatataatatataatgacttgctcagcaatttatacctttaaatcagaacgctatgaactgccaactttgaggagggtttcggaggacaaacacgatttgggaaccaacatatcattagccagttagtgcaagtagtattcttgcaagatgttcgacatcacctggctgcccaccgcctgcggatcgctggctccggccctcatcccgccagcgcatatcgtcatcctgtggtacttctgggagaactatgcccgctacgtggacaggcacttctgcacctgctcctgttgggacaccgtcttcaagggaccctacgagtcgggcgtggcggcctacaagcatatgtacttcaatgccacgcccaacagcttcaagatgtggattctgaccgtgttcgccgtgattgccctgtacgagtgcatcaagaggctaatcgccctgatcctccagcagcgcgtacggtactccatgctgttgcttttcctgctctcgatattttcgcattactacgcctggtgggcgtacatcaactactacaacgatgactactacaatcagtggaaccaccagctcttcttcacggtaagtgaaggactagaacactgaaaaaaacttttgtccatagctggaatattagatacaactaataagatataacattaccttcaggtatttcaaaatatatattgttcttaaaatagtacattgcggtatacattttgaaacaaatattacaaaaaaatgtatctaaaagtttccgaaccagatggccagttataaaagctaattagatatttgcaaagtttttccacgtgtaccagttcagattgcaacttacaagtcaatgtcaaatatcgcaactacgtgccgtcatatgtttgtgccctaagccataactggccatccataatttattgggaaagttcgacctgcgcgagtgcgctcaaaacttgcacaatatgcgctcaaattcgaacactttcccgcacaattttcgcacttttcccgcactagaccgctcaccacccacgttcaccacccacgtccagtcctccagtccaagtctacatagccatattcatggaaatagaagtatggcagagtaataagtttcgagagcaaatccatccatccgaccaaagttttaatgagtgggctgccctaaaagtgcgaaattaaaaaaaggccaatagctaaaattatacagtcacgagttcgggaagaaatataattatatatatatatttttcttttaccagaaaccttaaactaattagtttaattagtgtaatcaatccatctcatctaattatattatatattcgcaaatagctaaagcacatctatatcctcgtttgaaaatatcttatccatcttaaagcttcgattttaaacactccatttcttccaggtaaccgagttgttttcaacggtcctagtgatgcacctggccaacaccaccaacgtggtcacgccaaagaaagtcttctgcattgtcggcatcgccctgctgcacatcctggccagcagttttgatcagttcttcatgaatgtggtgcgcggcgagggttacgcccaccagatagtgcgagacatcgggttcatggtgcctgatcttctacagctcttcgtcccagtttggctgctacgacagacacgtcgcgaatgttataccacgcgacccttccaccgagatcggaaactccatcgggatattgtgttgatgctgtgcctggtgtcgctgctctttgtcatctgcacggttttgtgagaaaggatcatgctggaggtgtacgaggaacgatacggaaaggtagtgcccatgcaggatgcggctgttcagctgctgaatcgctaccggatgctggccagtggaaatgtgcacaattgaaggtgattgctttttggcactgaacggattgtgggtggacaatagcggcacttgccacagcagtaagtgtggaatatcctgtattcctgtagaatttcgtattttcatttaacgtttgtgatagtttttatattctgttgaaacaaagtgagcggacgacgaccatatcgataagcttaattatcaacctacgatggtacataatcaatacaacaaactgtaatcttccatttagaaccgttgaccgataccgatgttaagtgcattatcattattaatcccatagttgaacttaggtatgatgtagtgaaatccattcctggaaataccgggaacttacgagtagaagggtatagcccccatagtcacaacgatatacaattattacaaggcatgaacacatgtgtagattagttatggaacaacgatgcggatacttaatattgataatggattgtggaagaggaagcccacccagtgttattctaccttaacaagttacatgtgacttagactgttgttagataataacaatattatacatgttcatcatgacaaaccaaaatattccagtacatctagtagataaaccacaaacgaataacaaataacacaaaaccaaaatcgtagtaatcaaaattagcgttatactatattgttacgattgacttgacaccaagtaaatcaaaaacatgcagatattaatatttggaatagcctatacttatacacatatatatatatattttagtatacaaaattatattgaataaactttaagagactgaatatccagtagtttccttagagtgtcaaaaacggtgagtccaacacaaccaatttcatttatttgtagttctcttttattgaaagataaaaa

SEQ ID NO: 20708 - DNA, 795 bp, DROSOPHILA
atgttcgacatcacctggctgcccaccgcctgcggatcgctggctccggccctcatcccgccagcgcatatcgtcatcctgtggtacttctgggagaactatgcccgctacgtggacaggcacttctgcacctgctcctgttgggacaccgtcttcaagggaccctacgagtcgggcgtggcggcctacaagcatatgtacttcaatgccacgcccaacagcttcaagatgtggattctgaccgtgttcgccgtgattgccctgtacgagtgcatcaagaggctaatcgccctgatcctccagcagcgcgtacggtactccatgctgttgcttttcctgctctcgatattttcgcattactacgcctggtgggcgtacatcaactactacaacgatgactactacaatcagtggaaccaccagctcttcttcacggtaaccgagttgttttcaacggtcctagtgatgcacctggccaacaccaccaacgtggtcacgccaaagaaagtcttctgcattgtcggcatcgccctgctgcacatcctggccagcagttttgatcagttcttcatgaatgtggtgcgcggcgagggttacgcccaccagatagtgcgagacatcgggttcatggtgcctgatcttctacagctcttcgtcccagtttggctgctacgacagacacgtcgcgaatgttataccacgcgacccttccaccgagatcggaaactccatcgggatattgtgttgatgctgtgcctggtgtcgctgctctttgtcatctgcacggttttgtga

SEQ ID NO: 20709 - protein, 264 aa, DROSOPHILA
MFDITWLPTACGSLAPALIPPAHIVILWYFWENYARYVDRHFCTCSCWDTVFKGPYESGVAAYKHMYFNATPNSFKMWILTVFAVIALYECIKRLIALILQQRVRYSMLLLFLLSIFSHYYAWWAYINYYNDDYYNQWNHQLFFTVTELFSTVLVMHLANTTNVVTPKKVFCIVGIALLHILASSFDQFFMNVVRGEGYAHQIVRDIGFMVPDLLQLFVPVWLLRQTRRECYTTRPFHRDRKLHRDIVLMLCLVSLLFVICTVL

SEQ ID NO: 20710 - DNA, 14053 bp, DROSOPHILA
ccgctgactagtggtttacatcatcttataattttgcgtgcgctcttatccatgctgaccagccttttggtcgctttatttccaaactcagcctcttgagaattttcggttagaatagcggcgacaacaacaaaggtatttggctgcggaaaagttcacgaacaactatgatcaggaaacgaagagtgagagtataaaacgaccgcccctacactgcgcgtcatcatattagcgcccctgcatggctccgtttgttttatgttatgtatttcgcgccattgcacgaaaatctatcactgatttccctctctctttgaggatataaaagaggtcctaaaaggaaccgctatcttttgttttactttcgtcgaaaaatatatgattcacttcccagacgaatgagcgaagtctttgaaaacaaaggaggatcaactcattcttaatttcctttacaaatattctgattgaatggaaaaaacttaaattatcgtagggggcgctatcctgatgacccaattttgatttacccatttatggattgtttatcttttttacttaaataaaatctataaacaacaaactgtatcccatacaaacttttcatttatagaattgtttatagaagaaaatttccaaacatctcacatcaaagatttttattcaagggtcgctaacctggtgacgcgaagtgtactccatctccgtttaacagagtaacaggcatctgatagtcgatgcaaaagcgttctctttttttacagtgttaccagagccatcggttcctgaaatatatcctaaatggattccgttgtttttggtatcccaaaatggattcaatttaaacgcaatacacctgtgcattgtttcaaacgaaaagaatcgtgtgcgaatgcctcgccgcagagtatccaagtttaagccaaccggcggagagcttatctcttttgtttttataaggcattgcgatggagcaccggagctcagtctgttttcgttcgttgccgtgttaagttcacgcgattccacctctgatccgcggagtttgattcaaattccgggctgctggtggctggagcgctgtgcaaatgaatatagcttgctaaatagataggcaaacctaagtcaataaaccataaagtttcgaattgaagacacttgttgtcttgttcaatgctggctaagtgcaattaaatcatattattcgtttgacaaacgctctttgagggtacggttcgaaataaaccaagtaaattatataatccaagttccaagctaagccgaattggccaacatgcagacggtaatccagtaagtatgggcacctcgcccaaaattcgattcctgcttctcctgaacttccaatccgaatccgtattcgaattcaaagttatgtggcacaggcggtttgactgtccatccacttggcattcagccacatacgtatccgaggtggttaggtgtaaaaagaaagctgcgcatgattattaaaaacacgttttgtggggcttatcattggaactgggcccaccgaattcatagcacagagagaaaatgctatactaaatctaatcgtacggattcaaatttcctgtgatagggaacaaagatgtaagagattcagatagctccagtaccctattgggtccaaaactatcttttttttgactgtggattggcaatgacaaagtaaaaatacaaataaaactaaagccagctcccggcaaatcttcatttggcttcaggtgcatcgataaatttttgaaaacgggtttctgttggctagggttcactgttcacctttcggtgaatcgagttcaaacaaccacgacgttgggaagtttcacatacgagcctgggatattagtagtattaattaggcactacaatattttgaagcccgatgattttgataagcaatgataaacataaaattgtggcaagggactatgcgtgttctgcagttgaactaaatcgcacggtcattaaaacgtaatcgaatcgtttcctattctattatgtctgtgaattacctgtcattagaatttttgcgcagggacgtgtaaccggaatttgtttaggcacatcatatgtactaccggttcccactgcccacgtctcattgttctgtgaagtagaaaactcttggcatttacgatacaatcctaaaaaaattgccattgtattgctaatggcaccgatcttgttcaatggttgtgtttaagaagcaaatacaaatatgtatttgctatagataagaaattccaaattggcaatttcggtgttgactcaaccaagatggccttgtttacaagttaattaaatcgtctgatctggccgaagaatttggataatcgaatccgcataaacacgccggttcaacttatcagctggtaacatctcgaccgatcacgttttctacttatgtacaatatatacacatgtttatttcgagtgtaaacaaataggtgcagtcgaaagttagctcactttgtttatgcgaatctttctaggtcagcattgcgtaacccaactgatgccctttaatgctccatggccaaatcccccgcatatggatttctgtcggattattgacgaaacgtctaaggaatgcgtttcaaaagtaatggccgtataaaatagaaatgataaacgtaatcgcctatccggtcttaccattattttactcatacaaaatgccttacatttggtcagggtttttgggggagaaaagagccaagaattgttgattctcttgtcggtctggggcttatgttttttactgcttggcagctatttgctcaaattgcataattaattgcacgcagaccttagtgcaactccaattttggtcagcacagttttcttggccttgcggtttcgttttgctggctctccgctgaaggtaacttctgcggttaacagatactccatccccccttggcatttactgacctttccccctttaaccaacgaataaagccgtgggttacgcgggctcagttcttctatagatacaagctcgccgaatgggctttaaatagcagcaagttgattctaaacacgattggtgggcactttctctcgggcttaaattttaaaacgacgcccatcaaaatcttttggagaaagcggaatttggcaggctcattctaattttggagagtggatatcggtagacatatgtattaaggtttatttttagtcgcttctggggaagttgcccctcttaacaagagaatgtgacccctggtttctgctttttcaggattagctttttaataggaactgcctgtagttagtgtatagaattttaaatgtttgtcgattctgattaagaaaattgatctagaatgaaaagcccttattgtaatgcgcgttagcacgttttggtaatcaactcatccagattccttccgcagttgtattcttcgccagcagttgttttttggccatatcgccaatgatttatcgctccagtgggagggtctggctggtactgggtaattcttttggcttccttatgagacgtacgttgctcgctaaaaaccaggtcaacgacagtcttaattcaggtaaaggttctccgtaattcgggaagacagtggagtgtgtagctcacgtaatggtcaggtattttattcgtctctcatcgctttggcgttctcgttcttctggctttgattgttgttgatgttgtaagcggcttattagtcatttggcacataataaaatcagaataatttgcgtacttgtgacgccgatgattgatcgtcgcaactcgtggactctaaagtacttcgacttcggttcttcacgtaattggacgtaattgtccgctttgatttggggggaacgtgcagcaagacagttagtacgaggcatcgcttgataattatgcagttaatgagcgcaattgaaatttttttcttcacttatctgcgtatttgcattaaaaagtgtttaattttgttattgataagtcaatacctgaggtcaaatcgcgagttgaaaatttcgccgatggtcgtaacggttgacgcatataaagtaagtgaacttgggccaattcaatgctgacttgggaaaatttccattttgtttggcatgcaaggcgccgttcgcagtaaatgccttgcgatagcagaaaaccactgcattcggccttgccagtgtatgcacgcggccaattgaagcacccgtccgcccaccagtgtgaccccagcgctcctcgcattcctctcaatatgcgtcctgcgatttgtttgccttggctttggctgtggcgcctggcgtttcccgctttcccgcttttccggtcttcttttccgccttccttcctgcccgcaagcccattaaaggtagaaaattaagtggcatggcactgggcaaattgcattgtcgctggctttttcttcctgctgcaaattgccctcttcctgctaataagtgggtttcaaaggtttgtcgtcgcaggctgcagctgttgctccgttccggcactcaccgtcgccttggccaagatccatctccgtgccgcaacaaatccacttaggccagccaagttcaagcccacgagataatgcgattattgaaatttattggagcgctgccactgcactgcggtttgtgaagactgagtttctaagtcaagatctttggcaagggatcagaagtgacaatattttgattttatttgatccttagtcttagttatacttaacgtcctaacgtccttatagatattagtattgagctgagcgtgtttttattccttttggaattaaaaattcttgactgctttagatcgatccacttactaaatatatctcagcgacctcttaaaaagcacacagacgcaaaagcggacagtggggctcagataagtaaaatcgcttatgtggatgtttgaaattttctttgggcaattaaaagcgctcatctacaattcgggcaagtaagtgacgcctgaatcttagtcgctaccgccatcgcaatcgcatcgctcgctcaaattaaaatgtattaggtaattgtgtctgtggcacaaattaacacatgaaaggcaatttgtcgtagcactttgtttgagcattacgaaaagtccaacagccgcaaaaatagtgactacgaaccaggcagtttcactgtgtagggagtagtctcctaattgatagaatagagttttcgcagatttaccttaaactgagtcacattgaacagcagttttccagaatgattggtccaaattggccactcgatggttagtttcacacttttctgcacacttaaggccataacacacttaaggccattatggtttctggggaaataaaatgggttcctctacgaactgtattttcatctcaaatgtattttatccgactagctatattccgcagccttaattccttaacccaagccaaattcctcaaccagtttgacagaggaatgtacatatgcccccaatcatcgacaattagccctgacaaggtgaatgctcgtcgattggcggatgggctcaagggagcccacatatatcattttttgggccaagaaggcggttgatgatactttaaatgggtggctgtcaatcagggcttggcaatttaatgaagacaacgccaagggacacccaaaactatcgaaaacatattaaacgctgaacaaaggaacccgaagcctaaaaaattccaaacgtcactcacaccattcggcgcacttcacgtgtgcatatttcgacgctttacttgtatacccttgcaaagagtatattgatttcgtcattcgcgatcgtataaagtatacatatatattttccatgtccagatgtccgacagtccgtttcttcacaaacttcttcccattgtatgaatgaaccagatcggacaactacatatataatatatcatacagtttccaaagggataatcgacaagtaaatggaaaaaaaatgtattgtatatagagtgttatgactcgttttttaggcaatatataatgtagtcaaaatataatatatagtcgaaaataacaggaacaatataaaagcctctttgttttgtggttttatagtttttagtttttcgttttagttacttattaactaacagggtaactaaattttggtctgccggagccgggttccgctcatgttattcattcacttttccgagaagggggtgaagtataggtggccacgtcaatggcggaggcacgccgcctgcacttgacacatttattggggaacgcagacaaaggcgggcttcaaactggccgccctattgacacgggccctagtaccgcccgctacctcctctgctcaccgccctgcgccctgccctacgccaccgccaacgtggccattacataacgttggtagcacttgtgcactcacggccgagaaagcgggtgccccgcaatagccaagaaggcaatagacgcaatagcccaatagccatcgggctccgatttggaaccggaacagggtaaccgggaaatgtgactgtgtttcgaccttgcgtcagtcgacgagcagagatatccgggattccgttgattcggcgatcgtgatctccggctaagataaaacaggcaaaggaagggcacgatctgcctccacgctcacttaattgaccaggattgtgctgagcaacaatcagtagtcatatctcatatttggcagctcagagattgcgagagggttatacaacggactgaaaagttacaagcttactaattagtaagctgcattcaatcaagttgaattcgtgtttattcccaattgaagaagaagaagcagaagtagtttctcccccatatagtttttctaccattttatttaaaaagtttggcagaatataaagtttagcctagcattaatatgttctcagataattaaactattaacacaaagtacatataattatactacagcagtattagcttatgatatttgtaaaaagttactaaggacgctgatttaattaggatgttatatacattttgcaattatgtgtctttcttttaaactcaatttccaggttccatcactccatagatttcaatttagtttctagaaacagtcgatactgaccctgtatgcctgcattcttacaataacttatggttgttgtcatttcagttttcacataaattgctattctgggatattgttgtaaaggttgtaatatttaattatgtttctaggaaccgttcatgttacataagtgcagaatcattttttctacgagtttattgcactgttcgcatctctggtagaaaatccagagcattgcacttcacttcgctttgaggtcggtctgtagtgtcgttcaactccgtaaatgccgtattgttacgagcaattcatcgctggccaaaatggctaagcattcagggaactggtttgcgattgactttgctttaactcgcgaaatttcgaaatttagccggcgtgaatttattagatggccaccgatcaaaaaacaacattggatatactacttgtcgaggtaccatgacgccttttcaacaagtgctcatagatacgacgtaggaagatggcaaagtgcatgtgcaaagtaaatgtgaattctcggaagaatacctagaacactcatattaatcacgagtccaatcattaacttttttttggtgcttggtgcttgcgattctttgtcattagcgttaggcaaaacgttcagctacattaaaccggatgattgatttaaagccggtgacttgagcgtatttcgggttttccggtgaatactcagctatgacggattccgcagggcggggtcgcggaattccgcccgccgtatgtacatatatccataaacctacattgggcgagatcgggtttattcacggcccgtgccctaatcgcctgtttaacgcatattcgccctgacccgaagtactcgcctttggttttacgtactaggttacacaatttcacaataattgaagcgtgcaaaaactcatcgcacttggtgtatcttttttcgcttcgctactgatttcaccgagctacctcttttaccacggaaatgggtgggctttaaaaatcattctgcccgaggtttcgtgtgtgcgaaacactctcgaatcacatcaaacacaaacgctgaaatgtcgtaacaagttcgacggccaaaatgacttttcaaacttgtgtgtacaaaatgtaaccagttaagcggcggaataacaacaatattcatagctacaaattgccaaatcaactactttggcagtggccagggggcagcgggcagcgggtctggtggatctgggggaatcggaagttggtcaacaattgccttttagcaggcaagtgaactcactatcactatcccttatttctcaagactacatttaactgctgtcataactgcttttgcaccaaaaccctgctacacagtgtagatagtacctgtgcagtgagtcggaaagctgatgagaaactgaacagaatggcagcatattgtatttaatttaacgttcgtgcttagccctgattaaccgaatcatttttttgaactgcacagaaaccccaactggtggcgtcgccgtaacaaattggaaaaaagtctgctggtctcgctgggcatcatgttcgtggtgcttgctaccgggttcggtctctggattggcaaagtgctgaggacgagtcccccgtcgaatccccaggccactgctctccacggcgacagcaccaccatcaaccaggttccaacgggcaccgcctcgaagggcaagtcgggcgattcgggcgacgtgtgcctcacccaggagtgcatccacacggcttccaccgttttgcggaagatgaagcccgaggtagagccgtgcgacaacttttacgagttcgcctgcggcacataccttgaggaggagaacatccccgacgacaaggtctccatcagcaccttctccgtgatctccgacaagctgcaggagcagttgaaggacatcatcaccgcggagcgaccggaaacggagccgaagcacttccgactgcccaacctgctttacaaggcctgcatgaacaaaagtgagccactgaattgggattactttactatcttctatttcgatactatatttgctctttacgcagctctgatcgagaccctgggccctgagcccataactcgcgtggccgagaggctgggcggctggccgctgatcaagggagactcttggaacgcggacgacagctggacttggcaggagcaggtcaagaagttccgcaccgccggttttagcatggactacatcatcgacttttcaatcggagtggatttgcagaacagcactaagcggcttatagatgtgagtgctttatttagaagtaacaatggctttcaactccaaaagtttttgatatcaactgatattaactgaaaaatgcggtttcgattttataaagtaaagcaattttaattggatatctccctacattttagctggaccagtcctccctggccttgagtcgcgagtacctcgtgaaaggattcaatgagacgctggtgacggcatactacaagtatatggttgacatcgcggttcttttcggagcaaatagggacttggccaagacggagctgctgttatctttggagttcgagatggcgctggccaatgtaagtgtctgacatagattaagtttaggagtatcagcagccttcttccgtagatctcctggcccaacgagaagcgacgcaactcctctgagctgtacaatctaagaactccagcgcagctccaggccgcctacccctacgtgcagtgggtggactacatgaacgccctgctgccggagggactgaacgtggccgaggacgagatgatcaacctgtcggtgcccagcttcttcgaggaccttggcaagctgctggccaagacgccgaagcgtgtcatcgccaactatatgttctggcgtatccacggcttctccgtgggatttctgagtgaggagttccgcaagcgacagctgcagtacgccacagccctttcggggcgccaggaacaggaggctagatggaaggagtgcgtcgacatcgccaccagcaggttagtggggtattcttatcacccatcccagggccaaggtcgtcgggggtgcttctatttcgtatttcgtgtttcgaatctcgaatctctgccctttttctgtatcttcttttgatttctttgtgatttgcagcatggatgaagtatgcgaagatgatttcgataggtacttatttagagaactgcattactcgttttcttaaaaacagaccaattaacacacatttcatacacactctaaacactctaaaccgaaatcgcatgctactcttcgctccttttttttagatcggtatatcggaatcggtctttagaactcatagttttaagctaatgttcgaacaagctcgggcgaatataagctgcaatagggacagtcttgaaaagaatgcttctttgaaccagtaaaggaaaaaatattcttcgtaaggattgctagccgagtaacttgtccgttttactgcccgtccgtatctcaaaaacaataataaccaggaaaattagggaagatttaggattttgtacctcctacgctgtgcatgtttgctttagatctttgctacaggactaatgatttagtgaaaatgattttatttctcaactttattatttgcctctcgaattcttatcgatatacataaaacattttggccacgcccacaaaccacctaaaactttcacgcccacacatttaaaggctgttcgagttctttcgttttattatatgtcttgccattttctgtcgatacgcctaaaacattttcgccacgcccactctaatcacaaaaagcctttctgccaggattggggagaatgatttgattttaatttattatttatcttgccaaacaaaatcgccctcttgctaagtaacaggtatctgatagtctatagcgttctatattttatattattttattgcaagtttttgggcagactactcaatatgcccattgtatatgtcgggaaatccactttcctgttttggtttcgcttttggtagcggtatctagctaataaccagaatttgttgacgtccatgggtaatgtacaataaaagcgtcagatagagaagtggtgacattttaagacgaaagaaaccatagattcatatgtagagcttcgtaggcaataatgtgcactttttgtttcgcattgggtttaattgccctcaaggtccctaactttattcaaaagtgcactgtgcattgcgaccaaatgcaatcagacccaatcagatcttttttcctaatattaattattatttgtgttgtgtacattcaccattttaataactgcacacctccaatcaacaatctccaacatccgacatcacattgaatcgaaacgccaccatgcgccatctaatcaatcggttatcagtcttggcatttccgtgggatcgctctacgtgggcaagcacttccacaaggattcgaaggccaacgccctggagatggtcaacgaaatccgcaacgtgttcaacgacatcctggacgaggtcaactggatggacgccaagacgaagaaggaggccaagctaaagctgcacagcatggccacccacatcggctatccggacgagatgctcgacaacgagaagctggccgcctactacgccaagctcgacatcgatcccgacaagtacttcgagtcgttcctgggcatgaacatatttggcacggattactcgttcaacaagcttcgtttgccggtcaacaagacggactgggttcgccacgctcgtccggcgatcgtgaacgcgttctactcgtccttagagaacagtattcgtaagtcctactcaaaaataaattcggtgaaggaattctgataaaattagccttactaccttcttattcgccacagcaagctgtttttgaataaaaataaaatagctttaaagctgaaacactttaaagtctcataaaacttaaatatttgatttgtgtacctccagtttcgatgaggcaaagctttttcaaataagtttctgtagttttgaaaactaataacgcgaccagcaaattccccactactaattttttccttttatagaattcccggccggcatcctgcaggggcacttcttcaacgcccaacgtccgaagtacatgaactttggcgccattggctacgtgattggtcacgagatcacccatggtttcgacgaccagggtcgccagttcgacgtgaagggcaacctgcgggactggtggcacccggacacccagaaggcctatctggccaaggcgaagtgcatcattgagcagtacggcaactacaccgaaagggccacgggattgaacgtaagtgactgctccgtacagcgaacaaggtctcagtgtttttttttcccgcagttgaatggcatcaacacccagggggagaatatcgccgacaatggtggcgtcaaggagtcatacatcgcctaccgcagatgggctgagaagcacggaccggaagcaaagcttccgggattggactacaccccggagcagatgttctgggtggcagccggacagacttggtgtgctaagtaccgaaaaggtaagaacatgcaaagcaatcgtattacctactcagggaatttaacgcaggaaaccaactatcttgcgggattattttgatcggctccatgataatctaatctgaatttattctttcagaatctctcaagatgcgtattactaccggcgtgcattctccatccgagttccgagtcctcgggtcgctcagcaacatgaaggacttcgccaaggacttccattgtccagagggatcacccatgaatccggtccaaaagtgcgaggtttggtaggaactgctccggcagtgactacagggtattgtgtccgccgtgacacgatttgttaatctcaagtgggaatacgcatacaatatatgtatataagtgcccattatgcaaaaatcgtatttaataaaaatgtgtctatatgtaaggatttcgacaatatttaccgctttttgtaatatttgtcatcaattggatttgtctagagtatttcacaattaaaatagttaggtgtcattaacattccattggtcataaaggtatcagcaattgtggaaagtatttcgctagcgttgcgacaatatcgacataaagttttacattttacattttatttttaaggccatctttcgaattccaagcatttgtgtagaattggtggtaagtttttgcttgataaataataattgaatatatatttcaaaatattttgtatttccaatttgaaaataaatattaaacagtgttttagccactttttcattccagcggaatgcacacaatgataatgtttgataatattgttttattaagttttctgcagcggaacacacctttgggctgtaaattatgtaatcactcggaggtcccacgcagtcgccggactttcgatttatgagcttgtgctctttattgaatcagtggtcaaagctaaactgaaaaacttatctgactgtactaaagctaacagcatatcttaccatataacggtgtttatgctgaatctgcttgtaaagattctatggtgatctaattatcacccaagaccgacttaagtttactcattaattgtcttaactactccccccttagaagtatgaccgtcctcggtcatctggaacttgtcaaccgacttgtcgtatctctcgtgcatctcgtctcctcctcccacgcagccccgttaaccagatgtcggtagttccagccgctttcactttgtaacgtgttacgaaataaattgatgaaaggcaacctgtatttgcgggtacacgctttagaattcgactctagctcatggcgttgggtgtggtggtcgttattgtacaaataccttttagctacagacatttatgaataagatcaagaattgagtgtgcttacaacaacaaaatggaggaactagtatacaaaatcagaggacgcaaattaatatattcg

SEQ ID NO: 20711 - DNA, 2735 bp, DROSOPHILA
gccgtgttaagttcacgcgattccacctctgatccgcggagtttgattcaaattccgggctgctggtggctggagcgctgtgcaaatgaatatagcttgctaaatagataggcaaacctaagtcaataaaccataaagtttcgaattgaagacacttgttgtcttgttcaatgctggctaagtgcaattaaatcatattattcgtttgacaaacgctctttgagggtacggttcgaaataaaccaagtaaattatataatccaagttccaagctaagccgaattggccaacatgcagacggtaatccaaaaccccaactggtggcgtcgccgtaacaaattggaaaaaagtctgctggtctcgctgggcatcatgttcgtggtgcttgctaccgggttcggtctctggattggcaaagtgctgaggacgagtcccccgtcgaatccccaggccactgctctccacggcgacagcaccaccatcaaccaggttccaacgggcaccgcctcgaagggcaagtcgggcgattcgggcgacgtgtgcctcacccaggagtgcatccacacggcttccaccgttttgcggaagatgaagcccgaggtagagccgtgcgacaacttttacgagttcgcctgcggcacataccttgaggaggagaacatccccgacgacaaggtctccatcagcaccttctccgtgatctccgacaagctgcaggagcagttgaaggacatcatcaccgcggagcgaccggaaacggagccgaagcacttccgactgcccaacctgctttacaaggcctgcatgaacaaaactctgatcgagaccctgggccctgagcccataactcgcgtggccgagaggctgggcggctggccgctgatcaagggagactcttggaacgcggacgacagctggacttggcaggagcaggtcaagaagttccgcaccgccggttttagcatggactacatcatcgacttttcaatcggagtggatttgcagaacagcactaagcggcttatagatctggaccagtcctccctggccttgagtcgcgagtacctcgtgaaaggattcaatgagacgctggtgacggcatactacaagtatatggttgacatcgcggttcttttcggagcaaatagggacttggccaagacggagctgctgttatctttggagttcgagatggcgctggccaatatctcctggcccaacgagaagcgacgcaactcctctgagctgtacaatctaagaactccagcgcagctccaggccgcctacccctacgtgcagtgggtggactacatgaacgccctgctgccggagggactgaacgtggccgaggacgagatgatcaacctgtcggtgcccagcttcttcgaggaccttggcaagctgctggccaagacgccgaagcgtgtcatcgccaactatatgttctggcgtatccacggcttctccgtgggatttctgagtgaggagttccgcaagcgacagctgcagtacgccacagccctttcggggcgccaggaacaggaggctagatggaaggagtgcgtcgacatcgccaccagcagtcttggcatttccgtgggatcgctctacgtgggcaagcacttccacaaggattcgaaggccaacgccctggagatggtcaacgaaatccgcaacgtgttcaacgacatcctggacgaggtcaactggatggacgccaagacgaagaaggaggccaagctaaagctgcacagcatggccacccacatcggctatccggacgagatgctcgacaacgagaagctggccgcctactacgccaagctcgacatcgatcccgacaagtacttcgagtcgttcctgggcatgaacatatttggcacggattactcgttcaacaagcttcgtttgccggtcaacaagacggactgggttcgccacgctcgtccggcgatcgtgaacgcgttctactcgtccttagagaacagtattcaattcccggccggcatcctgcaggggcacttcttcaacgcccaacgtccgaagtacatgaactttggcgccattggctacgtgattggtcacgagatcacccatggtttcgacgaccagggtcgccagttcgacgtgaagggcaacctgcgggactggtggcacccggacacccagaaggcctatctggccaaggcgaagtgcatcattgagcagtacggcaactacaccgaaagggccacgggattgaacttgaatggcatcaacacccagggggagaatatcgccgacaatggtggcgtcaaggagtcatacatcgcctaccgcagatgggctgagaagcacggaccggaagcaaagcttccgggattggactacaccccggagcagatgttctgggtggcagccggacagacttggtgtgctaagtaccgaaaagaatctctcaagatgcgtattactaccggcgtgcattctccatccgagttccgagtcctcgggtcgctcagcaacatgaaggacttcgccaaggacttccattgtccagagggatcacccatgaatccggtccaaaagtgcgaggtttggtaggaactgctccggcagtgactacagggtattgtgtccgccgtgacacgatttgttaatctcaagtgggaatacgcatacaatatatgtatataagtgcccattatgcaaaaatcgtatttaataaaaatgtgtctatatgtaaggatttcgac

SEQ ID NO: 20712 - protein, 763 aa, DROSOPHILA
MQTVIQNPNWWRRRNKLEKSLLVSLGIMFVVLATGFGLWIGKVLRTSPPSNPQATALHGDSTTINQVPTGTASKGKSGDSGDVCLTQECIHTASTVLRKMKPEVEPCDNFYEFACGTYLEEENIPDDKVSISTFSVISDKLQEQLKDIITAERPETEPKHFRLPNLLYKACMNKTLIETLGPEPITRVAERLGGWPLIKGDSWNADDSWTWQEQVKKFRTAGFSMDYIIDFSIGVDLQNSTKRLIDLDQSSLALSREYLVKGFNETLVTAYYKYMVDIAVLFGANRDLAKTELLLSLEFEMALANISWPNEKRRNSSELYNLRTPAQLQAAYPYVQWVDYMNALLPEGLNVAEDEMINLSVPSFFEDLGKLLAKTPKRVIANYMFWRIHGFSVGFLSEEFRKRQLQYATALSGRQEQEARWKECVDIATSSLGISVGSLYVGKHFHKDSKANALEMVNEIRNVFNDILDEVNWMDAKTKKEAKLKLHSMATHIGYPDEMLDNEKLAAYYAKLDIDPDKYFESFLGMNIFGTDYSFNKLRLPVNKTDWVRHARPAIVNAFYSSLENSIQFPAGILQGHFFNAQRPKYMNFGAIGYVIGHEITHGFDDQGRQFDVKGNLRDWWHPDTQKAYLAKAKCIIEQYGNYTERATGLNLNGINTQGENIADNGGVKESYIAYRRWAEKHGPEAKLPGLDYTPEQMFWVAAGQTWCAKYRKESLKMRITTGVHSPSEFRVLGSLSNMKDFAKDFHCPEGSPMNPVQKCEVW

SEQ ID NO: 20713 - DNA, 2848 bp, DROSOPHILA
aagttctttttttttgagcgtcctaactagggagggtgcactgtacatacagcttgtatgactttattttaaatacgtgattggattgtaaatgggaaataaattaataattttcaagcgtaaactgagattagtacacatcctttttgacaccactgtttcaaaaggtgacaaatcctttaggccgccactgtaaatgggagtaggctcctttgtccctccactgtttgcacatacacacacgcagaagttgagtaaaaatttcacaagtttcttgtcgaaaaacgcaatttctgtgcaacaacaaccgattaattgcaagtaaactgcgcatttgtgtctagcctttttaaatgatatttacttttttgttatactaagttacgaatttctataagtcacaagaaatcatcacattttatacgaatgatgaatttgtcttaatcacgctttcgtttctcatttcagttaagtttttactctgtttgtgagtcagatttagctaggaaagtaccttttatcagtacgggaaaaaatcttcgttaattttatactgccagacgacgttgtttttgtcgatggttagtgatggcaaactttggtttggcgagcccattagtggtgcaaaaaagcacaaatctaacgaacaccagaaaaacttgttcgtgtcacggagcagcatgcacgaaatatcgctaagaactatttatatagtgactgaattcaagtctgtgtatattgacaatgtctaataataagcttataattctcttcccacgaattacaaaatggattttatataaaaatttagatcgtaatagccgttgtgaattattttaatctattgttcgccacatcttcttaacctaaacaatttatttattttttttaaacatttttagtgcttgagcagcaataatcaactcactctgccatctctgctgttatcgatatatcaaaacagaaaaacggtctgcaaaaagtgtgaccgtttgccgtgctgctcgcaactttgacacgaccagttccaaaatatcgtgagatttacgcaaaactactagaaaatggtcggttggagccgtttgctgtcgccggcggcgaagttcgccagctaccgggctgtcctgcaagagcccgcgtgccggaatggtgagcatttcttgaaaatatccgccgtaaacacacttcacattacgcaaccatatattctggatttctagccctgcaccaacagctgcgcagaatgggaggcgatcatggacaccaccaaatgatcatcaagccatcccgcttccagtgggacaagttcaaggatctgttgcacttttacgtaatgctcggcgtcatcccagtcaccgcattggttctctacgcgaacatctttgtgggacccgcgcagctcgccgagattcccgagggctatgagcccaagcactgggagtacgagaaggtatgatgggctcggaaaggcaaccaatcgatactaagattgtaattccgagatatctctttattatctagcaccccatctcgcgctttatttcccgctacattttgaactcggatcagcaaaactacgagaaatccctgcactatctctacgaggagaacgaaaaagcccagattcggtaatgcgacggaaacaacccagttatatcccattgtaaaacaatatatttcctttcagactccttgaggacgaagtacgtcgcaagatgtcggagcgcaatgattaccaggcctactactaccgaccatcggtggccaagtaccacaggatttcgaaagaggctgctgacgagctggaggctctgcgcggagactagaacccttgtaatattctttaaataccattgttaggatcccgttttgtgggaaataaagtgtgaaatcgacttcgcaacatcatcttattcacatttaataatataaaaattacacagtagtcgaataaatacttaagacttagcaaagtcatgtgcgtatcgatttagccccacgcctgattcttgcagtagtagagcaccagtttcccattggttccatggcactcgtacaagttcttgattatctgatccggggcaggtgcaaatgtctgattaacgtacaggaactaaaaattaagatgacacataagatagggttctctggaacttcatttgttacgtgcaatttgctcgctggcatcgagtttcagaaacttgtggatgaacgtctgtatccagccgactgtcttgttgggatctacggtccaggttcgctttttgatgatgggcacattgccagtggcgttcagaaggatacaaactgataatgaagcaagtctttgtgataaaacgaatgcaaaatatataaagttaactttgattctcacttttggaaccatccttatctgcaggtgtggaggaggaagtgctcagcgctgcctgggattctggtgtctctgccatttatttggaatgtaactaaattaaatagttcctaattaatgaattaaaacagccaataatgtaaataaaatataatctgttagagatcagaattttctgaagaaattatcgataggtgtcacgagattagcgattcagctaattatttgagtaaaatatgctgcatatcatctgattttgttttaaggaattatttactcattttcttgtcatattttttatttaaacatatttttatatttgtctatcactttgagactttcaaaattcgttgttaattgttccacctttagcgttaacagcggctatgttattttacattcgactgttattgtaacacgtgtggagtttataaaacaatccagggaaataaacaaaactatgaataataatctttt

SEQ ID NO: 20714 - DNA, 647 bp, DROSOPHILA
ctgctcgcaactttgacacgaccagttccaaaatatcgtgagatttacgcaaaactactagaaaatggtcggttggagccgtttgctgtcgccggcggcgaagttcgccagctaccgggctgtcctgcaagagcccgcgtgccggaatgccctgcaccaacagctgcgcagaatgggaggcgatcatggacaccaccaaatgatcatcaagccatcccgcttccagtgggacaagttcaaggatctgttgcacttttacgtaatgctcggcgtcatcccagtcaccgcattggttctctacgcgaacatctttgtgggacccgcgcagctcgccgagattcccgagggctatgagcccaagcactgggagtacgagaagcaccccatctcgcgctttatttcccgctacattttgaactcggatcagcaaaactacgagaaatccctgcactatctctacgaggagaacgaaaaagcccagattcgactccttgaggacgaagtacgtcgcaagatgtcggagcgcaatgattaccaggcctactactaccgaccatcggtggccaagtaccacaggatttcgaaagaggctgctgacgagctggaggctctgcgcggagactagaacccttgtaatattctttaaa

SEQ ID NO: 20715 - protein, 186 aa, DROSOPHILA
MVGWSRLLSPAAKFASYRAVLQEPACRNALHQQLRRMGGDHGHHQMIIKPSRFQWDKFKDLLHFYVMLGVIPVTALVLYANIFVGPAQLAEIPEGYEPKHWEYEKHPISRFISRYILNSDQQNYEKSLHYLYEENEKAQIRLLEDEVRRKMSERNDYQAYYYRPSVAKYHRISKEAADELEALRGD

SEQ ID NO: 20716 - DNA, 16768 bp, DROSOPHILA
catagttcctgagatctcgaagttcatacggacatggacggaccgatcctggttaagaataaataaatacttgttcactattagttaaatttccaaatatataacttttcggaatcccgaacggttgagtcgttgagttacgcggttgcattacaattctcagaaggcaacaaaatagggtgacggtgttgccagccctaataaagagaaacataatcgtcgagtagaagtgctctcgtttatggatttaagagaatgaagtgcctagttttatactttaatattaaatatttggactttctgcgctaataatacggcagactccgaaaatatgtacaatacgatgcatataaatcgttgttatataaggtcactttccgaaatatattcctataagttattctttataaaaataatatcaaacaacaacacatcttaactttattgtgataaaagatgattttacatttcactacataaaaaaattgagcagtcgtcactacttcaatacaacatatccaatatcaatattttactgcagcgtgtcaaatgtttgtttaaaaaagcgtattaactgtgtcaaatgtaaaattttttttggcacaataatgtacttgaaaacttttatatgcgatctacctgtgttatactttaaacttttgacttgtactcttcaagtatcgtgtgctagaaatataaaatgcagtattataatactgtgtatatctacataagtaggtagcaaacattatattctcggtgacaaaagtgattatggtaataataccaaagctactgttccctttttaattccaattctttattttgaccgactttcatttacttgaaaattcgttgaaaaaaaaaataaagaaaaacttggattttatttaaccattcatagatcgaaatattgtgtaagtgcaattaaataatgttattaataacatgctaggtaacatttgccctctggtattttttccctgctggcaatttggccacactgtcacttatgcttcttcaaattgtagcggcattttcgccaaagcaacgttggaaattcgcgtcaccaatttcatattgcgataaataagagttttatccgaaaacgtatagcttaactgtgtcatcggcctgtagaagagcgctgcctgccgggatacacatatgccatggaattcgacgacgcagaaaatggcctaggaatgggatttggtggtcgcggcgttctgcgggagatcaacaaaaacgatggcggcattaaggtaagttaatagctggacttggaggcgtgctccgtccgcgatgtaccaatgcagccactttcggcagaggcataattcaactcacacgtctacaggtacatatgtgtgtgttcggttatgtactttgtacatatgtgtgggtatgctgcgtcgcaggctgttctgctattttctttattcgcaattgttcatcgtaaatacatatgtacatataaatttccattattcgctgttcctattagctctgaggcagctgtcgcgaacgagagttctctagttgatcggtgtccgccggacattgtccatcccaggtgaccagtttccccgatctgccatagccataggagaatgggcaataagccgggcaagacacggaaaccgagggccttgtccgggaaaattaccataaaggcggacgacggacgagggaatcgggtatgccaagggaaaatcaaaagttacttattcttccttctatatatttgtctcttgaaatttccactctccagatggtgcactttccatttaaaaatgctagtgtgtatcgctattatgccaataaatcagttggcggctaacggctgcaaaatgtcagtgcctaatgcggtttacagtccaaaaaacgcccatctgaggatttaagtttgactaaatgtcatttaactccatcttcccttttgccaacaaaaatgctcattataaaggatctacagatggtttccacccctttccacatttgcctatttttagatcagtttatagttggctcttcctcaatatttgttttcttttattttcctgagttctattggatattcgaattgcagcttaaggttcaaattccacttgtattctattctattgtatttattgtgttttctgaaatcagtatactcatttgtggccactatttggattccactcaaggcttatatgcttcaacaaactacattggttttaaattcaccctgagccgggaaccgtgtgatatcttgtcacctgtcgcgcgctgcttggataacgctagagccaacatctaactattcccccctcgtcaaggcccatcgtgtgggattccgtttcattgcttacattttctcgccaaacatgcaaagtcagccgttgggcaatgtggagcttgcagatagtgcgccatgatgcgcaacaatggctgtgggattgcatgtcatctgggacccaccaggcctctacacttgaaacaatgtgatgagccaaatcaacatatttattattttagagcactctacttgcctctactggtatatctttaagagaaagcattttgcaaataagactgttctccaaaaatcctatggaaaatgtgcaaaataattctgtcatcaaagcgttgaatttgcaccaagttcctccagttgatttgcgaagacaatataagcagtcggcggtcgccgtattctcgtatcccatttatttatccccttctttaagtgtttcgacttatttgcggtgtcttgcactttcactgctgcctttcagtctgaatttcgtctgaggcctgtatagtttttcagtttttcactgcagttcagtcaaaaaggttgtcaacttgagcccgctcttttgacattattattttataaatgttgcccacgacctcgaccgtttccaaaatgtatttcatatatctaagagaagtgtgtttaaatggatcaagtgtgtgttgccctctagcttcataaaacccaatatattttctcgaaatagaaaagggtaactattccaaccatagaaaggataagatttcatcttcagaatcaccagccaagtctatctggccactaagacttatattatttatatgctaataaaatctttgaagggtatatttctcgtagctccaaaagctgagtaatgggtagtcgagaaaaacgactgagttctctgttgttttgatttaattttcattaggaatatttgtgcttaaaagttcagagtataacttatcggaactatttcaagactaaggatgtgctaaataaatgttttaagttggtatgaaatccataatgtgtaatatacaaaggtgtctctagccgccgtctcacatgtgaaaacatatggcagtattataaatggaagagaggaccgtgctgataaggggagaacgccatgtgggctaaaacgatccaaacatgaagacatacgaaaacatccggatcgttatgtggatgccattcaaactattcgttctctcactcggtctgtcgatcccccgcactctcgccgtgctctaagtatttgtgcatgtgtgacgctgagcagagcaaagcaaattgaaaacgaaaatatttttaaattgattttaaaggcagacatgatcgggaggcagtgagaaccgcacgcgacaacgggccgtgagaaacccggaggtattacccaatataatggaagcggaaaatcacagtaaagattttaccgagtaggcgagcccaaatctgtgtcacaacaaaaaccacaaaaaaaaaaaaaaaaaaaaaacactaaagaccaaactaaggaactctatagatccattattttttggagccaagtgaaccgtatcgcgtctcaggagttaatcgtgcgtagagcggcatggatttcctcgcgaatatcatcaaaagacccaaaagcatcgccaccactggcatcagcaccaatcagccaacgacaatggaagccctagaagctgctagtcccgctgatgaatgttctacaccaagggataagggaggagttacacttgtatccgcgcacctggactcgttactagagtccgcctctgaggagctgcaacgactggagggaaagcactgtgaactatttatggaatccatctcgaacccactcccagcccccgaggacagcactgatagtagagaagaaatacagaaatttctaagcgaaataaacttcaatctgaaccaagtgagtgctaacgaaatggagcacttgcaagccatgagtggcgaggtatgtctgaaagaattaggactatctttttatgtgcatccctgggggggggggggggggtgttctagtattaggcaaactgcataaatctacacattggaatttttttgtaatgtcccaatgtgttttgccgattgcatatatagtatttatgcggttccacttggttttgtcaccttattgcgttgcagaaaatattattttaaatagggttgtatctagccattagcttgggctaatattccgcaggaatctgcttcccattaccactcaaatttgagcccattgtcaaaaaattaaaattaaaatacttatcaataaaatcgaaacggagaaattggtctaatgccagaattttcctaatttttagtgtctcgctcataagccggtcaccactcgccttattcttctgactttaaccttgcagcacccattatactgcaatgcgctctaattaaattccgcgtgtagaacgatgctcccaaacctaaatagacattaaacatggcggccggccgcattgaatccgcggcatgtttatttcgcactgcacaaaagctgacgtcgacccagttccacgtccatctccccaccttttgctcctcaatccgtttcgttgccaccctcccaaacatatgccatatacccgatttttacgtcttggctggctttttaattaatgacatttgcttttgttgactgaccgactgcgacaaacatttgaaatgtatgtcttttttaagcgtgaattgaaggcatctgtatcatatgggctacattagatgagattgaagtttttcaaatgaagatcataatttcataataatgtattcttttgtatatgataataactaaaaatgggggtcctatgcctttgtataatttcttggcaatgggaaaatacgggaaaagtcatcccaaatgcgatttatttatgccaactgtggtggggctcttgcctttttgtgtgtcaaaaattcttaattaaatgaccaaccagctgctactcgtgatcatctttaaaaccccattcccaacatcggttgttcacggtttaaaactattcggatcatgaccgcgatgtacatcttgataactatattcttaaattttgcatctcttgtttggcagctgagtccgttggcggtgaagcccagtcccaagccaacgagcatggatcaacagaaggcaatggcggcagctctggggcatcagacggcggtacccggtggacttaagccagaagacgacctcgttccaaagtttggaggtcttcccgagttcgatgagacgcaaataccggaactagctcctttaagtaccgatatggatagtgagtaaatcttgtttgtgtaacccagaaatctcttaaggtagaaaaattatattgatgtacaaaagaattccatacgaaatccgccagaagagcgaagtaatttcttctatttcaataccgtcatttatacaaaggaaagggccagctggggaaaataaatcatttccaagtttatgtataaatttctcgttgtattaattatataaataaatttcttatatgtatttaattattattaaaacgaattgattaatatatcgcattcattcctcccttagctcaactgaaatccaaccattcggattcggatgtttttgtcgagtgtttatcgcttcatagcgagcgctacaccggagatcgatcggagttagaggcatattcaagtgcccttaatgatgttttggagcagcagctgtccatgacctcagtttctacactgggagctgaattcaacgatcctttggcagttagccagcacaacaacgtcagctatgaagccatggatgtggatgacctaaacgaaaccatggaaatgttaaaggacgtcttgaatgcggaagaccgtcatcttatgcaaacgcatattctcagcgtaacccagtcaaaaccagagaataattttgtgcactatcatccaaatcaggagcaaaatagggttgaactagaccagttagccaaacactctaaacccaatagtgatgcaaaggaatcagaatcattggtagaatcagtactgtctgaggagtctggtacacaatcctttgagccgaagctcaccttatctgccttggactctacgaaagacttagctaagcatcaagaggaaatgcaaacaaatacaaaagatatatttcagaaagagaagcaccacccggtcagtagtgctcaggtgaaggacgcacaaaatcctaaggagcctgaaaaggccttaaatctcaaagaggcttcttcagaactgtccacaaaatcagcaaaatctctagaataccctaatcaagagaagcaattttcggtggcagtagaatcaatggagagaccatgcactgccatcagccttgagcaaaatgcatccccagctatggaggcaactgaagacaggactgtggaggagcttgatcaaatggatgtggatgaatccatgaaagtggatgatgccacagtgcttaactcatgtcggcaggagcaaattaatgctcattctcccgtttcaagcaaatttttcttaaaactctgcgttcaaaatgatacggattgtcaagataataaaatggatcaaaaaactgcaggaaaagaaagtgcattaaagatgactgaaatagagctgcctgtagaatctgtcccatcagcttcgctctcaccgccgacacccgcacttcaagcaaaaattatcgaactttccctttccccgcccatacctacacatcgcccaaaaacagcggaggaactagagttcctggctttgagggagctgcctttgcctgatggtgtctcgacggcggggaaggtggaatgtaagcagctatcacacggcctggtacccattgtggcagtcttaccaacgccactttacttggatctgaaagggaatacaaccactgcaagccttccagaaccgacttcgcccagtttccccatcaaagaacctgctgaaaaacagtcccactttccacgctcaccgcgtgctcagctcgagcaaaaggacatgccctatttggaagaggctgtggtagaacgttcatcacatcgcaagcaaagcgatttcggagtcatagcgaaatcaccaatagtctttgagttaacacaaccgagtcctgagaagcagcacctcaacgaaaccttgccaatgagcgagatttctcccacttcgtcaaatatgacctttgacagcggaagcattacggaggacaaatcacagaagggtacagagaatattgagccttcttccacccttgccgtaagtctgggatcggttgatgataagcagcggcgcactttctcggtggttcagcccacgaaggaagaggaggaggccaaatcgcgtcggactttctgtatggaaaatgagaaccctcgacgcaccttctgcatgcagcagaatgcttctccagcggtggaggctaccgaagacaccggggctgatgaagttatggatgtggatatctccatgagggcagatgaagtagccgtgatgaagtcgcatcagcaaacttggaaggaacgccaagcaccaatttcaaattcaccaccaattcctactcaccaacgtttaaatagacctcctgaggcgatttctccagtgtccccattgggaaatggcaccgttgtgttggaggagcaaactctctctgctaaagagcaagccacgctaagtgccagcgatgagaaggacgatgttttcttggagcactttggtgcaatttccccagtttcggatgacatgtttaaaaccagcagcgcttccaacaatcaagcaaagtttagggtcaatgctgatgaagaaaccggaggcaaaggcgcttctgcgatgatcaggaagagaagtggtacagctggcgagcaggaagagatctttgatgccgaattccatgatggcgtcaacaaccaaaaccgtaagtcaatgaccgcttatatcgtttgtaaggaatgttcatttacattttattacattcaaaagttgttatttaatcttttaaagccgtgcagtttttattcatatatatttggttgtcaatgtcaaaagaagtgcccttttacagtacagtattttgtagttgattcttccggcagttaataaatgtacaagtttatacccttgtagagcatccattttgcagttataagttctgtttgaaggaattagtctaataattttaaataacttagttgtattgctattcgaaaaaaaaacattgccaaaagtctactttcttttgcacagtagcgttgttttttttttcataatgttttgttatttggaataaccgattttttgtctacccaatttatcgatttgccaaaagaatatcgaaatttctccccttagacctgaaaatcagtcccacaattttgaaaatgctttgattttatttgtttactgatatttgtcgaacgaatattaaactgtatcccttgctgattagagggtatcagatagtctatactgttctcgagtttttaacggcttatgggcgtgccaacctttcgctacgtcggcgtccctggaatatgcttaactttctttaacttttctttaacttaactttctagcttttatagttcctgcatagacgtaatcgcttctttctacttcgagtctagtatacccttttttcggcgaataggggctataaaaataaaccaatgaggcacacatgtaaggcaatgaacctgaacttcgatttgtgaaagaaaaaaaccttggggtttcggtgttaatgtaagagcgaaaggaacaaacaaaaggggttaactatgcaatgcagttggtataatttttttttttgtttttaatggctgttggtggattttagaaactgatttgttgttttttttttgtctggaagttttgttcccatttcctgtttttcttttgtttttgctgcacatgcattttatgctgctctttcttaaaaaaaaaaaaacggagtgcgctctctctttcaatttcgccgctcaccgccattggtattttcttttttctcttgacatctctcttatttctgcagctatctatgcctcccctgacgcacatatctgcaagagcggaatgtaagaacttctttaaatgtgacgtcactttctctaattgaagaactagtgccagtttattatcgtctttaatcagctcaaaaatccagacatacatatgtatctgtgtctgtgtgcgttaatatttttggtcaatcaccagagctagcgtatatttccatcatttttcttagtaaaatgttttcggataagtttacaatttcaaatggttaaaacaacggcgcctaaaatatttatcggtatcgctgacaaggaaaactatcttccaagctaaaacaaccccgcacatgagcaacagcttaggtgagagactttctgtctcgctctcctcattcatagaaactgcagcacagcgctgtgttaactcgctaaataaactttgtgtttgaaagacaattatgaattcaaatacaaaattaaaaaaaaaaattccaaggattttgcttccatgaccgctagatctacatattttttgggattttatattaatagtaagtgtttagagaatgttagtgaatcttcgaatgtttcgtaagcaaaatgtctgatgattccatgaactatttttaattgctcttattcttcgattggtgtatcgcatactctcctgatgtgcttcgtcagtacgtgcgcttaaaactttcacgcctacatttaaaaaaatttttatttcatgttgtcatatgtctgcaatttctatcgacaagtaaataaagacgttctctatgttttaatgtgaaaactttaagcagttggatcagaatttaaaacattatattttcaaagaaacaattggtttttagtatcgacgtcttactgttatctgctatctcgaaccgctcactgaagaactctccgggccccacagccctccgtcccaaaacgttgcagtagagagaaaaagacattcagtgggtggcagttcgatgcatggtgaagggtagagggtatgagcacaactccaaaccgacaacgtgtacacagcactctctccctcgcacctattctctctgcgcacttgctgactgctgaatactgacccacactccagtcagaattcagactcgttcgttcgctcgcgtgcgtgcgctggttttcgtattggactcgcggagagaaatgtaagcaataagaaattccatttcagttagtttccaacatctgacgtcgctttatccatcggtaccgtactgctgttaaatcttgtcattgccaggctgttaaatcgaaaatgaatcattaaaaagcgtagaaccacaattttgtttgtttacaaaggcttgcaaggttctattttgataattgtccacaagaatgactagaaatcggaaatgtaatcagcagctgggctgcagaaaaacaacaaataggcataaataaagccaaaagacaggtctccaaatcgctaagaaaaaaatagtatgtgagagtgagagcatgaaacttcattgtgcgattttctaagcgtattcgtgtacgattgtacataaatgtacgtgtgggtgtttttcttgtactgtgtagtcaccgttaacataattatgtgaaaactgtgtagaatcttaaaagtgcacaccttgtcagagacaggcaattaaaatgcagcgcagtgaagaaccgctctttctctcttcgctctttcgctctctgcgtttccgcttctgctctccttcactcaacccactttcggaaaccattgtcgattgcataaaatgactcacaagtcatcggttgcctttgttttgttttggtccggtgttttcaaaactgagaaatatacaaaacccgagccccaattcggcctatatggtgacctgaacattatatctggggctgcccggggttcttactatatttaaagccaagtgccaaagtgttcaccaatcccatttccaaatgcactgagaaaaagggtcccttttatgttcttgactgttttaattgagatttaatgtgacttaagtgaaatcagttaatttccaagttaagttaatttgttggctctaagaaagcttaaggcttaacttcaggaagttaaagaaaagtaaatctttagataaaggacttttcaaatctgttagtaaattaaaattttttcgaggctactgttaaagtaaatatgccgcttccatgcaaaaccgacaaacctaaatttcgtgcccctcagagtctgggtttagtgtttttggggggttgaatgggggcggatacttgagtcattttgagtcttattttggctttgccatcgttctcccttttgttttttcaaagtgttagaaagaaattattttcgaaagacaattttattaaaggatgtagaggtcgaagtgtacaatttttttgtgcaagtgtatggataagcagtgaaaagcctcatgaatggttcatgcattgattttataaaaaaattcaacattaacctatcgcctgaatcatgattatacttgattcattattataaaaaagctccgagtagtatatatcattgatcaaaactgatactgaattaaggcaaataatctctattaatgactgtagaacaattctattgaagaaatagaaacgatatcagtttaattgtgtttaattgtgaattggatgatgacttcacggccgagaattctcaaagcaagttatacccaatcccttgtatcatttagcttagtttctacgttttagggggcatttctccacctgcttttcttgtattttttttggcataatcaaattaaataaaatttaaatcaatcaatcaaaaaaaaaacaaaaaaaaagccgacaaataagtgactaactactaaatgttttatattttttcttcttttctcatcaaacccatacaccaaatgcacgcgcatgtactcatctaaacattaccataaacaccaacaaaaaccgaacacctaccacagtaatactaaattcatcagattttgattatttgtacacgaaaggcagcaatagtgtgcctattgaccgcagttcgctgctgttgaagtttgatcccctccttggagcccctgttcccgttaatcatccgaatcagcaggagcaggcgctgcagaatattctgggatcgaaccagcaccagaaccggctccttagcccaacattggaggagcacgaaacaagtgacgggaaccagtcttttggagtaatatcgagtgccaaagatacagccaagaaatgggattttaagccacctgtggatagaacaaaagtaagctatcagtgaattcttcaggcacaaaatcaatgcggcgttttatattaatgcaattattacgactaataattacgatgtatttttatagaagcatgttaaaatgagtgtggacgtcattgataacgattgcaataaaaccttcgataattccaagttagtaaaaggtgaatcagcattctctgtgccatgttactaatgcgatctttacatttagcactaatacggaggataagacgcacaactacaacgatatggatgagctggagaagaaaatcaaaaatgaagtgtaaataggcctcaatgacaattaatgccaactaatagtgtgtttcattctagaacgaggtccgaagacattgaaaagaagctcaaggagggagagctgcgcgaggaggctctgatcaagcgtattacagaaaaggacaaaacaaatgcaaaactaaagtaagccctccctgattttagtttttactactagagtagtatttagtttctgtaacctggatcagtaccactagttgatcgctgatgtgaccggttttattagcaaggaaactctgtattataaatctttatggtatagcttgtaagctataacaagtagaaagaaggagagctttaattttttacttaatataatttaattttaaacttaagtttattttatttgctaatataggaaagacctggttactatttaaacaggtgtaataacaacagatgctataatttggtgattttttaaatgttaacatagcaaacgaacattccatagttaaggcacactatacatggcggtccttccttgtgtaattatatctgtatctgtaatattacagattttatagtaaacaagagagaatgctgtagtcgagttccccgactatcagatacccggtattcggctagtataaatgcgaactcgaaatttcataatttttctgggatatcgatagatattggggaataaaattatagaaaaaagtaaagtttgttcaaaagtgagggcggctttagggcgttagaggggacgtggcaaaccatttttttcattgcaaaccgatagaaatttacaagactaataaaattataaaaaatttgaaaaatggttcaaaagcatgtgcgtggcagttttgtgcggtttgtgagcgtaagagtgtacgtggaaaaatttggatgagtctttgtctctagaatctgtatgatgaatctcaaccttctagctttaatagttcctgagatctcgacgttcatacagacagacggacatggctagatcgactcggctattgatcctgatcaagaatagaaattcattatatagttcttctagtatacccttttactctacgagtaacgggtataataatccggcattttcggtgctgttaaatattttgttcacttaaggaaagcattaagggcatttctttaaaagattacacgatcaattacgataggtgtaatttcgcgatggtgtaataaacatttttgtgtaatttgattttttaccgtcagagaatttaatactgggttttgatgttaattttgtatttttttctatcttaatttttgcatacaaataacaggtcttcaggaacttcgcataattagcatcatacagagctttattaatattgtaaaacccatttctcctttccagcggtgtcattgaggcatatgagaaggcaattgcagagctcattagtgagaaggagcagcaagcacagcttcacgaacggcagttgcaggaagtccaggcagaccgggacgcaaattaccatcacttaacatcgttggagacgacattttccgatctgcatgtgtaagatatatcttcagatatactgaacatactaactaaaactggtttggatatccaacttactgtgatggtgttgtgttgtaggaaatacgagaaaagcaaagagatgacctcgcagcttaaaagtaacgaggaatcgcttctggcagagcgaaagcagatgatggacaatctgcggttgcaggaacagcgctacgacaagatgaagaaccatgccatgcagcagctggaaatgtgagcgattgatttctaattaaggtgtctgtctaactgacaactattttccctgtcctagtgccaacaaaaagctggacacctactcgagggagcatgccgacgagacgaaaaaacttaaagctttacttaagaaggaggagatctcgcgggtctcgatgacggagcagctgcaacagaagtcccgcgaaaacgctgatctgctcaagatctgcgaagagctcatctatggcaagggacaaggtggtagtagttaaactcatctcgcggattgtccggaatgtaatttatatgttgctgtaaaatcgcactcaccctcatcacaacactcatttggcatatggagcctttccagaaagcagcatgtccgtagatctgtaactgcgctaccatcgtcgtcatctccatttctgtaatggtttaataaccgctcggctgcgtgctctttactgattaagaaaatgcttatgcacaactgtatcatttaccaaattcacttgtgtgttgaatttcaagatttacacctaacgttccgacacatatactttttctagatttttagttgacccgaaaacactcacttacacaaatcacaggcagatcaattgagtttgagttcctctcgccttacgggtctggttgcccgtcatatgttactaattctctatcgtatcaaacctgatttatgttctatgatattacttggcggcgatctgcgccggaaaactgtggtttagcaatcggcgagagaagcaaaataatagtgtgcagcggatgctaaagcagcggacaattgcaaattgtaagaaacagcgttcgcttgaggcgcgcttttataaaatgtttaagtttacacttagtttatttaattgaaaatttgtaatagttgtactaaaaatatctctgtatcacatactagtactaaaacatagaagcgtaaaaaacagaaaaagagatcattttaaatacacgaaaaaattaatttatgcataatacaacatattcgtttgctttgttcaacttgtaattattagtttgcgcattatagtgaaaggttgccttaagtagcaaaaacaaaaagtttacaaacaaataaataagaccaaagcgctatgaccccacatggtttatgagttgtgttttagattattcgacaaaatcattacttttaaagtttacattctaagaaagtctgtaaactacactacttttaaaaaattggcaaaatttctgtttaaatatgggcttttttcatatagtaagaacacaaccccagtgaactcgtacagaagtcttaataaattgtacttccaagtaagaaaataattgtaatgtaagaaaaacataaacttgcttatcacgaagtggaaatcgaagaaaacaaattagaattgtatacaaatttgtacccagtccatgtaatttgagaaacgctacttcataatatataacatcatacatatatttttctaaagtagaaacacccagaaacacttgcgctcttagggaaagttttcgacgagagaacggaataactgttgtagtttgacatttgaaaaagaatggattatatatcaaagcgctgtaaaaacacaaatagtattacaacatcccagcacatatgaactacgatgtgctgagcatgtgacgtgacgtatgtgtacgacgtaaaggtgattgattgagatgcattcagtaaataaactatttcattgcaataaaaccgaagtaaagtaaagtctgctgctttatttagggccgtttaagttttgccagcttctaagcaaatttccagtgcttttgggaatgaaaattgatggtctttggaaagaaaactgagagtgtttggtgaaaattttaaatgtatgttgttcaattgtggactttgttgcgaagcctgcaaagcctttatcatcgatttgcacgtggcaaagttcaactttcaaatgcaaaatttatatagtttctctttatttagggcttataaatgtttgctgttatatacatacatatacatacgtatatatttatatatattgtctttttgcgcgatttcttgagtgtgtcgaagaaaatatcttctcattgggttggatcgggtgcatttagaaaaagttagt

SEQ ID NO: 20717 - DNA, 4608 bp, DROSOPHILA
acactgtcacttatgcttcttcaaattgtagcggcattttcgccaaagcaacgttggaaattcgcgtcaccaatttcatattgcgataaataagagttttatccgaaaacgtatagcttaactgtgtcatcggcctgtagaagagcgctgcctgccgggatacacatatgccatggaattcgacgacgcagaaaatggcctaggaatgggatttggtggtcgcggcgttctgcgggagatcaacaaaaacgatggcggcattaagctgagtccgttggcggtgaagcccagtcccaagccaacgagcatggatcaacagaaggcaatggcggcagctctggggcatcagacggcggtacccggtggacttaagccagaagacgacctcgttccaaagtttggaggtcttcccgagttcgatgagacgcaaataccggaactagctcctttaagtaccgatatggatactcaactgaaatccaaccattcggattcggatgtttttgtcgagtgtttatcgcttcatagcgagcgctacaccggagatcgatcggagttagaggcatattcaagtgcccttaatgatgttttggagcagcagctgtccatgacctcagtttctacactgggagctgaattcaacgatcctttggcagttagccagcacaacaacgtcagctatgaagccatggatgtggatgacctaaacgaaaccatggaaatgttaaaggacgtcttgaatgcggaagaccgtcatcttatgcaaacgcatattctcagcgtaacccagtcaaaaccagagaataattttgtgcactatcatccaaatcaggagcaaaatagggttgaactagaccagttagccaaacactctaaacccaatagtgatgcaaaggaatcagaatcattggtagaatcagtactgtctgaggagtctggtacacaatcctttgagccgaagctcaccttatctgccttggactctacgaaagacttagctaagcatcaagaggaaatgcaaacaaatacaaaagatatatttcagaaagagaagcaccacccggtcagtagtgctcaggtgaaggacgcacaaaatcctaaggagcctgaaaaggccttaaatctcaaagaggcttcttcagaactgtccacaaaatcagcaaaatctctagaataccctaatcaagagaagcaattttcggtggcagtagaatcaatggagagaccatgcactgccatcagccttgagcaaaatgcatccccagctatggaggcaactgaagacaggactgtggaggagcttgatcaaatggatgtggatgaatccatgaaagtggatgatgccacagtgcttaactcatgtcggcaggagcaaattaatgctcattctcccgtttcaagcaaatttttcttaaaactctgcgttcaaaatgatacggattgtcaagataataaaatggatcaaaaaactgcaggaaaagaaagtgcattaaagatgactgaaatagagctgcctgtagaatctgtcccatcagcttcgctctcaccgccgacacccgcacttcaagcaaaaattatcgaactttccctttccccgcccatacctacacatcgcccaaaaacagcggaggaactagagttcctggctttgagggagctgcctttgcctgatggtgtctcgacggcggggaaggtggaatgtaagcagctatcacacggcctggtacccattgtggcagtcttaccaacgccactttacttggatctgaaagggaatacaaccactgcaagccttccagaaccgacttcgcccagtttccccatcaaagaacctgctgaaaaacagtcccactttccacgctcaccgcgtgctcagctcgagcaaaaggacatgccctatttggaagaggctgtggtagaacgttcatcacatcgcaagcaaagcgatttcggagtcatagcgaaatcaccaatagtctttgagttaacacaaccgagtcctgagaagcagcacctcaacgaaaccttgccaatgagcgagatttctcccacttcgtcaaatatgacctttgacagcggaagcattacggaggacaaatcacagaagggtacagagaatattgagccttcttccacccttgccgtaagtctgggatcggttgatgataagcagcggcgcactttctcggtggaggctaccgaagacaccggggctgatgaagttatggatgtggatatctccatgagggcagatgaagtagccgtgatgaagtcgcatcagcaaacttggaaggaacgccaagcaccaatttcaaattcaccaccaattcctactcaccaacgtttaaatagacctcctgaggcgatttctccagtgtccccattgggaaatggcaccgttgtgttggaggagcaaactctctctgctaaagagcaagccacgctaagtgccagcgatgagaaggacgatgttttcttggagcactttggtgcaatttccccagtttcggatgacatgtttaaaaccagcagcgcttccaacaatcaagcaaagtttagggtcaatgctgatgaagaaaccggaggcaaaggcgcttctgcgatgatcaggaagagaagtggtacagctggcgagcaggaagagatctttgatgccgaattccatgatggcgtcaacaaccaaaacctaatactaaattcatcagattttgattatttgtacacgaaaggcagcaatagtgtgcctattgaccgcagttcgctgctgttgaagtttgatcccctccttggagcccctgttcccgttaatcatccgaatcagcaggagcaggcgctgcagaatattctgggatcgaaccagcaccagaaccggctccttagcccaacattggaggagcacgaaacaagtgacgggaaccagtcttttggagtaatatcgagtgccaaagatacagccaagaaatgggattttaagccacctgtggatagaacaaaaaagcatgttaaaatgagtgtggacgtcattgataacgattgcaataaaaccttcgataattccaacactaatacggaggataagacgcacaactacaacgatatggatgagctggagaagaaaatcaaaaatgaagtaacgaggtccgaagacattgaaaagaagctcaaggagggagagctgcgcgaggaggctctgatcaagcgtattacagaaaaggacaaaacaaatgcaaaactaaacggtgtcattgaggcatatgagaaggcaattgcagagctcattagtgagaaggagcagcaagcacagcttcacgaacggcagttgcaggaagtccaggcagaccgggacgcaaattaccatcacttaacatcgttggagacgacattttccgatctgcatgtgaaatacgagaaaagcaaagagatgacctcgcagcttaaaagtaacgaggaatcgcttctggcagagcgaaagcagatgatggacaatctgcggttgcaggaacagcgctacgacaagatgaagaaccatgccatgcagcagctggaaattgccaacaaaaagctggacacctactcgagggagcatgccgacgagacgaaaaaacttaaagctttacttaagaaggaggagatctcgcgggtctcgatgacggagcagctgcaacagaagtcccgcgaaaacgctgatctgctcaagatctgcgaagagctcatctatggcaagggacaaggtggtagtagttaaactcatctcgcggattgtccggaatgtaatttatatgttgctgtaaaatcgcactcaccctcatcacaacactcatttggcatatggagcctttccagaaagcagcatgtccgtagatctgtaactgcgctaccatcgtcgtcatctccatttctgtaatggtttaataaccgctcggctgcgtgctctttactgattaagaaaatgcttatgcacaactgtatcatttaccaaattcacttgtgtgttgaatttcaagatttacacctaacgttccgacacatatactttttctagatttttagttgacccgaaaacactcacttacacaaatcacaggcagatcaattgagtttgagttcctctcgccttacgggtctggttgcccgtcatatgttactaattctctatcgtatcaaacctgatttatgttctatgatattacttggcggcgatctgcgccggaaaactgtggtttagcaatcggcgagagaagcaaaataatagtgtgcagcggatgctaaagcagcggacaattgcaaattgtaagaaacagcgttcgcttgaggcgcgcttttataaaatgtttaagtttacacttagtttatttaattgaaaatttgtaatagttgtactaaaaatatctctgtatcacatactagtactaaaacatagaagcgtaaaaaacagaaaaagagatcattttaaatacacgaaaaaattaatttatgcataatacaacatattcgtttgctttgttcaacttgtaattattagtttgcgcattatagtgaaaggttgccttaagtagcaaaaacaaaaagtttacaaacaaataaataagaccaaagcgctatgacccc

SEQ ID NO: 20718 - protein, 1190 aa, DROSOPHILA
MEFDDAENGLGMGFGGRGVLREINKNDGGIKLSPLAVKPSPKPTSMDQQKAMAAALGHQTAVPGGLKPEDDLVPKFGGLPEFDETQIPELAPLSTDMDTQLKSNHSDSDVFVECLSLHSERYTGDRSELEAYSSALNDVLEQQLSMTSVSTLGAEFNDPLAVSQHNNVSYEAMDVDDLNETMEMLKDVLNAEDRHLMQTHILSVTQSKPENNFVHYHPNQEQNRVELDQLAKHSKPNSDAKESESLVESVLSEESGTQSFEPKLTLSALDSTKDLAKHQEEMQTNTKDIFQKEKHHPVSSAQVKDAQNPKEPEKALNLKEASSELSTKSAKSLEYPNQEKQFSVAVESMERPCTAISLEQNASPAMEATEDRTVEELDQMDVDESMKVDDATVLNSCRQEQINAHSPVSSKFFLKLCVQNDTDCQDNKMDQKTAGKESALKMTEIELPVESVPSASLSPPTPALQAKIIELSLSPPIPTHRPKTAEELEFLALRELPLPDGVSTAGKVECKQLSHGLVPIVAVLPTPLYLDLKGNTTTASLPEPTSPSFPIKEPAEKQSHFPRSPRAQLEQKDMPYLEEAVVERSSHRKQSDFGVIAKSPIVFELTQPSPEKQHLNETLPMSEISPTSSNMTFDSGSITEDKSQKGTENIEPSSTLAVSLGSVDDKQRRTFSVEATEDTGADEVMDVDISMRADEVAVMKSHQQTWKERQAPISNSPPIPTHQRLNRPPEAISPVSPLGNGTVVLEEQTLSAKEQATLSASDEKDDVFLEHFGAISPVSDDMFKTSSASNNQAKFRVNADEETGGKGASAMIRKRSGTAGEQEEIFDAEFHDGVNNQNLILNSSDFDYLYTKGSNSVPIDRSSLLLKFDPLLGAPVPVNHPNQQEQALQNILGSNQHQNRLLSPTLEEHETSDGNQSFGVISSAKDTAKKWDFKPPVDRTKKHVKMSVDVIDNDCNKTFDNSNTNTEDKTHNYNDMDELEKKIKNEVTRSEDIEKKLKEGELREEALIKRITEKDKTNAKLNGVIEAYEKAIAELISEKEQQAQLHERQLQEVQADRDANYHHLTSLETTFSDLHVKYEKSKEMTSQLKSNEESLLAERKQMMDNLRLQEQRYDKMKNHAMQQLEIANKKLDTYSREHADETKKLKALLKKEEISRVSMTEQLQQKSRENADLLKICEELIYGKGQGGSS

SEQ ID NO: 20719 - DNA, 3336 bp, DROSOPHILA
tgtgatgaaatgctagacccgaatgatttgaaaacttaaagtccacgcaaccacaaatatttcctgaaactactatagaaaataaatgcattaccaaaacggcataataacagtatagcgcactcactctaattagatttcaaattcccgattaaaaaaaaaaataaaacactaatgttatcaataccctttcctgattctgttcaactaaataggaaaatcaatacttgcaatcaataagcgttttactacatactttaatatcaaaaatatctgaatgaactttattataaaattataattgttatacttaattattgtcaaaactttagtattaaaactgtaactacctcttaagtagatgagaagagtagaagagggaattaagatctatcaacgtagtatctgctaaagacgtaaagatgcggcaactatttctgcgcctgggtactgaaacgacgaactgaataatatctgccatcagacgccaaccagagtgcgttcaacacatacgttttgatggtcaactagttcaaccaacatcagcatcatcgtcgtcaacaagtcgacggttacaataaagattttttccaagttcgctacgatcatctccagaaccttgttgcgaacccatgacatggagaatcagcagcatttacgaacttctcggatcatccagacacgcagagctgccttcccttcgatggtttaacgcagtaccaggttggcagtatgggaacttagtgcacaaccaatgttacccgtaagatccgctttcaaatagatttgccaattgtaaaaagtctgtggacagccttcgtcttagaaggggaggagttaacacaatcacaaaacacccgaaatatagtcgtaagcctcaagtgcttttcccatctatagatcgagctttacctataagaaactgtaacttgttaagctttagagataagaactcttgctatacttaagtcagtcgattttggaagattagaagcgtcggtcatcgccacgtacttactattcgtctcattaagtgcagaccgcgcaagccctattgtaattaataaacttacgctaataaatatatggaaaatctactaaaatgataatttatacatatattctggatcaggctcaatagccttgtcgcttctgtcatgtccgtccgtccgcatgaacgtcgagaactatatataacttgtatatataaaagaagctagaatgttgagattcaccatgcagattctaaagacatagacgcagagcaattttgttcacccatgttgcaacggccacaacggccgcccaaaactacctcgcccaaactcccagctcccaaaagctgacacgtccaaaattttaaaatatatgagatatttttgtattttgttaatttgtatcgctaagtcaacaaaatgttaaattaataaggctacattttattagctaggtgtatctgatagtccaaaaagtcgactgttacgttctggttgtttcatatcaatgggatcgtccgcaataacaattcccctttctaaaacattaggcttgcacggctgcagcactcccatctacacactgcttaagccgagccataagaaaagggcagcaattccttgttaaaagaatgctgcgtcgtcgcccgagcctaatggaatatccggcttccaacggattcctgccacttgccaatgccattattcagggcgagatgtgcatcattgacttgctgctctcggccggttgcagcgtccacattggagatccgggaagcggccggaccccgctgcacgttggtgaccgcactagtctaaattgccagttattaacgagttttaaacctcacagctggctttttactacggtcacctgccgtccgctcgcattctgctgaacaagaaggcccgcctggaggcgacggacagtaacggcatgactcccgcccactgcgccgttgatgccaatcaactggaaatagtcaagttcgctctcgaagcgggagcgaatgctgaggccagagacgtctgcggctggacccttcttatgcgcgcaggtaggactagaaggactgaaactgcttaaatcgaatttaaattcgcaccttgcttgcagtggttatgaacgctagcatggagctcatcaaagtccttgttacgcacggcgcagacttggcggctttggatggtgttggcaaaacttgcactgacttggcgaaactttatcacagacaggaggcaaaggattactttgacgaggtgcaaaagtttaggctggagaaatcagtcgcgaccgcagacgcagtgactgcaataacgaggtacaccaaagaagtttgaggaacagtggtggatttcaaagaagaaaaggactctggcacggttcatgattaaagcccacgtgactaagtcatccaataacgacattaatcttaaggtgtatttagtatttcgcttgaaaccccacaatggcctacagttttaccaacaaagcctgcagatcgctgtaaattaaatttttactaaaggtatcaaaagactaaggtcgctatgaatcgttgaaaatatccaaaatggccagagtttggatcaatgaaattcgtttagtgtaaattgaataataccatttactcgtagagtacaagtgtacactagattcattgcaatataaactccgagatctcggattcatctttgttttaagttttatatccatttttataatttgaatacaaagtctagtgtaagacagttatacccgtttctcgtagagtaaaagggtatactagattcgtttaaaagtattttatagatagaaggaaattttttccgaccataaaaagtatattaattcttgatcaggatcaatagccgagtcgatctggcctggtccgtctgtctgtccgtctgtgtgaacgtcgagatctctggtactataaggttgagattaagcatacagattcttaagacatagaggcagcgcaagtttgttgacccatattttgaaaaatgttttgatatgtttttataattttattagacttgtaaatttctatcgatttgccaaaaaaatttgccacgcccactctaacgccctaaaaccgcccaaaactgccacgcccacactattgcaaaatgtttacatttttttcataattttataagtcttgtaatattctatcggttagccaaacaatttttttcacgtccactctaacgaccttaagcttccaaaccggtcacgcccacacttttaagccatttttaatttgtttttcattttattccccatctatcgatatcccagaaaaattatgaaatttcgcgttcgcattcgcac

SEQ ID NO: 20720 - DNA, 731 bp, DROSOPHILA
tcatcgccacgtacttactattcgtctcattaagtgcagaccgcgcaagccctattgcttgcacggctgcagcactcccatctacacactgcttaagccgagccataagaaaagggcagcaattccttgttaaaagaatgctgcgtcgtcgcccgagcctaatggaatatccggcttccaacggattcctgccacttgccaatgccattattcagggcgagatgtgcatcattgacttgctgctctcggccggttgcagcgtccacattggagatccgggaagcggccggaccccgctgcacctggctttttactacggtcacctgccgtccgctcgcattctgctgaacaagaaggcccgcctggaggcgacggacagtaacggcatgactcccgcccactgcgccgttgatgccaatcaactggaaatagtcaagttcgctctcgaagcgggagcgaatgctgaggccagagacgtctgcggctggacccttcttatgcgcgcagtggttatgaacgctagcatggagctcatcaaagtccttgttacgcacggcgcagacttggcggctttggatggtgttggcaaaacttgcactgacttggcgaaactttatcacagacaggaggcaaaggattactttgacgaggtgcaaaagtttaggctggagaaatcagtcgcgaccgcagacgcagtgactgcaataacgaggtacaccaaagaagtttga

SEQ ID NO: 20721 - protein, 197 aa, DROSOPHILA
MLRRRPSLMEYPASNGFLPLANAIIQGEMCIIDLLLSAGCSVHIGDPGSGRTPLHLAFYYGHLPSARILLNKKARLEATDSNGMTPAHCAVDANQLEIVKFALEAGANAEARDVCGWTLLMRAVVMNASMELIKVLVTHGADLAALDGVGKTCTDLAKLYHRQEAKDYFDEVQKFRLEKSVATADAVTAITRYTKEV

SEQ ID NO: 20722 - DNA, 3167 bp, DROSOPHILA
cgtgagcgggtgcagccgatgacgaggcagagcgggctgccggtccctctccagctgttgttgttggaggtagcggggcttctgtcggagccaatagagcgggagagcaggagcgcgctctttcttgatttgttggtagaagaaggtttcctgggctatgggttattgaccgctcgatgtctgcgtttgggattgtcggtgagacgtaggagaagtacgcgttgttgcgctgaattgagagtcggcgttcgtcatgctcgcgctgacgctgggcgcgagtgtcattctgactcatagttttattatttaagataacaattcactatgtatttaagcgatcttgcatcgcatagagcgtctctttcgctttcagattttttatttagtttattttatttggcgttcacttcactcaaaacaaccgattttgtgcggagcacgataaaaacgtcttcacacgtcggcgatcgaattaatgaaatagtaagttagcgtacatttggtttatatctaaacttcaataatctggggaaaagaataaagataatttgtgttcgtatatttccctttcccgcttttagtttcagtccccgaaatgtgatgctcttcggcatgatcacgcagatattttgtggtaacctcacggggcacgtggcctcctacgagctccacgtgttcttccggtgcctctccgccgtttgctgtgcccagatgtacacggccggaggccaaatcagtaagtggcaagacttagtttaaatgtaaatggatatgtctaatgaatttttaattatttgctccttactacagtggccgacataacggggggaaagtaccgaacttgcgtctccacactctttgagcagttctggtctattggggtaatgatgttgcccggagttgccagcttctggtccagctggtcccacctctacatggccatctcgtggccaactgtgatactaatctatctgtggcagtgagtaatcaaaaacagatattgatagcaaactcatagagttagagggttatctagattcgcataagtaacgtattataagtaaccctcataaaatacatttattatcaggattactagcccaaaaaggaactgctgtgcagcattcatgtgtaccaacattttgtggcccatactgacacttgcgtctcgcatcccttttacaggtggattcccgactcgccgagatggcttatcgcccgcggacgcacacaggacgccaagaagatcttgctggagtgcgtggaggtgaatgggacgggctacaacctaccgcacgacatcgaccagcagctggagctgcaggcgcagaccgccatggacgctcctccgccgagtggctggtggtcgatgtggaagggggagcgagcggtgcgacacattgtgtgtgtgcacctggcctggtcgctgtacattgtggtctattacggcatgctgctcaacatccgctccttcagtcgcgaccacctgtacattaacacctttttcgcgggcttcagcgagatgatgggcactttcttcgggctcttcctgattctgaaaaccacccgcaagtggctgtggacgggactctttaacatcgtggcaggatgcattgcctactgcggctggctggtcccgaagcccagcgtaattgggctggatccgaatgtagccctgctgatgtgctctgccatggtctcgaagatggccatttccactacgctcagtatactgactacctgcacggtggagctggtttccgatgacaagaagaagatcacttccttctccacgatttgctgggcccgtttctggctgctgggagcgccctttattggatccacagtggtcttcggccaactcattccccagacggccttcgcatctctggccattctcggtggcctgtgcacctccctgatcagcagtcccaggacccatcccatctcaagaccctcctcgcctgctgcacagggaacccaaaacatcacctcgcagttcaccatcattgacggcatggacaacaaggggtacagccccacctcgaagaccatccactcgaacagcactattttaaaactaaacacgccgcaatcgaatctacctccacaactgatgcccggcatttggacgaccaagataaccgaggatggcccacccatgtgaactgccttcagaaagcgtgcgttgacaaattagcggtgtgtttggacttaagatatagaaatttttctatagcccaggagtggagcctctatgataataaatcatatgctgagggaaagaagcagatgttcaaaaagttaagatattgctagattcacagctatggccgcgatctggttcactttggtggtgctgtgacttgtaaactatagtctatacaatttgttagcggtatatactatgcgcccgctttataagtttatgggcgcacttattgtaagacacattagctatcctttttaagaggaagagtcaatatattactagaattttcgcacacttttgtagtacgtacatcaacttcaacctaaatcggagtgctcaagtgagaaagtctcgcgcacttgaaaacaaaattaccttaggcaacacttaagctaaagctgtggaatagaatcctcgagcaaattattttaaatggataaataagctcgccgacaaaacccaaacccatacatatattttccattacctttaattttagggattagtttatttaggctatcctcagaagaccttaaatcattcaagtctgggataagcttcagcgcagccataattagtagtctcataagaaagtaagtcagatgtggagcacaccttgagaaaaaggagaaagcccagtattaagcagtcactattgaaccaaatcaaaaacgtaccgaatcgaacctcactgcacagacaaaccatctttaaatggtgatccttctaaaggcctgtggttccacattaagtgattgtgttgtaaacacctggagagaatttcatgaaaagacatacgagtagttacacaataattatatattatggacaacttttattaattaccttaatctaataatactaattgattagaacaacaataatattaacctacacattgaataatttacattcgttacgtattgtaattatcaattaccaagctaatttaaaa

SEQ ID NO: 20723 - DNA, 1287 bp, DROSOPHILA
atgctcttcggcatgatcacgcagatattttgtggtaacctcacggggcacgtggcctcctacgagctccacgtgttcttccggtgcctctccgccgtttgctgtgcccagatgtacacggccggaggccaaatcatggccgacataacggggggaaagtaccgaacttgcgtctccacactctttgagcagttctggtctattggggtaatgatgttgcccggagttgccagcttctggtccagctggtcccacctctacatggccatctcgtggccaactgtgatactaatctatctgtggcagtggattcccgactcgccgagatggcttatcgcccgcggacgcacacaggacgccaagaagatcttgctggagtgcgtggaggtgaatgggacgggctacaacctaccgcacgacatcgaccagcagctggagctgcaggcgcagaccgccatggacgctcctccgccgagtggctggtggtcgatgtggaagggggagcgagcggtgcgacacattgtgtgtgtgcacctggcctggtcgctgtacattgtggtctattacggcatgctgctcaacatccgctccttcagtcgcgaccacctgtacattaacacctttttcgcgggcttcagcgagatgatgggcactttcttcgggctcttcctgattctgaaaaccacccgcaagtggctgtggacgggactctttaacatcgtggcaggatgcattgcctactgcggctggctggtcccgaagcccagcgtaattgggctggatccgaatgtagccctgctgatgtgctctgccatggtctcgaagatggccatttccactacgctcagtatactgactacctgcacggtggagctggtttccgatgacaagaagaagatcacttccttctccacgatttgctgggcccgtttctggctgctgggagcgccctttattggatccacagtggtcttcggccaactcattccccagacggccttcgcatctctggccattctcggtggcctgtgcacctccctgatcagcagtcccaggacccatcccatctcaagaccctcctcgcctgctgcacagggaacccaaaacatcacctcgcagttcaccatcattgacggcatggacaacaaggggtacagccccacctcgaagaccatccactcgaacagcactattttaaaactaaacacgccgcaatcgaatctacctccacaactgatgcccggcatttggacgaccaagataaccgaggatggcccacccatgtga

SEQ ID NO: 20724 - protein, 428 aa, DROSOPHILA
MLFGMITQIFCGNLTGHVASYELHVFFRCLSAVCCAQMYTAGGQIMADITGGKYRTCVSTLFEQFWSIGVMMLPGVASFWSSWSHLYMAISWPTVILIYLWQWIPDSPRWLIARGRTQDAKKILLECVEVNGTGYNLPHDIDQQLELQAQTAMDAPPPSGWWSMWKGERAVRHIVCVHLAWSLYIVVYYGMLLNIRSFSRDHLYINTFFAGFSEMMGTFFGLFLILKTTRKWLWTGLFNIVAGCIAYCGWLVPKPSVIGLDPNVALLMCSAMVSKMAISTTLSILTTCTVELVSDDKKKITSFSTICWARFWLLGAPFIGSTVVFGQLIPQTAFASLAILGGLCTSLISSPRTHPISRPSSPAAQGTQNITSQFTIIDGMDNKGYSPTSKTIHSNSTILKLNTPQSNLPPQLMPGIWTTKITEDGPPM

SEQ ID NO: 20725 - DNA, 3079 bp, DROSOPHILA
aagtatgttgtatctgttctcgtagtctgcagccagaatcgcgttagggcaaacgcctccacgagccagtaaagtttttctcaagcacccccagagataaagataaagtttaggcgaactgtaccaactgaacaacacgctcaagcctggcaatctctgcaaatcctgcccagctgcttggcccgcactttgcatattcgtgatgtcgcggagccaccctcgaacaagcacttaatttaataataaattgctgccacatcgggcacaggaaacccgaaccgcagataaccgaattatacatttggagaagtatctgtgtctggacggagggaaggaggaggaaactgtgactgggaatgggtataagattgggagtgggattgggattgggagagtgggccaagccaagcccaaagccaaccacccgggaatcatggtcggtgggtgggtgtgagtacaattcataacataaccgtgaaacgcaaatgctctgctaaagttgcgcccaaatcggaggcaccgcgctgctgggatcgcctgggcccagtatatgtagtacggagtggaaagagtagaaagcgcaagttaggaaagctgcccgccactcggtcgggagttcgattttccggaccgggaaaactacgcaggactacacgcacacaccagcgccttatatacttcagctgcgagtgtgtgtgcgagcgggccgccattgttgtgccctcgaaaccgaaccgaaccgaatccgtgcccgtttctgaaagcgaaacccaccccgaagcatccctctcgctcgcacatcctcagacagacaaataatcgatgaatgaagcgaccctcagtgtgcgtgtgcgtgtgcgggtgagtgtgtatgtgtgtgcgcgtgtgtgtgaacgcaggacgaatgactgcctgggtatacgaagtgtaggtagccagagtcctgggtttaaattgagaggcgtcggggcaggagagctcagttcgagtcgagatctcgcagcacacacacagctccgcacaaccaaatcaagtccaaaatcataatcacaagtgttccatccaagtgatttagtgtcgcgagagagcaatttagaccttccattaaaactactgcaaaatgtcgacgattaacctgcatcccccgcaaacctactcgcgacttttccgaccctgggatactcagcgccaggcggcgacctcggcggcacccaggacagtgaagcaggagccggaggcgattaccatcaagacggagctggccagcagcagtttcggccacgactgcgacggagacttctcctccgcatcctcctctgcgtcaagcagcagcaacagcagcaagtcctgctacgaggaggccctgaaccacagcagctacacccgcacttccaccccgctgctggacgccgccccgcaccccgtcttttcacacccgcagtcgtcgccgttggacacgcacgccgccgccaccgcatccttggctccgccaaaccagcacgctccattcctgtcggccgccagcgatctctactacgctgccgccgccgcagcagccgctgctgcctccacgcccactgccgtcccgggcttcggcatggacccgttcactatgggcctgatggagcaagagtacgcccgcgtgatggccgaggacgcacagttaaaggcgctcaacagccgcaagcagcggccgaagaagttcaagtgccccaactgcgacgtggccttctccaacaacggccagctgaagggccacatccgcatccacaccggtaagtcgaccagaacacatctgaccccgagagtcccactcacttatctccattctgttctgcaggcgaacgcccatttaagtgcgacgtgaacacatgcggcaagaccttcacccgcaatgaggaactgacgcgtcacaagcgaatccacaccggactgcggccgtatccttgcagtgcctgcggaaagaagtttggccgacgcgaccacttaaagaagcacatgaagacgcacatgccgcaggagcgccagctgggcccgtccatcttcgtgcccatgtactcatacctttatggctactgagagggaaatcctggcgagctttccccttgccacgcgaccctgcattccagcgatctgtaaagcgcttgcacgctttaaacaagcattaccgaaccgaatccaacgaaacgaaacttaacgccagcaaaaactgcctagccaatcgtggacagaactacctcagccgtacctggcgcaatgtggcgcactcaccaaacccaatctttggacctcgacgatatatgcaaatattgagatatttattttttaacgcgtatttacacttccagctacgtgactggttatgatattcggcacatgtgtaaataatccctaagtgatccttcctcatatgctaagcgattaagaaatttaagagatgcccggatttacgtctaagttatactaaagctgatactttaacagttttataagctgatcgtggttaccagatacatacgatttatacacaaaattatacgatcatggttatatctgagagttgaattatacgatttatgtttacaacacaaaatacacaagaaaaaccgtacaagaaagacctttattacctgggcggtgttagaaatgaggagaaatgtacatagaacttgcaattttgttccccaatgattaaatgcatagttccattacgagtatacgaggagctaaaaaccaagaaccattacctttacatgttaatgatccactgtcacttcccgttaaccagatcgtgcgacaaaccgctcgtcatgccgccaatatcaaaggcaaatcggaaaatcgcatttgaactgtcataaaaggattaaaaggcacaagtcatttggtccgaatctatccaaatttcattcacaaattacccaaaatgaaacagcaccccagacaagctgaaaccgaccaagccgcgataatgagcagcgccaaaactaagggaaaagtgcattcgtgtcgctggcaatctttcccacagtcctctttcggtccagatgtgcccacgtaaattcgccattactcagct

SEQ ID NO: 20726 - DNA, 1014 bp, DROSOPHILA
cagcacacacacagctccgcacaaccaaatcaagtccaaaatcataatcacaagtgttccatccaagtgatttagtgtcgcgagagagcaatttagaccttccattaaaactactgcaaaatgtcgacgattaacctgcatcccccgcaaacctactcgcgacttttccgaccctgggatactcagcgccaggcggcgacctcggcggcacccaggacagtgaagcaggagccggaggcgattaccatcaagacggagctggccagcagcagtttcggccacgactgcgacggagacttctcctccgcatcctcctctgcgtcaagcagcagcaacagcagcaagtcctgctacgaggaggccctgaaccacagcagctacacccgcacttccaccccgctgctggacgccgccccgcaccccgtcttttcacacccgcagtcgtcgccgttggacacgcacgccgccgccaccgcatccttggctccgccaaaccagcacgctccattcctgtcggccgccagcgatctctactacgctgccgccgccgcagcagccgctgctgcctccacgcccactgccgtcccgggcttcggcatggacccgttcactatgggcctgatggagcaagagtacgcccgcgtgatggccgaggacgcacagttaaaggcgctcaacagccgcaagcagcggccgaagaagttcaagtgccccaactgcgacgtggccttctccaacaacggccagctgaagggccacatccgcatccacaccggcgaacgcccatttaagtgcgacgtgaacacatgcggcaagaccttcacccgcaatgaggaactgacgcgtcacaagcgaatccacaccggactgcggccgtatccttgcagtgcctgcggaaagaagtttggccgacgcgaccacttaaagaagcacatgaagacgcacatgccgcaggagcgccagctgggcccgtccatcttcgtgcccatgtactcatacctttatggctactga

SEQ ID NO: 20727 - protein, 297 aa, DROSOPHILA
MSTINLHPPQTYSRLFRPWDTQRQAATSAAPRTVKQEPEAITIKTELASSSFGHDCDGDFSSASSSASSSSNSSKSCYEEALNHSSYTRTSTPLLDAAPHPVFSHPQSSPLDTHAAATASLAPPNQHAPFLSAASDLYYAAAAAAAAAASTPTAVPGFGMDPFTMGLMEQEYARVMAEDAQLKALNSRKQRPKKFKCPNCDVAFSNNGQLKGHIRIHTGERPFKCDVNTCGKTFTRNEELTRHKRIHTGLRPYPCSACGKKFGRRDHLKKHMKTHMPQERQLGPSIFVPMYSYLYGY

SEQ ID NO: 20728 - DNA, 6446 bp, DROSOPHILA
aggtcagagagagtttgcctgttctttatcgccagcaaaggtggcagcgattgagaatcaatcaaaaacgcatcaataaaacttgcgcaatgtcactgcatcacaccgaaaaccaaccaaaaacacccgagagttacccagcaggacatcgggcccaaaggcaaacagtaggtggtgccggaagtgcagggccgttttcccatcaacatgagccctgaaaactaattaaactaatgatgacataattggctctatctgcagcagtcgaaggtgtcgcgttctttgtggggtcgcacaaaccgtcagaggtcccggaaaagaaacagatatattcatttactctcacagaaaaaagataattgatttctttgcgaaattgaatgcaatgacacttggattttccgctcactgtgaggtccgggctgtttccgactcgagaaatgttttgacatttgggaaaaggcaagattcttggacaattcatcagcgatcagaaacccggaccctttttacttttttttacgttcttggagttcctggattttaccatgcggaagtgtagcgtgtgctcttccaacgagctaattcccacttccccttggagctggccccgacatgatgggccaattaggaaacaaacgctcgagttttctaatttttaacaatgactgttgttgctttatttgtaaatatgcacataaaaatacttggctgccgatggcagtaaatacacgttatagaaaaatgacattcgattgtattgtatgtatgtatatatgtaaagggtatataaatatggataggtgtgggcagtgctgtgcgctttagtttgtcttattccgatgaaagatcggcaggccagtcaggcgaagtcattgtacgcttatttaaacgaatataccataaactgaaatgagtatatagacggcccttgttgttggcaaggtaaaggcattaagtaaggcacaagtacttgagccactgagattactaggtgtcgctgctcgtacgtttgccaagcaacttcgtagaggttcatttgggaatccttctcgccttccttagtacagcattatggcggtcttgtttttatcgtcacatggcgcctccaggcattggcggttgcggaggccgagtcgctgggcgtacaacaggatggcgatattcagcagcacaacgacggtggataccacgaccaggtaaaagctgtaaccaagataagccagtccattgctgtaccagtgctgctgctgctgctcagttaaaagaacgttgtgtatgaaatattggtagaactgcacgagccaagctacaaacgccactatttgcgcccccgcggcgcatatgttggaagtcaggagcagcatcattgtgcctccttttttggccgcagaggctgactttaggacagcggcgatggcagccacagcgcaggccagcagtgcgaaaccggtgcccaaggtagtaagtagccagagccagaagctagtgtcgtcattttctgtccgaacaaaggtatacactgaaaatacggtgtgaaataacaaaagttaaacaggattgctttaaaaattttatattttatttgcatctccaaaagctgttaagcttccacgacgtttttattctatgttgcatatttgtggctcgcaatataatacccttgcaattttaaaaattgtaaaccccaaatttcaaccatattatataaaagcaagtaaaatatggttccctatgtcctcgcttctattatattttttgcgccaaaaatttcaatatttttcaattttgttaaatagaatgtaacttccctttagccctaaagtttgttgtgtcacttgattattaataagaaaaacaaaaacaattttggtttttacaatttaatttttaagcatatccttaggatctgcaagataaataaatgtaatcgaaaagtatacataatggttaatttttggatatgtctgcactgatcatgagtattattcgggtatttaattttatcaactcgcccgattatgtttgtgatcttcacaactaaacaaatttaaaagtaaatctatttttaacaacagtcttatccaggacaatatcggttttcaactaatacatgccccaataatcagcacattttcctaatcgtatattcattcagaaagcgtcccaagaagtttaaagaggctaattcacgatgcaggtaatgagaagatcactctctatctagttttccctgctatctaggctactttgattgctcaccatcaaccgaatttgtgcggactccgaatccgggattcaggtggtagttgccgaagaagagtccgaagttgaattcacccttggcgtccgacgagttcttgcggcgtggagtggcccgcacccagtgattagtggtcatgctgacgagcaagaggccaatagccaggcagctgccaaagaaggtggagaacactaacgcccgtgtgtgcaagctcatcttgataatgctcatggaagaccggtggcatatgtagaaggctatgctgttttcaccattaagaaatgtctagggcccgactccagctgcagcgaagaaagttagtaggaaacgttagtaagcggaggacgcaatgccagtggccttgcagcgtattgcttacccttttatgactatgtcggcgggatcaattgcaaatatagtctttgttcgcggaacaaaagattgttgcacaggtaaacaattaatataaactgtcttgcccttgtttttttctcagaagagaagactgagcggatattttttctcaaagagtacggtagcattaatttgggatttggtctggcaaccacggcccgtctagtatattcgataacgatacaattctcataccaaaatggctcgacaaccctggttccatgcaaaaatagcgcgaagtttttgtgtttacggcggtgaaaaaatagatttcgtgtaaatatgagcagtcgcaagcacagaggctccgaaaacatggaaaatttgtgcccggtgaccaggtgagttttcctttgcttggggtgtgggttcaagcagcagaccactgaactggtcgcgtgacgtcacacgcgccacaagtgtccaaaagaggtcaagaaagtaacttattgaattgcagggttcttgaccctttctttcatcagccattctgctgatgaagcacgatcgaactgcacacttttaataaattttcgactattgcagaaagcgctcgactaataagaaccacgtctctgttgtgggcgctctagtttccactacgaagtcatcgcactacgagcacccttcctcgccctcggcactaacttttgaggccctagaagagatgggaatcggaatgcttgattccgaagaaagcagctcctcagccctctcggccatcgctttggcggttagcgccaccagcgacgacaactcaaatgagacgaccccgtgcgccagtgtgtcgcgcatggcgcaccagctacagcacacgcaacggctaagtctgggctctacgggggacatcacactggatagcccagctgtggaggattcactgtcgatgtcccgtcaatcggccgagaagctgcagattctggcgcaggctaagcgctcgtcgttgggttctgaaggtagcggcaattcaaactcgcccagcaaacgtttgcgcaaccccctggctgcagtcacctgtaacaaccagattgatgggactgcttcgctcaattttcagccatcaaccagcaggttggcgcaagttcgccaggcaaaaaagccctcgacaacaaatattacaacccgaatagtggcagcggacagtttctttgtgtttcgcaccccggccatgagtgcccacatcaacagcggcataaactactttgaaagactttcagacgaaatactacttgacatctttaagtggctcccgaagaagacgctgctgcgcatggctaccgtttgtcgacgctttaaccgctgctctcgcgatgagactttgtggacaaggctagatttgggtttgcggacaattagaccaggtgccctcgagcaaattgtacggcggggagtccttgtaatacgtctggcccagactagtgtaagttacatctaacattatgttttcgggaaacaagagcatctaatctttgaactgtagatccaggagcccgcatttgcaccatatacagaagtgtttaggacccgattacaatatcttgacctgagtatggcttccatcacccgaagctcactgctgacactattgtcccactgccgccagctaaagaaaataagcttagagaatattgagctcgatgatgacatctgtgcagagatcgcaaagaatgaagctttggaggcggtcaatctgactatggctagtggcctgacgtccaacagtgttcgcctgatgatggagtcacttaccagcctaagcagcttaaacatatcgtggactgacctaagtgcggatgctgttacggcgttggttacccacatttcccccaacttaattcggctcaatatcgctggctgccgccgcgttttgtttgactcgcgtaagtagttcccaccgtcttcaatgatatatttcctttttgatttgaatttaatttgtttagatgttgcaaccctgcaaaaacggtgtcctcagttgttggagcttgatctatctgattgcaatagtctaacaccaacagtcattactgcaattatgaagttcaagatgctggaatatttgtccgtctcccgatgctatcttattccagcaaccaaatttatgtaagatttttccagcaagcgtctgattaatccctacccagtcattttccttgcagtgaacttaagagtatgccctcgctaacctatttagacatatttgggatgctgtcggacactgcaatggaagtccttgagaaacaactgccaaaaatgggtataaacaaattcattcacagttcggtatcccgcccgactgttggcacgcgacgcacctccatttggggtctgcgcacgcgcgactaagtctcgactctgctgcttccgttaccatttgaatttgttttgctgcgtaagccacccgtaacgcagttattttattctcaattcaacaacataaataatcacatttagctgttcttatttttgtgcgtttggtcactgatccgcttcgctaaggggctccactggtttctcccattcccattcctcccagttgacgcagttcttgagactatccatgaatcctgtttcgctggggcacttgatttcaatggctggtttgttaagtgtctcacacttccaatacgatgtggcatcccaattgttgcggaaaactacaatgtctagctcggcttgggtcttgcaacccggctgtccgtcaccatcataggcgagggcaatgccaaaagaaatcactagtagggaggttagagcgagctgaaccttcatctttcaaaaaatgttctatggtctactggaagtactcgaagccttttatagttacatagttgcagcggtatagtatccaagtgcagctactaccagaaaatgcttttataaattggcattaatgtaaacactcgagagaggaaggaaaagataacagtacttgcccttgactccaatctgttcaaactaaaaaaggtacaatgagtcacccaattttccatttaaaaattcattgtttttatactatattaaatatttaagaaaataaacaaaaaatatgtcttttatcaaggaaagcataatcaagccaattcaaaacaaaatcatatagggaaacgacaaatataaatattttcgatctagttcgtaatcataggttcaagaacaaagttcgtattggacagcctgccaaatttaaagattcagcaatataaaagtaactaaagcaagagagaaggctatggtcgagttcctcgactatcagatacccgtcacccgtggcaacatgggtcaactaacttgcgctgggtatttgtctctagaatctgtatgcttaatctcaaccttctagcttttatagttcctgagatctcgactttcatacggacagacgtacatggccagatcggctattgatcctggtcaagaatatatgtacttcatatggtcgggaacgcttccttctgcctgtttcaacgaatctagtatactctattactctacgagtaacgggtagaaatataaaattgaaactattttgagtcatccctccaattggtaatttttttatatattaacggaaatttaaagtgcgttacaaaagtaaaaattcttttggtgctagtatgcttaacggggtggacatttcggcgttttccacacttcttgggaaatcactttagacaaatttgtaccaatgtcggtacttaatagtatttaactataacttaccttttgcctttggtgtgaataggctattaagccaaagagtaaacat

SEQ ID NO: 20729 - DNA, 2243 bp, DROSOPHILA
ctgctcgtacgtttgccaagcaacttcgtagaggttcatttgggaatccttctcgccttccttagtacagcattatggcggtcttgtttttatcgtcacatggcgcctccaggcattggcggttgcggaggccgagtcgctgggcgtacaacaggatggcgatattcagcagcacaacgacggtggataccacgaccagaaagcgctcgactaataagaaccacgtctctgttgtgggcgctctagtttccactacgaagtcatcgcactacgagcacccttcctcgccctcggcactaacttttgaggccctagaagagatgggaatcggaatgcttgattccgaagaaagcagctcctcagccctctcggccatcgctttggcggttagcgccaccagcgacgacaactcaaatgagacgaccccgtgcgccagtgtgtcgcgcatggcgcaccagctacagcacacgcaacggctaagtctgggctctacgggggacatcacactggatagcccagctgtggaggattcactgtcgatgtcccgtcaatcggccgagaagctgcagattctggcgcaggctaagcgctcgtcgttgggttctgaaggtagcggcaattcaaactcgcccagcaaacgtttgcgcaaccccctggctgcagtcacctgtaacaaccagattgatgggactgcttcgctcaattttcagccatcaaccagcaggttggcgcaagttcgccaggcaaaaaagccctcgacaacaaatattacaacccgaatagtggcagcggacagtttctttgtgtttcgcaccccggccatgagtgcccacatcaacagcggcataaactactttgaaagactttcagacgaaatactacttgacatctttaagtggctcccgaagaagacgctgctgcgcatggctaccgtttgtcgacgctttaaccgctgctctcgcgatgagactttgtggacaaggctagatttgggtttgcggacaattagaccaggtgccctcgagcaaattgtacggcggggagtccttgtaatacgtctggcccagactagtatccaggagcccgcatttgcaccatatacagaagtgtttaggacccgattacaatatcttgacctgagtatggcttccatcacccgaagctcactgctgacactattgtcccactgccgccagctaaagaaaataagcttagagaatattgagctcgatgatgacatctgtgcagagatcgcaaagaatgaagctttggaggcggtcaatctgactatggctagtggcctgacgtccaacagtgttcgcctgatgatggagtcacttaccagcctaagcagcttaaacatatcgtggactgacctaagtgcggatgctgttacggcgttggttacccacatttcccccaacttaattcggctcaatatcgctggctgccgccgcgttttgtttgactcgcatgttgcaaccctgcaaaaacggtgtcctcagttgttggagcttgatctatctgattgcaatagtctaacaccaacagtcattactgcaattatgaagttcaagatgctggaatatttgtccgtctcccgatgctatcttattccagcaaccaaatttattgaacttaagagtatgccctcgctaacctatttagacatatttgggatgctgtcggacactgcaatggaagtccttgagaaacaactgccaaaaatgggtataaacaaattcattcacagttcggtatcccgcccgactgttggcacgcgacgcacctccatttggggtctgcgcacgcgcgactaagtctcgactctgctgcttccgttaccatttgaatttgttttgctgcgtaagccacccgtaacgcagttattttattctcaattcaacaacataaataatcacatttagctgttcttatttttgtgcgtttggtcactgatccgcttcgctaaggggctccactggtttctcccattcccattcctcccagttgacgcagttcttgagactatccatgaatcctgtttcgctggggcacttgatttcaatggctggtttgttaagtgtctcacacttccaatacgatgtggcatcccaattgttgcggaaaactacaatgtctagctcggcttgggtcttgcaacccggctgtccgtcaccatcataggcgagggcaatgccaaaagaaatcactagtagggaggttagagcgagctgaacctt

SEQ ID NO: 20730 - protein, 495 aa, DROSOPHILA
MLDSEESSSSALSAIALAVSATSDDNSNETTPCASVSRMAHQLQHTQRLSLGSTGDITLDSPAVEDSLSMSRQSAEKLQILAQAKRSSLGSEGSGNSNSPSKRLRNPLAAVTCNNQIDGTASLNFQPSTSRLAQVRQAKKPSTTNITTRIVAADSFFVFRTPAMSAHINSGINYFERLSDEILLDIFKWLPKKTLLRMATVCRRFNRCSRDETLWTRLDLGLRTIRPGALEQIVRRGVLVIRLAQTSIQEPAFAPYTEVFRTRLQYLDLSMASITRSSLLTLLSHCRQLKKISLENIELDDDICAEIAKNEALEAVNLTMASGLTSNSVRLMMESLTSLSSLNISWTDLSADAVTALVTHISPNLIRLNIAGCRRVLFDSHVATLQKRCPQLLELDLSDCNSLTPTVITAIMKFKMLEYLSVSRCYLIPATKFIELKSMPSLTYLDIFGMLSDTAMEVLEKQLPKMGINKFIHSSVSRPTVGTRRTSIWGLRTRD

SEQ ID NO: 20731 - DNA, 2716 bp, DROSOPHILA
aatatgctaacaaagtggatgtcaattcgacatgcttaataaaaacttacaactgagttcataaatttttgggaggaaccagtatctgctaatgtaacactgtaactaatgttattgatttaaaaaaaaaacttccgcattctgagatttaaatttcgcccaaaagtatgcattacgaatatatttaaattggccacacaaactttcatatgaaaagttttttttttaattaatttatatattaaggcatacggggaaatcttggagcccctttgtgtccttctttcatatgaaaagtgtgtttttttatgctctttagagtaccttttattcttcaccaggatcaagaatcagcgcagtcgatctggccatgtttgtccgcatgaacgtcaagatctcatgaactataaatgctagaagattaaggatgcagattgcacagaaaagtgtaggcgtagctcaagtttatcctggtgctaccaaacaattgaaagttaagtaacgcatatgatgcaacgaggtgctggttataaaatgtaagaaactagtttttaatagaatgtgttgtcatatttcgtcacaaaatttgatattataacttttgtgtgccgaaggtacgatcatcaaagtttgatattaaagaatataaatattactattcttacaataaacccagcaccgatgcgactccctgaaaccctatagaatagtgaagctcaccaaagactgaaacacaacattttgttttagcagttgggtgctaaattttcagttgcacatgcatttattttgttcctggtgatgaatactgttgtgtttaagagtcttcagtagattcgaatgctcctacaaacgccacatggtcgtttagtgtaggtgtcacaggattcatgctgattcttcaattgagttataaaaaagataatcccatatatattttctttagtatggaatgtcattctgaccagagtaatcgatacaagttttggtttttttttttggcgatcagagcactttattacgtagacccccattgataaaaaacacaatcagtttacaatgccacccttagtagatattaccacttcaacaaacgccgtcgttctaggcggtgggcaggaaggtgagcttttcgttaagctgcagctgggttttgatgagctgggagagcgtgatgaccagcagaaggttgcgtacgttggcgttgaacatctgagtgaactgctcgtgggtcatgtgcggcacggagtggataaggtctagcagctggcgtccgacggcgttgtcgggggttaccttgtgagcgatcacgtcgtcaacgtacttgagaataagatccagcagggactgcagcttcgtggaggcctccgagatttgggccaggtccagcattggcggaacggtcttgggacggtgagcgggcgaaacgcctacggtcttctgaagcagcttgagcccaaatgtctccggctcgtagctggtcagctcgacaggaatgggcgtgaacatgcagccgctcttgccgccgggaactcctagttgaatgcagacataagcacgcagacccatacgtccgccctgcagcgaagtgtccacggtgaggtgaaccgggttgttgcattcgcgggcgtaatactcgtggatcaccgagctgtggttggtaacgtcgttgccggtggcccaccagcctaccacgctctcgttggagttcaccttgcggttgaggtcgtacatgtccagggcgtagctcagctctgcctccacctggtcatcgtgctccttgtgcggcacacagaaacagttggtaacctccaccacacctttgtccacagagccgagcagggtgccgatgacgcggtgcgagtccgcgttccgccgctcgaaggcgtccaccacctggaaaagcaccaccgggtgcacgcgcacggtcagattgagagccgacatggtaattttcggtggccaagatttgcaaggaaaatttccgcaataatttctattcagccacgctgcgcgtatgttttagggatgcaagaaaagggcctatcgatagtgcgggtgggggttgatggcttttggagctatcggtgcggtcgtgcgtggcctatcgttttatcgatgtaaaaccggtggctagcgttagttaatcaaatactattcaaatttgaatatgtcggagatgccaagcgcgacttttcatttacttcagcgtccatattgtccagcacatcaagtcgcctgcgtgttgtttcttctgtcgttctaagcagactaatttactcaagcgtcgccttcgcgatgcttttcttctattcctcaccttcactcaattatttcatccttacttcgtttccagaaactatacaacaacaacaacagccacacaaatgatgcccactcaataacggaacgctttccgtgaatttcattgctcgctgctcattcttaacataacggatcaataacaaaatgtcggttacattctactactcaatcttgcttgtgaaattttgctgatcaaacgtgcttaaagcgaattattaaatttaataaaatgcctggaaagagataaactttgaagttacccaattaataaactataaccaccagttgggaaaatcttttccagaataagtataaatgttttctgtatcccgtaagaccgtctactattttttaaaaggctcggaaaaagaggacaggcttgaacctaaga

SEQ ID NO: 20732 - DNA, 1058 bp, DROSOPHILA
ccgcactatcgataggcccttttcttgcatccctaaaacatacgcgcagcgtggctgaatagaaattattgcggaaattttccttgcaaatcttggccaccgaaaattaccatgtcggctctcaatctgaccgtgcgcgtgcacccggtggtgcttttccaggtggtggacgccttcgagcggcggaacgcggactcgcaccgcgtcatcggcaccctgctcggctctgtggacaaaggtgtggtggaggttaccaactgtttctgtgtgccgcacaaggagcacgatgaccaggtggaggcagagctgagctacgccctggacatgtacgacctcaaccgcaaggtgaactccaacgagagcgtggtaggctggtgggccaccggcaacgacgttaccaaccacagctcggtgatccacgagtattacgcccgcgaatgcaacaacccggttcacctcaccgtggacacttcgctgcagggcggacgtatgggtctgcgtgcttatgtctgcattcaactaggagttcccggcggcaagagcggctgcatgttcacgcccattcctgtcgagctgaccagctacgagccggagacatttgggctcaagctgcttcagaagaccgtaggcgtttcgcccgctcaccgtcccaagaccgttccgccaatgctggacctggcccaaatctcggaggcctccacgaagctgcagtccctgctggatcttattctcaagtacgttgacgacgtgatcgctcacaaggtaacccccgacaacgccgtcggacgccagctgctagaccttatccactccgtgccgcacatgacccacgagcagttcactcagatgttcaacgccaacgtacgcaaccttctgctggtcatcacgctctcccagctcatcaaaacccagctgcagcttaacgaaaagctcaccttcctgcccaccgcctagaacgacggcgtttgttgaagtggtaatatctactaagggtggcattgtaaactgattgtgttttttatcaatgggggtctacgtaataaagtgctctgatcgcc

SEQ ID NO: 20733 - protein, 280 aa, DROSOPHILA
MSALNLTVRVHPVVLFQVVDAFERRNADSHRVIGTLLGSVDKGVVEVTNCFCVPHKEHDDQVEAELSYALDMYDLNRKVNSNESVVGWWATGNDVTNHSSVIHEYYARECNNPVHLTVDTSLQGGRMGLRAYVCIQLGVPGGKSGCMFTPIPVELTSYEPETFGLKLLQKTVGVSPAHRPKTVPPMLDLAQISEASTKLQSLLDLILKYVDDVIAHKVTPDNAVGRQLLDLIHSVPHMTHEQFTQMFNANVRNLLLVITLSQLIKTQLQLNEKLTFLPTA

SEQ ID NO: 20734 - DNA, 4800 bp, DROSOPHILA
ttttttgaatgcacacttgcaatttgcgacaaaaaaatgtatacgatcgttgtgttggtgttgcactttgtgtctatacgtttttccttagtttttccgacaaaaaacttcttacgttccacaagctactgcgttctcgtgtgaaatttcagggttcttttcgttcctcgcacacaattccctttgttcggcttgaaactgagacgtttccgtatcggatttggctggcctgcttgtgccaacaattacaattacaagcgctatgggcttggaaaatgctgcttctccgacgagttcacgtttttttccgctttcagacgcgtgtctaaaaaatcagggctgctttagcacgtatatcgatgaggaatcgatagatgcggtcggtggaggtagagcagagactccaacctgggctctcggcggcggttactggcaaagactccggcaagggcgttgccagatctatatcctcgtctcgcggtctatgaaattcaaattgaattttttcacttttgctttttcggcgcgtcgatcccttctaggctgttgttgttttttgaatggaagagaaatgaggctgggcagttaaattttgtttcttaaaggccaaaaatgtttgtgtttatgtttaggaatagttgtttataaggcgtcagccgctgtaccccatttcgttatttgaagcaaaagtcaaagaaattcaaattaaatttgaaatttagtatatatatgtgattgccgtaaaataggtattaaaaatttccaaacaattccatactcaagttccctccaagtctgttaaagaaaactaaaattcgaagtttcgaactctggaatatattcattcactttcgtcttcagaatatacatattgtgaatgtacatgtttatatagaataaatgcttttggtattggccttagcttgagattagttagtggaacaataaatatggctataaagtatcgtatatatgtatataataataattttcatatcgttcagcccttgagcaggcagcgggagtagaactcccggtcgatagcgtcgtttggaatgtatgagctccacttgaagatcagcgccagcgtgtccccggcggacatgtgatccagagcgatgttgaggaaacagttccagttgtagaagaagtggcgtcccaactgttcctgttccacgccagatatgcactcgcagttggcgcacaccagtcgtccgccgcgttgcagttccacgaactgttcgaagcagcggccccatgcgctcacgctcagttgtttgcccacgtcagccagaagttcggggagtccgtagttgaggacgatggccaccactttggtgagattctgttcggctaggtaaaatttagctaagacgtctaatagtgccggcactgattgaacaacatcaaagcacttcagttgctcgccacgggaccagaagtatcgcaggagcactgctccaagctcatgatactggcaggaggtatcgaagcgaagggggaacgagcaatgctcacacttgacaatctccgcattttgcgaagtatttagcagcacaaatccggcagctatgtgatcccgcgtagcgtcgtccacttcccagatcatctccggatccaggtaatcgaaatacatctcgtagcaattgcgttgcgcttggtcaggcgtatccccatgctctaccatcacctgggctagtttctcgagcagattcaccagctcgccagctgcatactcgtcgaagacagcgcgataacgatcgacgcactgcgtccggctaaacttggcgctcttggcgatcaggtagaggttgtaaagagtcttctcctcgggactgatgtggggaacctggggagccggtttcttacagcgcctaacaatttcctcctcctgatcctcgcttcccgactcgtagcgtgctttgatgtccttgaacggcagagaacgctcgctggctggaattagttccctgaccaactgctgctgttcctcggcaaaaatattgaacttgtattttatgatgttcttgccgaatttaccagttaccgtcagcagcgcatccttgaagtgtcccgttttgagaggctgcttcaagttgtcgcagaatgcgttttccagcacgtacactcccttcggcggagctctcgatgaacttccgccgctcaaactgcgttcagtggtggctgaactgcctcccgagctgtgcgtatccaaagcactgcctgtgcactgagttatggcatcaaatatcacggatatatcgttcaacagctcgtactcctgccgctcgatgagtagttgtttcagcggattgagctgtttaagttcgtaatcctcgcgagccttgtccgcaaaatatcggacatgctggcgtagtagatttgcgcaaggcagcaatttggattgttgtataagagaaactgcgtgggattgcagcgtctgcagctggacactataaagtgcgccagactgcgtaaacacaaagatctccgatcccgaggagcggcagtcggcgattctctcgaactgattggaccacagcaccaccgccgatcgtcgaatatcaaatatatatagtcccagctctgtaaaggccagcagaaagtcatcgttcaacctttgtacctttgcgaactgcagattctgcggctgatagtccagcagctcggcattggcgtccagttcgtctgttccgctaccaggtcgctgaatccttgccggtgcggtggctagggccgtcttgaactggtgcgtctgtatcacctcgccctcaaagtccacctcccacacgcgactgcctggtcgggcgcagtagatacgagatggctgcaaagactcctgcggcgagacgaaaaagcaggcgccaaaggctccatcccgcggacggttaccaatctgaaaaatatgacatgaggtaaaagtttatcgattgtatgtgatcagattggcttagccaccagcgcacaaacgcacttgtttgtaatcctcgtactcagtgttgcacagaatgcacttggtgcaattggacaccagcagcaggtactcaaaatcatcaatttggacgatcggagagtccaggtagagcagcggatgcactgtcatgttgaacagcagactgtgtccgatgaacgaggagagcagcacgaggctgacttgtccgcgagagtcgccatagtagaactgcttctcgtcctgcgtccagtggatgcatgtaacctgcaccgactggtccaggtgcgtaaagatcacctgcggcgtggcctgcgcggacaaattcacggcataaacacagatgagcgaacgttgcgttgcaaaagccacatatttgctatttgccgatatgctgaggctggtgatcgctccatgcttgtttggtatcaagagcagaaacttgccgttccgattgaacagatacagcgatccggatgaggcaccgaaaatgatatagctgtcggagatgtcgaagcaggtgtactgaagggaggaagggcgtgcattagtgaatggtctgctatcaaattgcgggtgagactcaattggattgacttgctctcaccttgatgcgattgtggtgtttcagcggcagcgacagcgacagcgaaaaatcaataaagttcgtcaggcagtaggcgtcggccatcttgtgggctttttcgttgtccgaagcgttcgttaatcacatagctcgctttgaaatcgcgattacgttattgcattgcacatcgcatgcatttatttacaaaaattatgtttttatcagcgcgacgagtaattcgtgtacataggtcgttggaactgtctggcagctctgttagtgctggcaggtggtcgataacaagtggagtgtgattagagcgattactttttatttcaaatactttgtaataaacttgttagtgtcttaattaaaacaattcaaatcttcaatttgaaatgtatattaaaatcaaaagtttcatgaaatcacagacgttaaagtatcgatacatttagtgctgtaaaatgacagctggcttgtttacccttataagcttcaagtctggcaatactgcgaccagcagctgtcgtaaaacttatccttcaaactttcaattaaaatacgtttttctgaaaaaatcgcttatcaaactcccatacataaaaataaaactattattacacaatgtttactaaaaaaaattggatatttaccacccagccgaacagctgttcgctgctacctcccccaacccataaacctactgtcaagtaaacgtcaaaacagtcgcgcgactcgccaagcgaaaaaacctgcagaaaaattgaaatgcggcgtgaaagatactagaaaaataacaaataaacaccgggtatccgcaattaaaacgcttatgtacatagaagccaaagtgtagcaatgggcgacaaggaggagcccgtaacacccgctccctcgcccacggaggagggtatggccaatattgggtctgctggagccggggatcagccgcaaacttcagggaataataccaacgttaagatcgtgatcattggagctggaatggctggcctatcggctgcaaatcaccttttgcaaaacggctgtgacgatttccttattctggaggcacggggccgggtgggcggacgcattgtgtccataccgctcagcaataatcagaaggtaccatttgttatataaccccctcaagtccaaaaaccaaaacaaaccatcataggcgaccatatggtattaaaggaaaaacacttccgactcggaaaaaccacgagcatgttgtaacacattcttcgccccagcc

SEQ ID NO: 20735 - DNA, 2640 bp, DROSOPHILA
acagttccaacgacctatgtacacgaattactcgtcgcgctgataaaaacataatttttgtaaataaatgcatgcgatgtgcaatgcaataacgtaatcgcgatttcaaagcgagctatgtgattaacgaacgcttcggacaacgaaaaagcccacaagatggccgacgcctactgcctgacgaactttattgatttttcgctgtcgctgtcgctgccgctgaaacaccacaatcgcatcaagtacacctgcttcgacatctccgacagctatatcattttcggtgcctcatccggatcgctgtatctgttcaatcggaacggcaagtttctgctcttgataccaaacaagcatggagcgatcaccagcctcagcatatcggcaaatagcaaatatgtggcttttgcaacgcaacgttcgctcatctgtgtttatgccgtgaatttgtccgcgcaggccacgccgcaggtgatctttacgcacctggaccagtcggtgcaggttacatgcatccactggacgcaggacgagaagcagttctactatggcgactctcgcggacaagtcagcctcgtgctgctctcctcgttcatcggacacagtctgctgttcaacatgacagtgcatccgctgctctacctggactctccgatcgtccaaattgatgattttgagtacctgctgctggtgtccaattgcaccaagtgcattctgtgcaacactgagtacgaggattacaaacaaattggtaaccgtccgcgggatggagcctttggcgcctgctttttcgtctcgccgcaggagtctttgcagccatctcgtatctactgcgcccgaccaggcagtcgcgtgtgggaggtggactttgagggcgaggtgatacagacgcaccagttcaagacggccctagccaccgcaccggcaaggattcagcgacctggtagcggaacagacgaactggacgccaatgccgagctgctggactatcagccgcagaatctgcagttcgcaaaggtacaaaggttgaacgatgactttctgctggcctttacagagctgggactatatatatttgatattcgacgatcggcggtggtgctgtggtccaatcagttcgagagaatcgccgactgccgctcctcgggatcggagatctttgtgtttacgcagtctggcgcactttatagtgtccagctgcagacgctgcaatcccacgcagtttctcttatacaacaatccaaattgctgccttgcgcaaatctactacgccagcatgtccgatattttgcggacaaggctcgcgaggattacgaacttaaacagctcaatccgctgaaacaactactcatcgagcggcaggagtacgagctgttgaacgatatatccgtgatatttgatgccataactcagtgcacaggcagtgctttggatacgcacagctcgggaggcagttcagccaccactgaacgcagtttgagcggcggaagttcatcgagagctccgccgaagggagtgtacgtgctggaaaacgcattctgcgacaacttgaagcagcctctcaaaacgggacacttcaaggatgcgctgctgacggtaactggtaaattcggcaagaacatcataaaatacaagttcaatatttttgccgaggaacagcagcagttggtcagggaactaattccagccagcgagcgttctctgccgttcaaggacatcaaagcacgctacgagtcgggaagcgaggatcaggaggaggaaattgttaggcgctgtaagaaaccggctccccaggttccccacatcagtcccgaggagaagactctttacaacctctacctgatcgccaagagcgccaagtttagccggacgcagtgcgtcgatcgttatcgcgctgtcttcgacgagtatgcagctggcgagctggtgaatctgctcgagaaactagcccaggtgatggtagagcatggggatacgcctgaccaagcgcaacgcaattgctacgagatgtatttcgattacctggatccggagatgatctgggaagtggacgacgctacgcgggatcacatagctgccggatttgtgctgctaaatacttcgcaaaatgcggagattgtcaagtgtgagcattgctcgttcccccttcgcttcgatacctcctgccagtatcatgagcttggagcagtgctcctgcgatacttctggtcccgtggcgagcaactgaagtgctttgatgttgttcaatcagtgccggcactattagacgtcttagctaaattttacctagccgaacagaatctcaccaaagtggtggccatcgtcctcaactacggactccccgaacttctggctgacgtgggcaaacaactgagcgtgagcgcatggggccgctgcttcgaacagttcgtggaactgcaacgcggcggacgactggtgtgcgccaactgcgagtgcatatctggcgtggaacaggaacagttgggacgccacttcttctacaactggaactgtttcctcaacatcgctctggatcacatgtccgccggggacacgctggcgctgatcttcaagtggagctcatacattccaaacgacgctatcgaccgggagttctactcccgctgcctgctcaagggctga

SEQ ID NO: 20736 - protein, 826 aa, DROSOPHILA
MADAYCLTNFIDFSLSLSLPLKHHNRIKYTCFDISDSYIIFGASSGSLYLFNRNGKFLLLIPNKHGAITSLSISANSKYVAFATQRSLICVYAVNLSAQATPQVIFTHLDQSVQVTCIHWTQDEKQFYYGDSRGQVSLVLLSSFIGHSLLFNMTVHPLLYLDSPIVQIDDFEYLLLVSNCTKCILCNTEYEDYKQIGNRPRDGAFGACFFVSPQESLQPSRIYCARPGSRVWEVDFEGEVIQTHQFKTALATAPARIQRPGSGTDELDANAELLDYQPQNLQFAKVQRLNDDFLLAFTELGLYIFDIRRSAVVLWSNQFERIADCRSSGSEIFVFTQSGALYSVQLQTLQSHAVSLIQQSKLLPCANLLRQHVRYFADKAREDYELKQLNPLKQLLIERQEYELLNDISVIFDAITQCTGSALDTHSSGGSSATTERSLSGGSSSRAPPKGVYVLENAFCDNLKQPLKTGHFKDALLTVTGKFGKNIIKYKFNIFAEEQQQLVRELIPASERSLPFKDIKARYESGSEDQEEEIVRRCKKPAPQVPHISPEEKTLYNLYLIAKSAKFSRTQCVDRYRAVFDEYAAGELVNLLEKLAQVMVEHGDTPDQAQRNCYEMYFDYLDPEMIWEVDDATRDHIAAGFVLLNTSQNAEIVKCEHCSFPLRFDTSCQYHELGAVLLRYFWSRGEQLKCFDVVQSVPALLDVLAKFYLAEQNLTKVVAIVLNYGLPELLADVGKQLSVSAWGRCFEQFVELQRGGRLVCANCECISGVEQEQLGRHFFYNWNCFLNIALDHMSAGDTLALIFKWSSYIPNDAIDREFYSRCLLKG

SEQ ID NO: 20737 - DNA, 14260 bp, DROSOPHILA
ttgatgaacagaaaacaaatgaatactgattttatacacattatagtttttattttcttgacgcttgcaattccatttggatgccagtcgatttgaagattcgatgacaaatgcaattacaaacgtggttaaactagagagtacaattaaacataaacgtaatacgaatgatcatcataataatagtgcaaataaaatacaaagtaaaaaatgaaagtagcgcttcgattgatttcaaaatcaaagttcgaactttacggcgatcgatagacgattagcgatgaacaataaccgactaccgatgttcaacgaagggccatcaactccgaaatttcgctattattgttacttttaaatgcaatccgctggcgcctctcactctgtacatacactctgctctgtaaaacgaaatactcaactactactactaccactactactcaaattacaaaactcaaaacgggttcgaaatcataagtaaaatcaacataaatggaatacaaatcatacaaattgtagagtgctaagctgcgctgccgtttctgttgtcgaacgctagatggcgccatcgaacaatgatataaataaataatttgcttagcttacaactagaacatattggatatttaatacttagacgtagccttttacacacaactctgtgtcgcttctttcattttgtatagttaggtgtactttactttagtttatgttttagttttagttttagtttagtttactttcgattcatgtttcgctctgtccatggctagaatccctccattccgtttcgtttccatttccgcttcctatcggttggttgcataacatttccgagttctacattccattttgcctcaaaggcaaaatgtttaaaaaccacgatttcaaatgctcatcgcagaccaatttggatcggaagtggaaactgaaacaggagacagtagacagtatatttagtttgctttcgcgttttctatttaagtaactgattgatactcgcttctggtacacgtaaaactacattattaaagtaaaaaaaaagagtgctcattaaatggaatacaagtcaaggctttgtaaagtggctttaacttagttctgggtttgctgattgctcgattcgtttgttgttagctggcatgtggcttacaggatatgctctctatgtctctacgaatgtattgtatagctctgtttctgtttacaaactacgaacaacgtttggccaatccgattcgctacacaacaacaacaattatgtatatgtattatgtatatgtgtaaaaaaaaaaagtccttacaaggcatcaatatgtaaagagaaggtggatgatggaggaaacaacttcatcgaactttcatctctccttctgcgacatggattcacttaactaagtacagctttcatcgttgtgctgggcgcggtgacagaatacaatagcaagccagccgtacaataccatatcgtatttatatttatataatattaatatagtatacaaagtacaaacgatgcgacaaatccatggtttatctgacccgcttgacgttgccacttctgctatacatatgtttttctcaccatccagtttgatgttaggtaagcgttaaacgagttgcattggcattacatgttctttaagatacagctttagttttagtattaggtttagttttagttttagttttagttttagtttagttgtagtttagtttagcttgtaaattactcaaaaaatatttgtagattactgtagcatgtatgtttggagcgtatatttaagatagtagttgcagttgccattcaagttgcagttgcagttgctctctctttttctctcagttattttctttctgtatcagtttcagtttgcatagcgctagtttcgttggggctggagagtcgcgactgctccggctcaagctgcattgccacgcctgcgatctggcatgtggcatctgggatgtgggatctgggatcgcatcggatcggttggcgttcatttcagcgatgaattggctggcagcgtggcggagcgttggacattaaccgcatacggcttgtaggaggagcgcgtcgattggctgccaattcggtgccaggcgatgaatgaatggtgatgaggttggatgatatggatggtcatgatggttggtcatgatggtggttagcagcgacagtgggagggagagagcgaaaaaagagaaataccaatcgagattagagacacacaatacagatgcggggaaacacaaaagccatgggatttacacaatttggatcagttagtgggatttgtttaggattcggaaaaactctgactgctgctgactccctggcaacgtcaagggtcttggtcctgggcctaggtggttctaggtggttctggttctggttgtggtttacctgggcgatatcttgctgccatcggtgctgttgttgttgtacgaagccgccttatatccactcttttggatacgcttcagcaggcgcgccacccacagcgattgatcctcgggcgtggcggccagcagcagcatgtcacgggcgctgcgcggatcgtgattgagcttacagggcgccagcgggtcgtgtttgtccacatgctccttgtgtatcttgttgcggcatctggaattacatacaatccatagtatcaacacacaattcgatgattaagtagtggctgctactgacctcttgcattcgtaagccgccggcggcttgaacatgtgccacaaaggcttcgggcacacctcgcaagccgtgggcatgtggtaggtaatgtgaacgaactcgtgacctatccaaaacaaaaaagggtgttgtctcattaagtgtcattttccccggaggtgtgtgttagcttacctttgtggacaatggtgcccgggcgctcctcgttgcaattaccgtgcagcacgctcacatccaactggctctgctcgtcgggacgatgggaggcgccctcgccggcgtacagtagctggaatatgcgtggaatctctttggcatcggcgcgtatgacatcgccctgagtgacgctacgaacgtggtacaccttgctgcaggttttagagggaagaacaatgaaatgcatattatttaatattattgtagcatagtatttaacgcacctcaggtccaggatgagcacggcatccgtggtattgtgcttgtcaatgtccgaattgtagaagatgattttgcgcgacgacacaatgacgtactgccgcttccagccgtggccacgtcgccgattctgcttattgggcacacttagccagccctcgaagaccgagtcctgtgtgagggagagcagagaggagtgctacagaggtccgggatgagtgggggagcgtgtgtgtggtgtggtgtgggtttttgtgtgagagttctatgtggttgctggacgctggcaataatgctcacctggctatcctcgggatcgttgtccgccgaggagagcgacgccgtctcgttgagcttgctctgcaggttctcgatctcggtggccttgcaatcgatctccatgaccatcttctgcttgagctgctgctcctcggcgcacagctgctgcaggtcctggtgcttgagcagcagctggttgaacttgtcgcgctcctgcgagagctcctgctgcagccgacgcatctccttctcctttttgcgcagctcggctgtcgagcgcgccttgttcttttgttctgcgaaataaagattcggaatggaattagcaaaggcagacagagtgtgcgaatgtaacatactgggcaggtcggagtcgcgacgattcatcacttcggccaacttgttcactgccacctgtttgagaagcacttcgttcttgcacttatccagcagcttggtgatctcttcgtccttgctgcttctcatcagcgcaagctcctcctgctgcttcttgtgctgctggacaagatcctcgtactcggctgccttctggcccagcttcttgtgcagttcgttttcggcctccttgagcgtggctagggccgcctccttggcgttgatctcgttgcgatgcttcatgacgaagtccttcagctctagctccttgatagtcttctccttttcgagatccgccaccgtctcttcggcaatggatcgggccaaagcctctgagtctgcacgggcaacggccacctgtacctggtgcttgagtgagacgcgttcctcctcaagatcctcgatcttcgacagccgctcagcgctctcttcgcgattctcgttcgcctgtgtcttgtacagccgcgagaagcactgctccgcctcgagttgggcctgaagctcacggttattggccagcgcttcgtggtgtgtgctctttagctgggtgaggtcctcctcgaagcgtcgcttcgcctcgcgctgggtagacagttccttctgtagctggttttcgcgggatcgcaggtgggccacctccgagctgtgcaggctgagttccgatagcaaggcattgcgtttgctgtgctcctggtcgagctgtgactgcagagcggccaccttctccgactcctggcggcactcgccttcgagcttctggagacgtagttggatttggcgatagtccacggacagcatgctcagctgacgctctttttcctgagaatgctgatcggccttgatgcgagcggacttctcctcgttgagcttggactgcagcgcctttacctcctgcagattggcctcctcgcgggagacgagccgcgacttctccgtctcttggtgtgccttgacctcctgctgatagcggccctgggccgccttcagttcgaagtcgaggccggcatgcgccttctccaagtcgctgatcttctcaagcaacgcccggttgtcctcttgcgccttttgttcgcgacacatagtacgttcaatgtcgttgatcagcgtctgcatcttattctcggcctccttgtgcatctccttgagctgcgatcgcagattcttctcctgcaccaccagcgcctgcagctcggcattctcctggccgagctcctccttatgcttttgtagcgtgtcgatcatgtcgaccatgtcgcgcaccttctcctcctgcgacttgaccgtgaagtccagctcggcattgtgctttttcagcttttgagtgttctccgtctccgttttgtagctctgctccatctcaagcagctgcttttcgagtgagaccaccttgtcgttgatattgaggtcgcgtgcccgcgtcttttgctcgttttccagattgcgctgcgtttccacgagcagtgcctccgtcttcttgcgcagctcgatctcctgctccaccttctgcatggccaccttgtagttgtgttgacgcaaagccagatccttctcgtactctgaggcaatcctctgcagctccgcttcgcgttttgttatcagctcaatctgctgccgcagtccagcatcctgctgctccaaggcttccgacctgccacgctcccgctcgagcagcgcctccaggcgcttcagctcgttggaattcgacggccgatggcggtgattatgaccgtggccgtgattattgctggccgccccgctgtttgccacattggcctccttcgactccgcatccacggtgtcgctagacagcagctgatagtcacccgtatacgtaaagccgatgaagggcaagtgattgccatcgaagcccttgggtacgggaaacacttcctccggcttctcatcgcgctcaatgtcctcgaaatttcgcgtatcatcgtcggaggagagttcgggcaccacaggcggcacactctcgcgaatgttgtcgaacgaccaggtatcatttcggaaaaacggatgcgccttaatgtcctcgatgccgtagcgacccaaacgttgcgttcggtccgtgagaaaggcgcggatcagtgccttcgcctgttcgctgatctcaacctcgggtggaaagctaagcgagttcttgtggtccatgatcttgccgtaggtgcccaccagcgagtctgcgtagaatggtgtctcgccgaacagcatctcgtagaggaaaatgcccaccgaccaccagtcgcattcccgcccgtactcgttgtccacgccctgcgactgcagcacctccgggctgatgtagtccggcgtgccaacggcattgctggacaccacttggccattggcgcccattcgcatacaggtgccaaagtcggccaatttcaggtggccatagctgtcgaggagcatattatccggcttaacgtcccgatgcacgaagcccatattgtgaatggtgtccagcgcgagaaccacctccattgtgtaaaagatggcccacttctccgggatgtcgtagtcacccatcagcgagactatatcgccgccgggcataaagtccatcaccatgtataggtatttggcatcctgtgagaaaagattttatgaattaattgctgatctaaaacagatgtaatctacttggctcttaaaatgtaagcaatactttatatactaattatttacaatttccgagtgggctaacaatgatattttttattatttagaatgacaaatttaagtaataaaaaatacataggttggtagaatacaaattacaaatagaaactgatccaaatcgaatataaatcgaatcaaaatgtaagcccaacaagttgcgtagaattgtgcgtggttatcatattaattgcccttcagtaactttttatcaatcaaggcaacttcagcaggcacatcaagatcgtctggttgcggttccaacttcagcaattcatcaatagtataacgtataacatttcctttcttcacttgacgatctttctgctcgccttcaattggcattggctgacttgccatcttttgaaaattattatttgtacgagttaagtttgtccaatcaatatttgctccataatgagtgctattccctttgcgtttctccgccccaagttcgttagttgaattggccgaagtggcgttctttttagtttccatcttggccttaagcttgaaacgacgctgttcgtcccattccttggtggtgggtatgtatcttttggcggtcatcgtggtggccggagtcatctggtccactgtggtttgcgagttttcggctttaagacgacgctgctcttcccattccttgtgggtgggtatatatcttttgtgagtcaaagcggccaccggaccgtcagccttttggttttcgtcttcttcgacagctagttgcatctgctcctgatccaattgcatcgaattctcagagaaaagagcacgctcgatctgcttctttttggtggctcgcatgcgattgactccagtgcgttcatccatagaatatttgatgggcgaacgagacagatgcacaactggctgggcttcattatcgttgctatcgttgcctggaaccgaagaaggatcccccatgcctttttgttcggtcaatttcgcggcttccagagccacctttctttcctgctcaagacgcatttgcctggcacgcaaagtcttctttgccttgttgcgagaaataagcataaagtcggaagtatccatcacaggcacctgttctccgataaaatctaaaaagagagcgtatttaaagcataccaaataagcctaccgatgagctattagctcccttacatttattttttatattgggaacttctttccatgcctgcaccgtattcgataaactttcctttcccacatcctcgacagttgaattatctaaatccatatcgtccgtagctgaagcctccagatactcgaacagtttatttattttggccaaatcctcaacgagcgtacgctctttgttctttggatgcggcacacattcttcggcaacaggacttagatttccggccggattgttggtattacccacggaattgtttgttttgccgccattattcaaagaatttggcggcattggcttctttaagtagtcggagagtgtgcgactttttatcaaattgtacatgattattgtattgtaattttttttttttcaaattttttaacactttgtcaaatcttgttttgttagacagttgagatgcgtttcgtttggttgccagttgagaagtgattcgatttgatcggaaaccctgtcaggacagtcaaactgactgacagctaaagcatgggtatccagatatgtatatatgagttatttcttttacccaacaaacaatttacttaaagctaaactaaactaatatatcgtacatacatttcctattcaaatttaagttaaagttggactgagagtccagctcacctgaaatgcaaagtgcagctgaacgatccattcggagttggcgtgcgccataatgtgtcgctcctcccagaagaacgcggagtccggtcgcttcatcatctcgaatttggacagccgcttcatggcgtacacctggctggaggacttgtgccgcaccagctgcacctctccaaaggcgccggcgccgatgagtttgataaaatggaaatcctcgacgttcatgcgcagctgattgatctgcattgccaatggtttgtctgcaaaacgaagaagtgaaagtataataaccgattatcattgggataatagacataaccactcacatttggccgcatactgctcgatgttcttaagccgcctcagggactcgtggtcacaatcgctgaccaaggccgacaccgtgtccagcaggcagtccacattgcagatgctggtcggatcgcgcatctcgcgctcgagcgtattcgccctgggaaaacggaaatatgaaaagagagatatagttaatatatggtaaagagatattgtaaattagaagtgttccaatatacgaaattaatcatctgctgtgtctgagtgtttgattgttcaactggttcctcaccgcttggtcgtcatgcaaatcgctcgcataaacaaacaaacaaataacgaacaaatcaaataaaatgaaactgggaaaacgaggaggaactatgagggaaagtgcgcagattactcatggacgggacgtgtaaacaccactttccgggtacacccaccccatcacccaggcaaacagctgcggtccaagtaatggcattaataggttcgcacatcgtttctaaatttaagatttcctattattaacgattcaacgaattcgagtggccgtgaattggatataaacattattattgaagggaggagttgcagcccatgatggcggggcggcaatttacagatcgaaataagtaattctagatcaattcgacagtagagtacttaagtgctaacacattgaccgcaactgtctgcacagcgacagtgtaaacaaaaacagcgacaggctttcagatcttggaattgaagtggcggtgagtcagtggaggagcggacagacaccgaatgccccggagatttgtcccaatcgggcgctttttagcggcagacaaatgggcggcacatgatacggatacagatgaaggcgttatcgcactggaaacactagccaccattgataacctggcataggcatagtccagctaatgttaggggagtccaaagtgccaaagtagtggaggagggggcgaggaggggccttgactttatcaccccacgctgttggcgactctgataaaatgaaatggaatggaatggaatggaatggaatatgcaatgcaatgaatgcaagccatgtgcaggccactgacagcaaacttgccgttgatacggcgcacttgagcagttggagctgatacaatgatgagcacactggaggttctaaccgccgtgcgaatggaaccaactgcccaccttgttggtggacacacatcggtacacagatatcacaaggaaaaatcaagttgttatctttacaactgatatagaattaataatattcgtggaatattaaatggcttgattttgattcaggcacaatgactttcatttatacaaacatatttatcaggggagccggttaatttatgcattttcatgaatcaaatatttacgtaactatagtatagtaaaaagcatagtacgctatattattttatcagtaagtgcggattttaaaatctcaaaaaacaaaaacactgctctgattcaccaagcgtttcattctttataaatgatattaagaatatacaaattgcttatttacttttgaatgtaaacaaaaaggtaaggttcattcttcggagagtgtatgtatgtacataaatcatggaaaataaaatcttgcgaatgtaaatatatagaaaattaattataacaattaggtatttgcatacgaggttactagagcatgggaaaagcgctctttcaaatggaatttctcggcaaattaaactacatattcggcaaagaatgaaacaattaaatttggcctgccagtgcgttggttctgaatttctaaatttaaaggcattttccggtcaaaaactaattcccgtaaccaagatttatgtgcaattagcaagatgcaagatgtcggagatgcggagtcagtctgtcagcgattgggaatcgaatttcggtgcccagcaagcaaaagtcagactcagatgcaggagcaggcaaactgcgatgacagtcggcgctaaaaattgatactaaaaggtgtttgaattgttgtgatttcatcatcgccacttacggcatgacagaaaagccaaaaacaaaacgctcaagcagcgggtaatagcagcacacacacacaccatacacaaaagcaaacaacttgggaaagtggaattttcaaaaatgctgcgatgaattttcgttgccgctgttgatttcgatttggccaaagcggcaaaatggcaacaacaacataattatgagcaacattattgacaacaacaacggcaataataatacataataaccaacgacgacgatgacgacgacgacgacaacattatcgtcacctatagacaatataattttcaacttaatttatacaacgtcgccaaattcgatctgccagtttttacaaattgaacgcttcacattcaacacacagagatagagagtggtactgcatctgcgttgcagaatctcttcacaccttattaattctaattaattatttgcccaggcagcacaaaggaactgttcggcttttataaccaaatgcgcattgcaattggccattgttagtacgcaaatgccttaacgtttgcttcgcttatgactgcttacagcagataccgagtggggatgggtaattaaatttaagtatttatatgcatactcgacgctgcggaattgctgggcaaattgtattctcggaatttggaatgcaagcgaaccaggacgacaactggtagctgagagctggatgctgaatgctgaatgctaggagcgtggagatgagaacaacgtaccgttccggctcgcacgaatggagggcggcgggcattagccatgtccccatgccctataccgtctactgtccaatggaagaaaccggcgtggtgctggctatctattctacctttttggcccaaaacgatgcaaacgatgcagccgatgcaacgcgacgcctgcaactgacaaacggcggcatcagccactgtgcgttcgttttagttcgcttttcgttttcgttttggttttttttctttttggtttggttacaaattttaatgcgaaaatggcaaatttattataaagtcgccccccgttttgttcactcgcttgtcaatttgattgccgcgctgtcgctttgaacatgagatatggaaggtgtttgccagcggtgtattactttttgatttgttttggccaggcccgtttggcttgcgctgaattgtgctagctggctagttggctggttaggtggttagctggttagctgcttagctgcctgcttggcttggtcagttgaacaaatcacaaatctgtctgtacaaatcgcacgtatctgtgcgatggctactgccacttctacttctacttcgacttctactattgctattgctgctgctgctgctgctgatgctgccattcaggtgacaattaattgagtggagcagtcgcttttgggccgccatctcgtgcactcaccggcgccttcgttccacatccatgctgcgctgcttggtcacagtttctcgtccagctggcatgcaaatgcaagataacaagctgatactgctgctccagctgctgcttcctgttggtcaactgctgctcctgtgctgcaactgaaagcgaagcaagggtttaacagagttctcttcggggtacacatatttatattgtacatttacctgccaggagttgttggacgtctgtctatgctgggaatgctaatagtaatgaggagaggaggcacgcgtcaagcgctagttgtttgctgtttgctggcgatgaggtcacgagtgtttcgttggatttctggctaactgctgccactgaacgccaatcgaatacggatggggatgggaatgggaatgggtatgggtatggggattgggcacttggcgctggcttcttttggtggagtgccgccaacgccacatgcggacgcagccgagcacccgggcgttcccaggtgcgtttcccacacggcaggcaggtgtgctatcgattcccggaaaatgctatcaatctagtttacttcctgtgcaaatgggatcgtaatgaccaggatgatcacgttgaccacgatggattgttgggtaaacaagggaacggggattattgtccgcagtccgcttggcatgcaacagttgtgtcaacacttgtggccaaaaacctggccaaaatgtgtcgaatgcggcggattggtggtgttgaaggtgggcttttgtttctcggccttttgagttgttggtttttgtgtgccccaatcaagtagctttttccttcttctatttttttgttaattccaacgatacctctgtgcacacacacttacacgagcgcacgcacaccagtgcactgcgaacggcgaacgtagcaagcgctacaacaacaataacaaggcgcttcacagacacacacacacgcgcgcacacaccgatgtgcgtcacaccgacgtactgtccgtcggcagcgggggaaacgcacgggggggcgggacgggacgggggcggctgaccgcccaaattgcgaatgtccagtttcggccgcggccaaatagatcaatttggtttcaattagacgctgcgcgttgcacttattttatttcggctcggtgctggtagagatggcaattgtgtttacatatcgaagttgaagtatcgaagtcactaggcgccgatgaaaataccagaatataccagggccaacaggtggcgctccaaatggcgatggtgctgcggcaatatcggttgtctgcgtcatcgatgggccgcttgttattcgatagactcagaaactagcttcatgaatagttatgtaaatcggttgctaacaaaataaaaagcagttatttatgaataaagtgatacagcaaaatatgaattgtactacgcattctttgcccacattgaaaatatactaatacgaaaatgcatgtttagacaaggtcttcaaatgccaagtaatatataatataatcttggtgtgctcattaatttaaatatttttaaaaataactataaattgaacacatacgtgttagagtatcattaaccgaatcttcgatagttcgccgcgccggcattcgattaatcgatactattgctggtggcaggcccagcactattaaccgcagccaacttcacgcgccttgttcttttttccggttgactttaacgagaaaggttgtgcacgaattcttttcaagtgaattatctttttttttatgttttgaatgggtgaaattcaatgaaagagcccacgccaagtggcaaatgacacaatgggccggccgtaaacacgaaaggacagcttttttcgggttaaaacttcggctggcaattttttgttgtgcccgtgcatgtgtgtgtgcgagggagagagagagagagaaagagtgtgtctgtgagagaatcgtggaaatcgcgacaacgtgtttttggcagcattgtaatagattccccatttgtttttcccgttctgcccgcagatgccaggcgtcacagtgaaggatattgaccagcacgcggttaccaaggcggtcgccgtcttcttgaagaagtgagtactgaacatcaagtatatttccaccacataacctcacaatccatttgtttatccccccccaaaaaaaaaaaaaaaaacacgaaaaaaaccaaataggactggcaagttga

SEQ ID NO: 20738 - DNA, 6291 bp, DROSOPHILA
gcgcctagtgacttcgatacttcaacttcgatatgtaaacacaattgccatctctaccagcaccgagccgaaataaaataagtgcaacgcgcagcgtctaattgaaaccaaattgatctatttggccgcggccgaaactggacattcgcaatttgggcggtcagccgcccccgtcccgtcccgcccccccgtgcgtttcccccgctgccgacggacagtacgtcggtgtgacgcacatcggtgtgtgcgcgcgtgtgtgtgtgtctgtgaagcgccttgttattgttgttgtagcgcttgctacgttcgccgttcgcagtgcactggtgtgcgtgcgctcgtgtaagtgtgtgtgcacagaggtatcgttggaattaacaaaaaaatagaagaaggaaaaagctacttgattggggcacacaaaaaccaacaactcaaaaggccgagaaacaaaagcccaccttcaacaccaccaatccgccgcattcgacacattttggccaggtttttggccacaagtgttgacacaactgttgcatgccaagcggactgcggacaataatccccgttcccttgtttacccaacaatccatcgtggtcaacgtgatcatcctggtcattacgatcccatttgcacaggaagtaaactagattgatagcattttccgggaatcgatagcacacctgcctgccgtgtgggaaacgcacctgggaacgcccgggtgctcggctgcgtccgcatgtggcgttggcggcactccaccaaaagaagccagcgccaagtgcccaatccccatacccatacccattcccattcccatccccatccgtattcgattggcgttcagtggcagcagttagccagaaatccaacgaaacactcgtgacctcatcgccagcaaacagcaaacaactagcgcttgacgcgtgcctcctctcctcattactattagcattcccagcatagacagacgtccaacaactcctggcagttgcagcacaggagcagcagttgaccaacaggaagcagcagctggagcagcagtatcagcttgttatcttgcatttgcatgccagctggacgagaaactgtgaccaagcagcgcagcatggatgtggaacgaaggcgccgggcgaatacgctcgagcgcgagatgcgcgatccgaccagcatctgcaatgtggactgcctgctggacacggtgtcggccttggtcagcgattgtgaccacgagtccctgaggcggcttaagaacatcgagcagtatgcggccaaatacaaaccattggcaatgcagatcaatcagctgcgcatgaacgtcgaggatttccattttatcaaactcatcggcgccggcgcctttggagaggtgcagctggtgcggcacaagtcctccagccaggtgtacgccatgaagcggctgtccaaattcgagatgatgaagcgaccggactccgcgttcttctgggaggagcgacacattatggcgcacgccaactccgaatggatcgttcagctgcactttgcatttcaggatgccaaatacctatacatggtgatggactttatgcccggcggcgatatagtctcgctgatgggtgactacgacatcccggagaagtgggccatcttttacacaatggaggtggttctcgcgctggacaccattcacaatatgggcttcgtgcatcgggacgttaagccggataatatgctcctcgacagctatggccacctgaaattggccgactttggcacctgtatgcgaatgggcgccaatggccaagtggtgtccagcaatgccgttggcacgccggactacatcagcccggaggtgctgcagtcgcagggcgtggacaacgagtacgggcgggaatgcgactggtggtcggtgggcattttcctctacgagatgctgttcggcgagacaccattctacgcagactcgctggtgggcacctacggcaagatcatggaccacaagaactcgcttagctttccacccgaggttgagatcagcgaacaggcgaaggcactgatccgcgcctttctcacggaccgaacgcaacgtttgggtcgctacggcatcgaggacattaaggcgcatccgtttttccgaaatgatacctggtcgttcgacaacattcgcgagagtgtgccgcctgtggtgcccgaactctcctccgacgatgatacgcgaaatttcgaggacattgagcgcgatgagaagccggaggaagtgtttcccgtacccaagggcttcgatggcaatcacttgcccttcatcggctttacgtatacgggtgactatcagctgctgtctagcgacaccgtggatgcggagtcgaaggaggccaatgtggcaaacagcggggcggccagcaataatcacggccacggtcataatcaccgccatcggccgtcgaattccaacgagctgaagcgcctggaggcgctgctcgagcgggagcgtggcaggtcggaagccttggagcagcaggatgctggactgcggcagcagattgagctgataacaaaacgcgaagcggagctgcagaggattgcctcagagtacgagaaggatctggctttgcgtcaacacaactacaaggtggccatgcagaaggtggagcaggagatcgagctgcgcaagaagacggaggcactgctcgtggaaacgcagcgcaatctggaaaacgagcaaaagacgcgggcacgcgacctcaatatcaacgacaaggtggtctcactcgaaaagcagctgcttgagatggagcagagctacaaaacggagacggagaacactcaaaagctgaaaaagcacaatgccgagctggacttcacggtcaagtcgcaggaggagaaggtgcgcgacatggtcgacatgatcgacacgctacaaaagcataaggaggagctcggccaggagaatgccgagctgcaggcgctggtggtgcaggagaagaatctgcgatcgcagctcaaggagatgcacaaggaggccgagaataagatgcagacgctgatcaacgacattgaacgtactatgtgtcgcgaacaaaaggcgcaagaggacaaccgggcgttgcttgagaagatcagcgacttggagaaggcgcatgccggcctcgacttcgaactgaaggcggcccagggccgctatcagcaggaggtcaaggcacaccaagagacggagaagtcgcggctcgtctcccgcgaggaggccaatctgcaggaggtaaaggcgctgcagtccaagctcaacgaggagaagtccgctcgcatcaaggccgatcagcattctcaggaaaaagagcgtcagctgagcatgctgtccgtggactatcgccaaatccaactacgtctccagaagctcgaaggcgagtgccgccaggagtcggagaaggtggccgctctgcagtcacagctcgaccaggagcacagcaaacgcaatgccttgctatcggaactcagcctgcacagctcggaggtggcccacctgcgatcccgcgaaaaccagctacagaaggaactgtctacccagcgcgaggcgaagcgacgcttcgaggaggacctcacccagctaaagagcacacaccacgaagcgctggccaataaccgtgagcttcaggcccaactcgaggcggagcagtgcttctcgcggctgtacaagacacaggcgaacgagaatcgcgaagagagcgctgagcggctgtcgaagatcgaggatcttgaggaggaacgcgtctcactcaagcaccaggtacaggtggccgttgcccgtgcagactcagaggctttggcccgatccattgccgaagagacggtggcggatctcgaaaaggagaagactatcaaggagctagagctgaaggacttcgtcatgaagcatcgcaacgagatcaacgccaaggaggcggccctagccacgctcaaggaggccgaaaacgaactgcacaagaagctgggccagaaggcagccgagtacgaggatcttgtccagcagcacaagaagcagcaggaggagcttgcgctgatgagaagcagcaaggacgaagagatcaccaagctgctggataagtgcaagaacgaagtgcttctcaaacaggtggcagtgaacaagttggccgaagtgatgaatcgtcgcgactccgacctgcccaaacaaaagaacaaggcgcgctcgacagccgagctgcgcaaaaaggagaaggagatgcgtcggctgcagcaggagctctcgcaggagcgcgacaagttcaaccagctgctgctcaagcaccaggacctgcagcagctgtgcgccgaggagcagcagctcaagcagaagatggtcatggagatcgattgcaaggccaccgagatcgagaacctgcagagcaagctcaacgagacggcgtcgctctcctcggcggacaacgatcccgaggatagccagcactcctctctgctctccctcacacaggactcggtcttcgagggctggctaagtgtgcccaataagcagaatcggcgacgtggccacggctggaagcggcagtacgtcattgtgtcgtcgcgcaaaatcatcttctacaattcggacattgacaagcacaataccacggatgccgtgctcatcctggacctgagcaaggtgtaccacgttcgtagcgtcactcagggcgatgtcatacgcgccgatgccaaagagattccacgcatattccagctactgtacgccggcgagggcgcctcccatcgtcccgacgagcagagccagttggatgtgagcgtgctgcacggtaattgcaacgaggagcgcccgggcaccattgtccacaaaggtcacgagttcgttcacattacctaccacatgcccacggcttgcgaggtgtgcccgaagcctttgtggcacatgttcaagccgccggcggcttacgaatgcaagagatgccgcaacaagatacacaaggagcatgtggacaaacacgacccgctggcgccctgtaagctcaatcacgatccgcgcagcgcccgtgacatgctgctgctggccgccacgcccgaggatcaatcgctgtgggtggcgcgcctgctgaagcgtatccaaaagagtggatataaggcggcttcgtacaacaacaacagcaccgatggcagcaagatatcgcccagccaatcgacgcgctcctcctacaagccgtatgcggttaatgtccaacgctccgccacgctgccagccaattcatcgctgaaatgaacgccaaccgatccgatgcgatcccagatcccacatcccagatgccacatgccagatcgcaggcgtggcaatgcagcttgagccggagcagtcgcgactctccagccccaacgaaactagcgctatgcaaactgaaactgatacagaaagaaaataactgagagaaaaagagagagcaactgcaactgcaacttgaatggcaactgcaactactatcttaaatatacgctccaaacatacatgctacagtaatctacaaatattttttgagtaatttacaagctaaactaaactacaactaaactaaaactaaaactaaaactaaaactaaacctaatactaaaactaaagctgtatcttaaagaacatgtaatgccaatgcaactcgtttaacgcttacctaacatcaaactggatggtgagaaaaacatatgtatagcagaagtggcaacgtcaagcgggtcagataaaccatggatttgtcgcatcgtttgtactttgtatactatattaatattatataaatataaatacgatatggtattgtacggctggcttgctattgtattctgtcaccgcgcccagcacaacgatgaaagctgtacttagttaagtgaatccatgtcgcagaaggagagatgaaagttcgatgaagttgtttcctccatcatccaccttctctttacatattgatgccttgtaaggactttttttttttacacatatacataatacatatacataattgttgttgttgtgtagcgaatcggattggccaaacgttgttcgtagtttgtaaacagaaacagagctatacaatacattcgtagagacatagagagcatatcctgtaagccacatgccagctaacaacaaacgaatcgagcaatcagcaaacccagaactaagttaaagccactttacaaagccttgacttgtattccatttaatgagcactctttttttttactttaataatgtagttttacgtgtaccagaagcgagtatcaatcagttacttaaatagaaaacgcgaaagcaaactaaa

SEQ ID NO: 20739 - protein, 1390 aa, DROSOPHILA
MPAGRETVTKQRSMDVERRRRANTLEREMRDPTSICNVDCLLDTVSALVSDCDHESLRRLKNIEQYAAKYKPLAMQINQLRMNVEDFHFIKLIGAGAFGEVQLVRHKSSSQVYAMKRLSKFEMMKRPDSAFFWEERHIMAHANSEWIVQLHFAFQDAKYLYMVMDFMPGGDIVSLMGDYDIPEKWAIFYTMEVVLALDTIHNMGFVHRDVKPDNMLLDSYGHLKLADFGTCMRMGANGQVVSSNAVGTPDYISPEVLQSQGVDNEYGRECDWWSVGIFLYEMLFGETPFYADSLVGTYGKIMDHKNSLSFPPEVEISEQAKALIRAFLTDRTQRLGRYGIEDIKAHPFFRNDTWSFDNIRESVPPVVPELSSDDDTRNFEDIERDEKPEEVFPVPKGFDGNHLPFIGFTYTGDYQLLSSDTVDAESKEANVANSGAASNNHGHGHNHRHRPSNSNELKRLEALLERERGRSEALEQQDAGLRQQIELITKREAELQRIASEYEKDLALRQHNYKVAMQKVEQEIELRKKTEALLVETQRNLENEQKTRARDLNINDKVVSLEKQLLEMEQSYKTETENTQKLKKHNAELDFTVKSQEEKVRDMVDMIDTLQKHKEELGQENAELQALVVQEKNLRSQLKEMHKEAENKMQTLINDIERTMCREQKAQEDNRALLEKISDLEKAHAGLDFELKAAQGRYQQEVKAHQETEKSRLVSREEANLQEVKALQSKLNEEKSARIKADQHSQEKERQLSMLSVDYRQIQLRLQKLEGECRQESEKVAALQSQLDQEHSKRNALLSELSLHSSEVAHLRSRENQLQKELSTQREAKRRFEEDLTQLKSTHHEALANNRELQAQLEAEQCFSRLYKTQANENREESAERLSKIEDLEEERVSLKHQVQVAVARADSEALARSIAEETVADLEKEKTIKELELKDFVMKHRNEINAKEAALATLKEAENELHKKLGQKAAEYEDLVQQHKKQQEELALMRSSKDEEITKLLDKCKNEVLLKQVAVNKLAEVMNRRDSDLPKQKNKARSTAELRKKEKEMRRLQQELSQERDKFNQLLLKHQDLQQLCAEEQQLKQKMVMEIDCKATEIENLQSKLNETASLSSADNDPEDSQHSSLLSLTQDSVFEGWLSVPNKQNRRRGHGWKRQYVIVSSRKIIFYNSDIDKHNTTDAVLILDLSKVYHVRSVTQGDVIRADAKEIPRIFQLLYAGEGASHRPDEQSQLDVSVLHGNCNEERPGTIVHKGHEFVHITYHMPTACEVCPKPLWHMFKPPAAYECKRCRNKIHKEHVDKHDPLAPCKLNHDPRSARDMLLLAATPEDQSLWVARLLKRIQKSGYKAASYNNNSTDGSKISPSQSTRSSYKPYAVNVQRSATLPANSSLK

SEQ ID NO: 20740 - DNA, 3323 bp, DROSOPHILA
ccttgggtacgggaaacacttcctccggcttctcatcgcgctcaatgtcctcgaaatttcgcgtatcatcgtcggaggagagttcgggcaccacaggcggcacactctcgcgaatgttgtcgaacgaccaggtatcatttcggaaaaacggatgcgccttaatgtcctcgatgccgtagcgacccaaacgttgcgttcggtccgtgagaaaggcgcggatcagtgccttcgcctgttcgctgatctcaacctcgggtggaaagctaagcgagttcttgtggtccatgatcttgccgtaggtgcccaccagcgagtctgcgtagaatggtgtctcgccgaacagcatctcgtagaggaaaatgcccaccgaccaccagtcgcattcccgcccgtactcgttgtccacgccctgcgactgcagcacctccgggctgatgtagtccggcgtgccaacggcattgctggacaccacttggccattggcgcccattcgcatacaggtgccaaagtcggccaatttcaggtggccatagctgtcgaggagcatattatccggcttaacgtcccgatgcacgaagcccatattgtgaatggtgtccagcgcgagaaccacctccattgtgtaaaagatggcccacttctccgggatgtcgtagtcacccatcagcgagactatatcgccgccgggcataaagtccatcaccatgtataggtatttggcatcctgtgagaaaagattttatgaattaattgctgatctaaaacagatgtaatctacttggctcttaaaatgtaagcaatactttatatactaattatttacaatttccgagtgggctaacaatgatattttttattatttagaatgacaaatttaagtaataaaaaatacataggttggtagaatacaaattacaaatagaaactgatccaaatcgaatataaatcgaatcaaaatgtaagcccaacaagttgcgtagaattgtgcgtggttatcatattaattgcccttcagtaactttttatcaatcaaggcaacttcagcaggcacatcaagatcgtctggttgcggttccaacttcagcaattcatcaatagtataacgtataacatttcctttcttcacttgacgatctttctgctcgccttcaattggcattggctgacttgccatcttttgaaaattattatttgtacgagttaagtttgtccaatcaatatttgctccataatgagtgctattccctttgcgtttctccgccccaagttcgttagttgaattggccgaagtggcgttctttttagtttccatcttggccttaagcttgaaacgacgctgttcgtcccattccttggtggtgggtatgtatcttttggcggtcatcgtggtggccggagtcatctggtccactgtggtttgcgagttttcggctttaagacgacgctgctcttcccattccttgtgggtgggtatatatcttttgtgagtcaaagcggccaccggaccgtcagccttttggttttcgtcttcttcgacagctagttgcatctgctcctgatccaattgcatcgaattctcagagaaaagagcacgctcgatctgcttctttttggtggctcgcatgcgattgactccagtgcgttcatccatagaatatttgatgggcgaacgagacagatgcacaactggctgggcttcattatcgttgctatcgttgcctggaaccgaagaaggatcccccatgcctttttgttcggtcaatttcgcggcttccagagccacctttctttcctgctcaagacgcatttgcctggcacgcaaagtcttctttgccttgttgcgagaaataagcataaagtcggaagtatccatcacaggcacctgttctccgataaaatctaaaaagagagcgtatttaaagcataccaaataagcctaccgatgagctattagctcccttacatttattttttatattgggaacttctttccatgcctgcaccgtattcgataaactttcctttcccacatcctcgacagttgaattatctaaatccatatcgtccgtagctgaagcctccagatactcgaacagtttatttattttggccaaatcctcaacgagcgtacgctctttgttctttggatgcggcacacattcttcggcaacaggacttagatttccggccggattgttggtattacccacggaattgtttgttttgccgccattattcaaagaatttggcggcattggcttctttaagtagtcggagagtgtgcgactttttatcaaattgtacatgattattgtattgtaattttttttttttcaaattttttaacactttgtcaaatcttgttttgttagacagttgagatgcgtttcgtttggttgccagttgagaagtgattcgatttgatcggaaaccctgtcaggacagtcaaactgactgacagctaaagcatgggtatccagatatgtatatatgagttatttcttttacccaacaaacaatttacttaaagctaaactaaactaatatatcgtacatacatttcctattcaaatttaagttaaagttggactgagagtccagctcacctgaaatgcaaagtgcagctgaacgatccattcggagttggcgtgcgccataatgtgtcgctcctcccagaagaacgcggagtccggtcgcttcatcatctcgaatttggacagccgcttcatggcgtacacctggctggaggacttgtgccgcaccagctgcacctctccaaaggcgccggcgccgatgagtttgataaaatggaaatcctcgacgttcatgcgcagctgattgatctgcattgccaatggtttgtctgcaaaacgaagaagtgaaagtataataaccgattatcattgggataatagacataaccactcacatttggccgcatactgctcgatgttcttaagccgcctcagggactcgtggtcacaatcgctgaccaaggccgacaccgtgtccagcaggcagtccacattgcagatgctggtcggatcgcgcatctcgcgctcgagcgtattcgccctgggaaaacggaaatatgaaaagagagatatagttaatatatggtaaagagatattgtaaattagaagtgttccaatatacgaaattaatcatctgctgtgtctgagtgtttgattgttcaactggttcctcaccgcttggtcgtcatgcaaatcgctcgcataaacaaacaaacaaataacgaacaaatcaaataaaatgaaactgggaaaacgaggaggaactatgagggaaagtgcgcagatta

SEQ ID NO: 20741 - DNA, 1259 bp, DROSOPHILA
attacaatacaataatcatgtacaatttgataaaaagtcgcacactctccgactacttaaagaagccaatgccgccaaattctttgaataatggcggcaaaacaaacaattccgtgggtaataccaacaatccggccggaaatctaagtcctgttgccgaagaatgtgtgccgcatccaaagaacaaagagcgtacgctcgttgaggatttggccaaaataaataaactgttcgagtatctggaggcttcagctacggacgatatggatttagataattcaactgtcgaggatgtgggaaaggaaagtttatcgaatacggtgcaggcatggaaagaagttcccaatataaaaaataaatattttatcggagaacaggtgcctgtgatggatacttccgactttatgcttatttctcgcaacaaggcaaagaagactttgcgtgccaggcaaatgcgtcttgagcaggaaagaaaggtggctctggaagccgcgaaattgaccgaacaaaaaggcatgggggatccttcttcggttccaggcaacgatagcaacgataatgaagcccagccagttgtgcatctgtctcgttcgcccatcaaatattctatggatgaacgcactggagtcaatcgcatgcgagccaccaaaaagaagcagatcgagcgtgctcttttctctgagaattcgatgcaattggatcaggagcagatgcaactagctgtcgaagaagacgaaaaccaaaaggctgacggtccggtggccgctttgactcacaaaagatatatacccacccacaaggaatgggaagagcagcgtcgtcttaaagccgaaaactcgcaaaccacagtggaccagatgactccggccaccacgatgaccgccaaaagatacatacccaccaccaaggaatgggacgaacagcgtcgtttcaagcttaaggccaagatggaaactaaaaagaacgccacttcggccaattcaactaacgaacttggggcggagaaacgcaaagggaatagcactcattatggagcaaatattgattggacaaacttaactcgtacaaataataattttcaaaagatggcaagtcagccaatgccaattgaaggcgagcagaaagatcgtcaagtgaagaaaggaaatgttatacgttatactattgatgaattgctgaagttggaaccgcaaccagacgatcttgatgtgcctgctgaagttgccttgattgataaaaagttactgaagggcaattaa

SEQ ID NO: 20742 - protein, 413 aa, DROSOPHILA
MYNLIKSRTLSDYLKKPMPPNSLNNGGKTNNSVGNTNNPAGNLSPVAEECVPHPKNKERTLVEDLAKINKLFEYLEASATDDMDLDNSTVEDVGKESLSNTVQAWKEVPNIKNKYFIGEQVPVMDTSDFMLISRNKAKKTLRARQMRLEQERKVALEAAKLTEQKGMGDPSSVPGNDSNDNEAQPVVHLSRSPIKYSMDERTGVNRMRATKKKQIERALFSENSMQLDQEQMQLAVEEDENQKADGPVAALTHKRYIPTHKEWEEQRRLKAENSQTTVDQMTPATTMTAKRYIPTTKEWDEQRRFKLKAKMETKKNATSANSTNELGAEKRKGNSTHYGANIDWTNLTRTNNNFQKMASQPMPIEGEQKDRQVKKGNVIRYTIDELLKLEPQPDDLDVPAEVALIDKKLLKGN

SEQ ID NO: 20743 - DNA, 3138 bp, DROSOPHILA
cgacttcaccggtgaaccggaagacaatcattccggccaattatcggtttgtttacccagaattcctgcccgatccgaaggtggagtggcgcaacctcgtgcgcgagaagctggagcgactggacatgctggatcgccgcaaacagatcgacctgcccgagttctacgttggatctgtgcttgcggtgacaagttcggatccccatgccgctggcaaaaccagtcgatttgtgggtatctgtatcaatagggatcgctgtggactgcgcgcccgtttcattcttcgcaacgtgattgatcaccagggaatggaggtggtctacgagctgtatgatcctaccatcctaaagatcgaggtgttgcggctagagaagcgactggatgacagtcttttctacctgcgggacgctcttccggagtacagtacttttgatgagaacatggaggccgagccgctcgaggagggtgctccggtgccggtgaacgacattaaggtggtgctccgtccgcgtccatggctggagcgctgggaacgacagaatctgcgtggtgtggccaacatcgatgagtatctaaaagacaagcatcgcctgtcggcggccaaggtgcagaaaccatgggagaagtacgacatgatgaaggactaccgcagctcgattcccgaggaggagcagacggagatcttcgccgaggtgcacacggaactgcacgccctggagctgcagcgaaaacgcaacaagcgcaagcgcactttcattaagcccaagcagctggcgtaattgcatttgttgttcattttttagaataaaaatatcgaaaaaatgttgttttatagttttccacgattttactttataaagatggttttatcatcgaaaaaatgactgaggctgcaataatatggtttggataacgctaaattaattagtttattagtcataattgtagtatagtggcttagcaactaaacgcagaataatttacaacgcacattgcattactaatatacgcgatacttgtagaaattgacaaaggatatcgttgcgttccaaccaataattgtgacgaccagaaacagtagaaagatgatgggcagggcgatgagaatgatgcgggtgtttttcagatggggaatgcctgcaggaggaaagctttttaattcgagaacttgatgatgcatttaataacttacaattgtatcccagaaatgtgatgtacacataatagcccatgcccatcaaccaaaaggtgttgcccagaaatcgcgagatgaaccacgtttggctgatcagccagttgtagaagaacagctggatgaagtgcagcagcatcagtggcggaaagaaggcatttagatggacatcgaaggcatagccccactcgatatccggctccaggctatttgtgcgcagataccgattcgtcaccgcccagaagaacgaggctattatgatgcccacgaaaatacagtccacgaataccacatagaatatgaacgagatgctctgccagaaagacagtcccagcacatacgcaaagcccagggaggtgactgttgaaagatacatacattattagacggcctttttttgattagttctaacaggttgtttctatataaggctggagtacaatagtaatcttattggacactgatgaaattcgttaactttaagcttttaactagatataagcagaagagaagttattagtgcccaactgtagatatggtacaagatgacaacagatgcagatgggatctccctcctcccttttggagtgtgaatgcttgggcattagaactcaccacataggcagacgaccaggaggaccagaaaggccggatcgtcgcgggcgaactgtgacttggtctgtttccggtagttgaagttccggtacaccttttggggcgccacaaagaggtagagcatctgccacagggcaaactcgaagtccatttgattgaacttgagcagacgtcgcaggtatttgtagctcttggtggtcgccgagaggcagtccctccggtggttggcgggtggcggtaatggcgaatggagacgcgaggcactcgagtagccggaaaccaccgacggcgtcggcgattgtgtatacttaacgtggctatattgagtcattttgttttgtttaaaacaaatttcttgtgttttcagcagagtggctgcgccctcagcgccaagaaataccgattttccccgtataaagtgctaaaataagccaaagaaaacaagatgatgtggtgtcacgataagaaacagctgattggcgatgggagcgtgagagaatttcgcggctagaaacaatcggcaagtgccattaaaaatataccgtaaaatatattcatttaaatttacagtactttttacattcttagagaaaataaaattgtaagtatacagacatatttcacacgaattttattgcatatgcaagtgtaagatattcagtgatatttaactattccaccacaattcgtgtcacgtaaaaaagaagtccaatcgctcatctccaaacgaactgtcaattccaaatgttatgaaccgggtgccaaaaaatcagttccttgctcgactttgttttgagtaccaaatttaagtttctgctgctagatatatcgaataagtttaatcaaatttccagcacaaggtaagagcgatttccgttggcatttccagtaccaattgcaggcaacagatgcctccattttgcagcatgaatagatgttcgaatccgtggtttctgcgcgccgtgcgccatcacatacgtaatctccacgagatgaggattccatacgcccgtccggtgggcccaaatcagcgcaatttcacgttggagccgctgggaaatcgagaactcatccgtgtccacggggccgaggtggtgccattcctgcagggtcttgcgaccaacgatgtggcccggattcagtcgccggggggtcctgcctcaatgtacgcccattttctcaacaaggcgggcaggctgctgtacgacaccatcttgtaccgcaccaacaacccggaaaccatccttgttgagtgcgatcgggaggcttcctcggacttccgacgccatcttcgcacctaccgcgttcgcaggcgcattgaggtcgacagt

SEQ ID NO: 20744 - DNA, 828 bp, DROSOPHILA
atgactcaatatagccacgttaagtatacacaatcgccgacgccgtcggtggtttccggctactcgagtgcctcgcgtctccattcgccattaccgccacccgccaaccaccggagggactgcctctcggcgaccaccaagagctacaaatacctgcgacgtctgctcaagttcaatcaaatggacttcgagtttgccctgtggcagatgctctacctctttgtggcgccccaaaaggtgtaccggaacttcaactaccggaaacagaccaagtcacagttcgcccgcgacgatccggcctttctggtcctcctggtcgtctgcctatgtgtcacctccctgggctttgcgtatgtgctgggactgtctttctggcagagcatctcgttcatattctatgtggtattcgtggactgtattttcgtgggcatcataatagcctcgttcttctgggcggtgacgaatcggtatctgcgcacaaatagcctggagccggatatcgagtggggctatgccttcgatgtccatctaaatgccttctttccgccactgatgctgctgcacttcatccagctgttcttctacaactggctgatcagccaaacgtggttcatctcgcgatttctgggcaacaccttttggttgatgggcatgggctattatgtgtacatcacatttctgggatacaattgcattccccatctgaaaaacacccgcatcattctcatcgccctgcccatcatctttctactgtttctggtcgtcacaattattggttggaacgcaacgatatcctttgtcaatttctacaagtatcgcgtatattag

SEQ ID NO: 20745 - protein, 275 aa, DROSOPHILA
MTQYSHVKYTQSPTPSVVSGYSSASRLHSPLPPPANHRRDCLSATTKSYKYLRRLLKFNQMDFEFALWQMLYLFVAPQKVYRNFNYRKQTKSQFARDDPAFLVLLVVCLCVTSLGFAYVLGLSFWQSISFIFYVVFVDCIFVGIIIASFFWAVTNRYLRTNSLEPDIEWGYAFDVHLNAFFPPLMLLHFIQLFFYNWLISQTWFISRFLGNTFWLMGMGYYVYITFLGYNCIPHLKNTRIILIALPIIFLLFLVVTIIGWNATISFVNFYKYRVY

SEQ ID NO: 20746 - DNA, 2936 bp, DROSOPHILA
cgaagctaacgatcacaggctttaaaaaaacgcaaaatattagttttgttgtcggctgaaggcagcaagagcacttttcattttacagaagaccctgtagtgttcttatatttataaaacataacagttagggtgcataatatatcgcataatacatcgcaattttgaaggatctgtactttaaatgctattgtttcagagagcttttactgatgctacgtatatacatatgtatgtatggtatgttctactagggactcgcaccgtttcggtccacttggtgtaggcactttgaatcagcgtggagcagccgtagatcgagatcaggaacacgaacagccaaaagatgcgctcgcggaaggggcgctcctgctcgccaagatattggacaccatgtatggaagtgttcctgcagtattcatggtacgtggtgataaatccttcgcaggcgacggaacctgccttccttctcctcctgaatgtcaggtcgatgcccttgctgctgtcgagttccgaatccgatatggtcatggtgtctattccattcttgacgcgcacaaacacagcttcaagtaatccatgtgggttggagacgaaaacaacgtgaaagacaaatggcaaaacgagaattttttcccgtttcttggcagacctgccagattgacaggatcttggagagaacttgcaaaaaaacgttcggatggtgacaatttagcgatatattttacttccgaattaaattaaattttgttgaaattaacaaaaacgaaaaacaggtacatatttgctgcaactttattaattgtcattgttaacacgttatcccaattcattatttgcacattcgcctgtgttgttaaaaattaaaactccaaagaaaaatatttcaaaacgcagaaaagtggaaacgagttgaaaatccaaatcctcgttacgcctcgatatgtatcgataacgaatgcttcgtacacgatttgtactgtttacttaattattaagattcgtaattatttaaatttatttaaaatggcgacaaggtcttgtgcgtacaaggactgtgaatactattacgtaggccacgaaaacgcgctgaccaaaggaagaaccctgtttgcctttcccaaacaaccgcaaagggcgagaatctggcacgaaaacggccaagtgcatccaaagattccccatagccagctttttatgtgctcccttcactttgaccgcaagttcatatcctcctctaagaaccgaacgctcctcgtcggcgaggcagtgccgtttccgtacgaggaaagcagtagcaagccggaggaggagccccaacaagtggcttccacttcgcatgagagctactatataaacctgagcgacgatgagctcagcatcaacaatgtggacactacctcagttactacaagtaagtactataaatccaccgggccttcgaaatagagcgggttggattcatcatgtcggtgttgcatcttaatgctttattaacttctttaacattattttcagttgacgcagtccacgatagtccaccgcagaagcgcccgaaggaatcttccattgtcattgctctaaaggaagctgtgaaaatggaacccaatccgaatgcaggccgagttagagcagaacccgacaatatagatactactgaagtgtctgtgttcaacttcaagggacaggagtacgtacaaatgtctatggagtattacttgcaggaaaagcggaaaatggctaaacttttgcaagactataaaaatgctttaagaagcattaagaaacatatttcccaccttgacctttaactttatcaatgtaatacatgttgttcttctgtcaatttactgaacgttatcttagtttaaaagcacctgacgaattgggaaacaaacctaataatttattttattatacttggagaataaatactgataaatattaattaatttgttacactttaaatttcagcatttaatttctttcgtttaaaccttaaataccgcaaacaaatctaaattatactcagtattatctattggaaatatttttaaagtatttagttaaaatgtttacttttacaagcgcattaagatggtgtttgcctagatacttttagcttatgcgataccttagcatttgtaaataaaatgaaatgggtcctcaactaatcgctgagctccggggtatcttcaatatcgctgtctacatcaatgtcgtcgctcagatcctcgtcatgatcctgcagttcttcaggcacgcccaaaagaagacgtttgcgctgcagcagtgctgcccagctgagacgagtctcacaaagcggacactctcctccaactgggatgtaatgacctggctcgtcgcccagaaggtaattggccaggcacaccatatggcatgtcagccgacacatttgatttgtgcatcccaggcgggatttctccggttgctccatttcctgcatacaaaggtggcactcggaagcccacgccacaggtggaggaggtactgcatcatcaggtctcctacgttgtgaggcactaatggaaaccttgccactcacaatttccatgtgtttaggcagtgccttgctgaatggcctctcgtaatccgtttctagccagcgaacggtgagcggtaatctattccaagggccaacccccagcatattactaaggatcctaaagttgtagtcaaagaacgtctccctgggcagttttcgttttaattcagggtacattttaagcctagttgaaagcgacggctgttgccaagcccattcaaactggagtgccactgtattattcgggaatccgtgcacgatcattaccatcagccacggccctttgcgactggttttcctcgcgccaccgaaatcacaaccaagattgtgttggcgtatccgccgtttggggttcacggtgaagcccacg

SEQ ID NO: 20747 - DNA, 832 bp, DROSOPHILA
ttcgtaattatttaaatttatttaaaatggcgacaaggtcttgtgcgtacaaggactgtgaatactattacgtaggccacgaaaacgcgctgaccaaaggaagaaccctgtttgcctttcccaaacaaccgcaaagggcgagaatctggcacgaaaacggccaagtgcatccaaagattccccatagccagctttttatgtgctcccttcactttgaccgcaagttcatatcctcctctaagaaccgaacgctcctcgtcggcgaggcagtgccgtttccgtacgaggaaagcagtagcaagccggaggaggagccccaacaagtggcttccacttcgcatgagagctactatataaacctgagcgacgatgagctcagcatcaacaatgtggacactacctcagttactacaattgacgcagtccacgatagtccaccgcagaagcgcccgaaggaatcttccattgtcattgctctaaaggaagctgtgaaaatggaacccaatccgaatgcaggccgagttagagcagaacccgacaatatagatactactgaagtgtctgtgttcaacttcaagggacaggagtacgtacaaatgtctatggagtattacttgcaggaaaagcggaaaatggctaaacttttgcaagactataaaaatgctttaagaagcattaagaaacatatttcccaccttgacctttaactttatcaatgtaatacatgttgttcttctgtcaatttactgaacgttatcttagtttaaaagcacctgacgaattgggaaacaaacctaataatttattttattatacttggagaataaatact

SEQ ID NO: 20748 - protein, 169 aa, DROSOPHILA
MCSLHFDRKFISSSKNRTLLVGEAVPFPYEESSSKPEEEPQQVASTSHESYYINLSDDELSINNVDTTSVTTIDAVHDSPPQKRPKESSIVIALKEAVKMEPNPNAGRVRAEPDNIDTTEVSVFNFKGQEYVQMSMEYYLQEKRKMAKLLQDYKNALRSIKKHISHLDL

SEQ ID NO: 20749 - DNA, 8185 bp, DROSOPHILA
attggcattaatgtaaacactcgagagaggaaggaaaagataacagtacttgcccttgactccaatctgttcaaactaaaaaaggtacaatgagtcacccaattttccatttaaaaattcattgtttttatactatattaaatatttaagaaaataaacaaaaaatatgtcttttatcaaggaaagcataatcaagccaattcaaaacaaaatcatatagggaaacgacaaatataaatattttcgatctagttcgtaatcataggttcaagaacaaagttcgtattggacagcctgccaaatttaaagattcagcaatataaaagtaactaaagcaagagagaaggctatggtcgagttcctcgactatcagatacccgtcacccgtggcaacatgggtcaactaacttgcgctgggtatttgtctctagaatctgtatgcttaatctcaaccttctagcttttatagttcctgagatctcgactttcatacggacagacgtacatggccagatcggctattgatcctggtcaagaatatatgtacttcatatggtcgggaacgcttccttctgcctgtttcaacgaatctagtatactctattactctacgagtaacgggtagaaatataaaattgaaactattttgagtcatccctccaattggtaatttttttatatattaacggaaatttaaagtgcgttacaaaagtaaaaattcttttggtgctagtatgcttaacggggtggacatttcggcgttttccacacttcttgggaaatcactttagacaaatttgtaccaatgtcggtacttaatagtatttaactataacttaccttttgcctttggtgtgaataggctattaagccaaagagtaaacattcgtcgattgtaactcccttgtcatcgatgttggccaatacgtgacaacatcgatagtatcgataactatcaggttcaggttcgcctgtattgcactattttgcttcacacacgtaatttcggaatttgccagaaaaacaccgatctgctattgatcttagtccaaaattgcgtttttaagtcgaaaagacacttttcggcttttagatggatgaagactcggctacgatacagctgggggataggcgtctcggtaacgcggtcgatcatgatctgcttccagggccacccggcgtcgatgagaaaagcggaaacgagaactgcgagcccaggagcagtgggtcgggaaagcgcggcaagtcgaattccaggcgccgttccacatcccgtggtcggtcggattcccgcaacacatcgccgtcgaacacccggcgaaggcattccctgtcccgctcgctgactccaccgcgtcgtcgttacgattcgcccgattatgggcggtactcccgacggcgctttgatcgtgatcggcgacgctcccccgaacgccggcgctctccgccacgtcgcggacgacggtacggacgatcccggtcccgcagcatgtcgccccgacggggaggtcgatggtcaccaaaaaaaaaaccgtcgtcgccgccagtgccccctccgcatggaggaccacatcctcaaatgacccctggctatggagctatggccgcacatatctacggatcatacgtcgctccaccagatgtttacggtcaccaatatggaattccgcctaactcgtttccacctcagggaccggggtacggtattccaggtgccccgccggaccaaagctcttttggctctggctacggtccgcctcccacaagcgcgtgggacgtaaatggtacgtttctagacatttaacgccaaaagcccttcatttattaagcatattatttcctgcagtgtacggtcagcaggtgtggattaaccagcctatttctggggtccagccatccgcttcagactccctgatccagccacagaaggcccgcgaaactctctctggcaagacgataggcgaggagcagtcggtgccagcgctcgaaggcgcaggtttgacgcctcaggatggtaagtgtggaaatgaattacaatgtgatcactacgaacattcacatgcaaacctctcacattgttttattactgttgtcatgattacttgtacttgtaacttaattgcgcgcaaatgaatcgcataccagaaattaccaaaagtctagggtaaagatcagattaatcagaatctagaagtacacgcgctgcaagaactaaccaagaccaacccgagcgatagtctcgaaatgttaattcgtttcaaaaagaaaatgcagagtttccgtttttgtgtggcagtcgaaacaaacaattacgccaacctggacgaccgccgccccaactggctcttcattcaacgaggactggcagaacaagcaatcacggcgactgcatccgagtgtaattagccgatgaaatgcactcgagaatgcatttgtaaatgaaattttaacttttatttatctaggaagaatgtttattaattaaaacctatatatttatcccccatatatataccgtcgatcggcagctgttgcccaagaagcggagaagcaaaaggacgagcttaagaaacagcgcgctaactatgtcaaaaaggtatcgctgctcaagaaggaaatgaaagtacttaaggaccagcgcgaggacctggcagcaggcgatgccccaccctcgccaaccacaaagaatttcatcgaagaaaacgaccgcctgcaggtgaattgggatcccaaaaccttatctgttagccactctatgtaacctgttttcatcctgtatagatgcaaattaagaagaaacttgacacaattgaaaacgttatagatatgctgaacggcataattggctacgaagaagttgaagatgaaccatctaaccaaaagtcccatggcaagactcaaccggaacaacaggatagtcgctcgcactcctccagtgagagttctgcagatagctctgaatccagctcatcatctagtactgcttccgattcgtcatccgataacgaagacggggaaggggcaggcggcgccgtaggaagtccaaccaatcggctaaagcaccgcgccataaagtcgatgaagtcaaagcagctacatggtgaaatgaaggcagtgccaacccaagcacaaaattacaattttgtgtttttcgatcccgagcagcattggtgcgagagctgtggagtttttccaaagtctgctcgagactatttaaagcacttgcatgccgaggaacacatgaatcgagaaaccatagaaactccgtggcatgtgggtattgaccacgatccctttcccacatttgaaaacgcacctgccaggcgcgtccccgtgaggggcatgcaatttctggtgccggctaacgcttggttttgcaagctctgcagtgtttggattggagacttgcactgcgcttctgctcatcttaagtctaggcttcactccaataagtatcaggtgagtagtaatatacatcttttaaagctcttatgaaatatttactgtcacaaatattctttaccatgttaatttagggttttgtatttaattaataaaatatatatattaaatataaaaatacggagcttgtagggctggtggatagaagtacttcccaaaaacaaaattgaaacaatagttttgttaagattgaacgttatttacatatcgtgaaatcatttctacgtttagcttacatcaaaagttttgtgtgttaaatttgcacttaagatatttaggtaaattacgttattcacttgtgctttcatgcataaaaaaagttcggatttcaggcatttgccattcgcacataatatcagctgtcactacccttggcaatgatgtagtgtatgagcagaacaagtttgaagattgctccaattgtcaacttttttttttgctgtaaagttggcttttacctttgtgtcaatttattaattattaaattggcttatttttaaaaggttaattcttcttttccttcccagcaacaaaatttaatggtaagatgggaatgtgaatgtaaatggagtagccaacatgtgctttaaatatattgttagtacttatgtaatcttactacaatcataagttaacaataaataaatggaagcctatagaggcatgtccgtttgtatgaacatcgaatttttgggaactataaaagatacctaagcatgcagattctattgaggttttcgtggcgtaagtttcttttagaacattgtcacaccacaaaggccacaaacggtggctattctatggtatttgacgcccaaaaactgtctcgcccacactttttaaaaatttcattatacccgttactcgtagtaaaagggtatactagattcgttgaaaagtatgttacaggtcggactcgtttgtggccatataaaataaggatattcctgatcaagatcactagccgagtctggccatgtccgcctgtcagtccgtttgtatgaacgtcgagatctcagaaactataagaaaaacttcgagaagatttaagtttattcatttcccaatttctatcgacatgccaaaaaaaattttatagctctcgttcgcacttccactgagtcaccaaagggtatctaatagtcggggaccactcttgtcaaaactaacataggccttccacttacctttctcgtatatattttataattgcttttattaattcttcgcctcatgcaattattctcctgtcaatttggaatatattattgactttttgtacccgtgcattgcagcaatttttaaatcagaaccccaactatgaaatagagtggcaaacaaaccgcgagcgggccatgaatcaacagaaagatcacgatgatgccaagaataaaaagtccaagaaagacgaggacaaggcgtccaaaaagaggaaaaaaaaggggtaagggtcataagaataatttgaatccagattatattttatatttgtttcttttttacaaacagcggggacaaaaaaaaaaagaagcgcaagcacggaaagaagagcaaacgtagtacaatagatgcaaacagcacatcgtcatcctccgatagctcttcgtcggaagaggaaaatggacagcaaccaaagaaaggtcgtaccgaacagcaaccaatttgtcaatcagataagtcgactaatgcagcatcaatacgagtggccatgagaaagcaggaaagcacaccaacaaatttgaagccggaagtgccttgtcagcctgtggtgccgccaccgccaccgatcataaaggattccacaattccttcagaacggggtaaatggactgccgccagtgtcgaagaccaaagtaaggatcaaaagaaccgggatgataccatgctcaagcaatggaataatgtgcagcctgttataagtgagagtgaaaaaaagttgttggagcagcttaaaggaaggctgaagaacaagggagcccgcgaccagaacaaccacaaagcagtaccaacagaagcgaatgatgaaaagtttaggcggggtggaggacgtcattctcgttcacgttctaagcggcgcagctactctcgaagcataagtcgcgggcgggatcgagatcggcgggatcgtgagcgagatagagaccgtggtcgtaggcgtcggtcacgcagtcgtggccgacacttctctcgttcgcccataagatctagtcgaagaagtcgatcccgtcagggccgaagtcgacgcagtcgtagtcgctctattgaacgggtagagcgtcccgtggtcaagcattccgagtttcggccccgtactgtgccggaacgcaagcaaactgatataaagcgcgacaagaaggatgcagaaagcaagtcaaagtcatccaagcccagtaacaattccttgcctggaggcaaaaaactacctttcatcggtaagatgccagtatttaaaaagcagtctgttccatctttcaactatgatgcttctgctgtctacaccaacggctgtttggaggcaccacctccaccgccacctccattgggcggagcgacaagtcagatagctgtgcgtcaacaagcaccgacagctgcgcagattcagatggcaatgatggaagatgcttttggcaatgctcccccatttcatccagatgcgggtatgatggtagattacgatgagctaatgccagatcctgtccagttcgccaatttaatgacgagctgcccaccacctccgccgcctggagaaggctctgaaggtgatgcccatggccctgaggatggcgatcagcatgacaacgaaaaccgagaggacgtcttgcccccaggcattgatgaagctgaatctgccctggtaccgcatccgttagacgctgcggcacaatcccgagacggggaactcccaaaggacctggtcgaagcgcttgacataatattccccagcgacgtagcgattttggaggcatcaaatggaaacagtgaaaagcaggaagatgtgactatcaccaccattgttgaagatgacgcagtgctcagtgtgattcatcttcaagatttagctaaagagggtattcaccttgtaactatcaatgaagcagaggtacctaaaaagtcacatattcaaacatcggagaagattgaaaagttgcaggatttaaatggcaaatcggacgacggagtaaacataaaactgattgacgcagaggatatcccaatgccgaattcgcctccggctgagccgtcatttgacgaggagacgaaaagcaaggccttacagaagcaagctgatatctcagaaataccagagccggctgtatcgccttcagacagtgagaagcttcgtcgtcagtcggagcttgacgagttggctatgctgggaatcgacaggagtgacatggcggcacaatgtatgtagaacgtgtctttctttgctatgtatattattctttttttttaattaaattagaaactgtgctatttgagtcttaaatgagttctacattattttttctatatatgtgcatagatgctctgtaagatttgagttgacttggagagggcgaaaggcaagtcccgacgccggatacacgggcggacgaatcgaataacacgtcaaggagccccataaaaaggaacagttttagattttagattggcacctgtgtatgagtgtttttgacggaatgttttaaataaatgcgcatatatgtatgtaatatatgtaagaatcctaaaaacgtttgatttataattgctttaacatacactgcgcgtcatcagattagagccccctgcatgtccccgtttcttcttatgttctgtttttctattttgttttattttgccattgcataaaaatatatcaatttaattttttttttgttcactgatattcacctctttgaggataaaaaaaggtcctgaaaaaaaccgttatctttttagttctgctttgttttcttttcggcgaaaaattggacacgtatatggcatcatcagattagcgccccataatgaagtttggaatatcttccataatttaaaaggtaggacaacaaaattttgtatgctgttaaattgaatagtttgctttaattttgcgaaaaaatgggacgaggcacgcgaaatcatagctttctatgaatgcgggctttctttttataaaattgcaaacggcagacatcgcaaaactatagtcaattttattaaaaacaagtgaacttatggaaaaaactataaaggtggcaataacattccttatcgaataccttgcaattcccacgactcctccgacaaaattcggggtaaaagtggcgaaaacccgagcaaatctttgattcaaagagtgattaagaaaactaaacatttgaaacacagaaaactgaaaaaaaacatctctttataagttgcgaaaaaaagcacgactgagttttgcttgagcttatatgatccggtctaaggagtggcattatgttgtattttcggacgagaagaaatttatctggagaaagcagacggctatagtaattacaaccatgatttgcgtatagaggagcatattttggttcgctttcacagacgggttggaggtgtcatggtatggagcgcagcatcttatcatggcctctgtgaattccagtttttaacagcaaaaattatattattatatataattgtgtattaaaaaactgcatttccctattttaaaaacatttttggaaac

SEQ ID NO: 20750 - DNA, 4062 bp, DROSOPHILA
taatttcggaatttgccagaaaaacaccgatctgctattgatcttagtccaaaattgcgtttttaagtcgaaaagacacttttcggcttttagatggatgaagactcggctacgatacagctgggggataggcgtctcggtaacgcggtcgatcatgatctgcttccagggccacccggcgtcgatgagaaaagcggaaacgagaactgcgagcccaggagcagtgggtcgggaaagcgcggcaagtcgaattccaggcgccgttccacatcccgtggtcggtcggattcccgcaacacatcgccgtcgaacacccggcgaaggcattccctgtcccgctcgctgactccaccgcgtcgtcgttacgattcgcccgattatgggcggtactcccgacggcgctttgatcgtgatcggcgacgctcccccgaacgccggcgctctccgccacgtcgcggacgacggtacggacgatcccggtcccgcagcatgtcgccccgacggggaggtcgatggtcaccaaaaaaaaaaccgtcgtcgccgccagtgccccctccgcatggaggaccacatcctcaaatgacccctggctatggagctatggccgcacatatctacggatcatacgtcgctccaccagatgtttacggtcaccaatatggaattccgcctaactcgtttccacctcagggaccggggtacggtattccaggtgccccgccggaccaaagctcttttggctctggctacggtccgcctcccacaagcgcgtgggacgtaaatgtgtacggtcagcaggtgtggattaaccagcctatttctggggtccagccatccgcttcagactccctgatccagccacagaaggcccgcgaaactctctctggcaagacgataggcgaggagcagtcggtgccagcgctcgaaggcgcaggtttgacgcctcaggatgctgttgcccaagaagcggagaagcaaaaggacgagcttaagaaacagcgcgctaactatgtcaaaaaggtatcgctgctcaagaaggaaatgaaagtacttaaggaccagcgcgaggacctggcagcaggcgatgccccaccctcgccaaccacaaagaatttcatcgaagaaaacgaccgcctgcagatgcaaattaagaagaaacttgacacaattgaaaacgttatagatatgctgaacggcataattggctacgaagaagttgaagatgaaccatctaaccaaaagtcccatggcaagactcaaccggaacaacaggatagtcgctcgcactcctccagtgagagttctgcagatagctctgaatccagctcatcatctagtactgcttccgattcgtcatccgataacgaagacggggaaggggcaggcggcgccgtaggaagtccaaccaatcggctaaagcaccgcgccataaagtcgatgaagtcaaagcagctacatggtgaaatgaaggcagtgccaacccaagcacaaaattacaattttgtgtttttcgatcccgagcagcattggtgcgagagctgtggagtttttccaaagtctgctcgagactatttaaagcacttgcatgccgaggaacacatgaatcgagaaaccatagaaactccgtggcatgtgggtattgaccacgatccctttcccacatttgaaaacgcacctgccaggcgcgtccccgtgaggggcatgcaatttctggtgccggctaacgcttggttttgcaagctctgcagtgtttggattggagacttgcactgcgcttctgctcatcttaagtctaggcttcactccaataagtatcagcaatttttaaatcagaaccccaactatgaaatagagtggcaaacaaaccgcgagcgggccatgaatcaacagaaagatcacgatgatgccaagaataaaaagtccaagaaagacgaggacaaggcgtccaaaaagaggaaaaaaaagggcggggacaaaaaaaaaaagaagcgcaagcacggaaagaagagcaaacgtagtacaatagatgcaaacagcacatcgtcatcctccgatagctcttcgtcggaagaggaaaatggacagcaaccaaagaaaggtcgtaccgaacagcaaccaatttgtcaatcagataagtcgactaatgcagcatcaatacgagtggccatgagaaagcaggaaagcacaccaacaaatttgaagccggaagtgccttgtcagcctgtggtgccgccaccgccaccgatcataaaggattccacaattccttcagaacggggtaaatggactgccgccagtgtcgaagaccaaagtaaggatcaaaagaaccgggatgataccatgctcaagcaatggaataatgtgcagcctgttataagtgagagtgaaaaaaagttgttggagcagcttaaaggaaggctgaagaacaagggagcccgcgaccagaacaaccacaaagcagtaccaacagaagcgaatgatgaaaagtttaggcggggtggaggacgtcattctcgttcacgttctaagcggcgcagctactctcgaagcataagtcgcgggcgggatcgagatcggcgggatcgtgagcgagatagagaccgtggtcgtaggcgtcggtcacgcagtcgtggccgacacttctctcgttcgcccataagatctagtcgaagaagtcgatcccgtcagggccgaagtcgacgcagtcgtagtcgctctattgaacgggtagagcgtcccgtggtcaagcattccgagtttcggccccgtactgtgccggaacgcaagcaaactgatataaagcgcgacaagaaggatgcagaaagcaagtcaaagtcatccaagcccagtaacaattccttgcctggaggcaaaaaactacctttcatcggtaagatgccagtatttaaaaagcagtctgttccatctttcaactatgatgcttctgctgtctacaccaacggctgtttggaggcaccacctccaccgccacctccattgggcggagcgacaagtcagatagctgtgcgtcaacaagcaccgacagctgcgcagattcagatggcaatgatggaagatgcttttggcaatgctcccccatttcatccagatgcgggtatgatggtagattacgatgagctaatgccagatcctgtccagttcgccaatttaatgacgagctgcccaccacctccgccgcctggagaaggctctgaaggtgatgcccatggccctgaggatggcgatcagcatgacaacgaaaaccgagaggacgtcttgcccccaggcattgatgaagctgaatctgccctggtaccgcatccgttagacgctgcggcacaatcccgagacggggaactcccaaaggacctggtcgaagcgcttgacataatattccccagcgacgtagcgattttggaggcatcaaatggaaacagtgaaaagcaggaagatgtgactatcaccaccattgttgaagatgacgcagtgctcagtgtgattcatcttcaagatttagctaaagagggtattcaccttgtaactatcaatgaagcagaggtacctaaaaagtcacatattcaaacatcggagaagattgaaaagttgcaggatttaaatggcaaatcggacgacggagtaaacataaaactgattgacgcagaggatatcccaatgccgaattcgcctccggctgagccgtcatttgacgaggagacgaaaagcaaggccttacagaagcaagctgatatctcagaaataccagagccggctgtatcgccttcagacagtgagaagcttcgtcgtcagtcggagcttgacgagttggctatgctgggaatcgacaggagtgacatggcggcacaatatgctctgtaagatttgagttgacttggagagggcgaaaggcaagtcccgacgccggatacacgggcggacgaatcgaataacacgtcaaggagccccataaaaaggaacagttttagattttagattggcacctgtgtatgagtgtttttgacggaatgttttaaataaatgcgcatatatgtatgtaatatatgt

SEQ ID NO: 20751 - protein, 1260 aa, DROSOPHILA
MDEDSATIQLGDRRLGNAVDHDLLPGPPGVDEKSGNENCEPRSSGSGKRGKSNSRRRSTSRGRSDSRNTSPSNTRRRHSLSRSLTPPRRRYDSPDYGRYSRRRFDRDRRRSPERRRSPPRRGRRYGRSRSRSMSPRRGGRWSPKKKPSSPPVPPPHGGPHPQMTPGYGAMAAHIYGSYVAPPDVYGHQYGIPPNSFPPQGPGYGIPGAPPDQSSFGSGYGPPPTSAWDVNVYGQQVWINQPISGVQPSASDSLIQPQKARETLSGKTIGEEQSVPALEGAGLTPQDAVAQEAEKQKDELKKQRANYVKKVSLLKKEMKVLKDQREDLAAGDAPPSPTTKNFIEENDRLQMQIKKKLDTIENVIDMLNGIIGYEEVEDEPSNQKSHGKTQPEQQDSRSHSSSESSADSSESSSSSSTASDSSSDNEDGEGAGGAVGSPTNRLKHRAIKSMKSKQLHGEMKAVPTQAQNYNFVFFDPEQHWCESCGVFPKSARDYLKHLHAEEHMNRETIETPWHVGIDHDPFPTFENAPARRVPVRGMQFLVPANAWFCKLCSVWIGDLHCASAHLKSRLHSNKYQQFLNQNPNYEIEWQTNRERAMNQQKDHDDAKNKKSKKDEDKASKKRKKKGGDKKKKKRKHGKKSKRSTIDANSTSSSSDSSSSEEENGQQPKKGRTEQQPICQSDKSTNAASIRVAMRKQESTPTNLKPEVPCQPVVPPPPPIIKDSTIPSERGKWTAASVEDQSKDQKNRDDTMLKQWNNVQPVISESEKKLLEQLKGRLKNKGARDQNNHKAVPTEANDEKFRRGGGRHSRSRSKRRSYSRSISRGRDRDRRDRERDRDRGRRRRSRSRGRHFSRSPIRSSRRSRSRQGRSRRSRSRSIERVERPVVKHSEFRPRTVPERKQTDIKRDKKDAESKSKSSKPSNNSLPGGKKLPFIGKMPVFKKQSVPSFNYDASAVYTNGCLEAPPPPPPPLGGATSQIAVRQQAPTAAQIQMAMMEDAFGNAPPFHPDAGMMVDYDELMPDPVQFANLMTSCPPPPPPGEGSEGDAHGPEDGDQHDNENREDVLPPGIDEAESALVPHPLDAAAQSRDGELPKDLVEALDIIFPSDVAILEASNGNSEKQEDVTITTIVEDDAVLSVIHLQDLAKEGIHLVTINEAEVPKKSHIQTSEKIEKLQDLNGKSDDGVNIKLIDAEDIPMPNSPPAEPSFDEETKSKALQKQADISEIPEPAVSPSDSEKLRRQSELDELAMLGIDRSDMAAQYAL

SEQ ID NO: 20752 - DNA, 5286 bp, DROSOPHILA
ctctgaggattcggcatgccaagcggtgtcagtaggtgttagattacaatgcgaaaatgggtgtggattggcgtgtacttactcttaccctttccgtacattttggccattttggactggtctttggctttggaaagggtctcgttgggtcggtacttgcgtctattcagtttcggtgtcgggttgggttcttggtttctttcagtgtgctatgtggatgttctgagctgtgtgttttggtgcaccatcgaattgaaaacgaaacgtcgcggcaaacaaaacacacaagtaaaattataaatatatatgggcttcgctaatgaaataaaatgtatggcgcggcagtgactgcacagagcaaacgcaggttgtgggccaaaagaaaactcgggaaaacagtcgaccaggtttctgggcgcaggcggtgggttgtcgctccctttgtgttggtgatttcttgtgggaaggcagttaaattcagtttttaatattgtctacaaaccgtaggagttcatttggattgttgatggccggcgacaaccctacttctgtccccgccagggctgcaagctcatccgaatacgatttttttttcgtaaaatactgcttttccgtatattttacttggtgtgtgctaacggtattcttgaaaatgtttctgtgttaaaaattagaattagggttgttttaaccaacaaaaatctttaataccagagtaagtttaaacaaatctgagcgtatgtatcaagaagtacagcgatcaatggtatctacaaataatcataataaaacaattaaaatttatattaaaatataaaattccgaccagaacattgacaatttttaattataatatgtaattaacaattgtgtgtagccttcagtatttatttcactacccctaatgtgatgcgcatttaattcggtattttcacaagcctacgacgaacgctgtggagaacaatgcctgatttttttgtcagcctgaaaagcagcgaggaaaaacttgaatttcgtctgtaaaacatatctaatcggaaccaagccactgaaaaagtcgtagtttaggctaaataaacgagaaatcaacgagtgaaactaatttctatctgtggacagaacgcccccgcacctatttttgtgctgaggaacaagcgaagcagcgacgcacaattcagaaatgtaagtattaacaaaattatgtaatttaagtgcatatgaaacattatatatgtatatccaactatttccccgatttcgacgggttaatcatcatccacaaaaaattcatgttggcgaagaatctattattagattacagtgtgctctgcttgaatacaactccgaaatgtatatacatatacagatgcatacagatgtacacatatgtacatatgtgcatatgtatctatacagcacagcacagctgccgtccaaatagaaccaaagattgtttcttgataggcttctgaatcatttcaatgtaattacgaatgtaagtctcttttgtgtccgcttaggcaagccacagtcgcaattttaattgatcgattggtttgccacactaattcgtacatctaaattcgagataaatagaccattacctaaaacagtattatagagtgaaaagtgtacagtgtgtaactggtataaaaagtgattccgaccctataatgtaaatgtttcttcgatccggaccaatggcctggtcgatctgaccacgatctacaacgcccaaattggcatataacactgtagttccatacaattgtcataatagttaaaataggattattagaaacgtatcaaataaatgtcttcgctgagtgctgggtatctcatagtcgcgactcttgactaaagtgatctttactcctaaacatcttcctatatacatgtgaaatgaatcaatgttcttaagtgggaaaattcataggtaatattaaaatgtttagtgttgtaactatgaccacggctttatttacgggggtgcataaggggtaaagccaacggttggcttttccacataggaacagctgcagatttattggtatattttaaagaactgtctgagcttagcgtttatgggtgtcagctggcactacctgtccgggggtcgtcctggcgtacctgactgcctacaaaactcattacatttttgctttccattacagttgcaaaccggttttcggcgcagaaacacccactcgatcgtccaagagtcaagcggagaacagtgaaaacatacattataaggatcaatttataaaagcaaagccgcaacaatcatgaacactggaatctccttaaacgagcgctttacgcagatgcagtcaaagcagccgccacagggacgcggtcgcagccgctccaggagcaggagtcgccgcattgtgagcagcggagccggaaatcaaggaatgtccgcggtcaactctaggctgctgaatgaattcaagaggctccacaccgttcagacggccctcaaactgaagcgcgtacgtgtttcctaaaaaccgaataatgcaaccaggcatcggaaagcgacctgatccgtaggacaggtttatgtctgacaggcttggattacccggaggagaggggtcggactatgctgtcgagaaaagtgcgccttctgcgtggtacataaaaaccctacagactctcagactctctctctatcccttgatcttgaactccaacactgcagcagcgtactgacaccaaaacttccacacaaccttatgcctccttacagagaagcttacggaccaccgcagtcagcggtcgtggaccacgcgtcgccggcgtcaagtcgctgcgactggcgcccaacgggaagcccatacggtccaacaacgtgaccagggtagcaacgtaagcatcttgcctataatcgcgctcaactatcaatccactgcaacatctctgtacttcttcgttaatcgctcaggatgcgtgccgatctagtggcaagcggcaatgccgcacgcaatcgccgcagcggcagcagcatgcgcaatgtccccgccactaacggtggtggaggcggacttcggcagcggctaggacagcgccgcccttctgtgggcggtgccgccgagcgcgttgagcgtcgtcagcgacagcagcagcaagccccacgaggacgttcccgctctcagtcccgttcgcgccacccgcaaatacagcgtgtggacagagcacgttcccaaagccgtggacgcagcattgggcgttcccagagccgcaatcgcgatcgctccgcccagggccgagttccagtgaaacagcggctttcagtcaagcaccgccttggcgtgcgaaccggccagagaaacaaccaggccaagatcccaccgcagcgccgggcaccaagccaaattcgaggtgtggcaggcggacgggtcgagaagcgtcgtagtgctcagatttcccaaaagaagggagtttccgcctcgattgccggacgtcaaggacgaccacgtagaaggtatgtgtcgtgccttagaaaatgctcaaatttaactgatctgtgcctaaacccaaagacttacattttctttgcgtaaagtcttacaattactttattttgcatatgtataaaatgcatacataatttttaaaacaatgatcatttgacacatactgaatacatatttttattacagatctgttgcaagaaacgctgcttctagcagtggggcagttaacaattctgcttctgctcgtcgctcacgctcgcgcaatcgtgctgccgccgtcgctgctgccgctatcgccgctactgttcagggccgggctaatcctcgccagagacgcggacgcagtgcaggcgctgccaagggcaagatcatcagaaatggtaaagctgacaaaaacgcgaaggtcaaggcgacaaacggtgtcaaaagtggcccgcagcaacaggttcgacggggacgcagtcgtagtcgtaagcctacaggtaaaagcgagacaagtggccaggagacaaaccggactggatctggaaataggcacttgaaactcaaaattgacatatttttgtctctactttctacttacactcttgattaacatgttttctctgtttaataggcaaaccacagcgtccagaggttaagcgcgaggatcttgacatggaactggatcagtatatgtccaccactaagtcggagatggactacttgctgaagtaaacacaagtagattggaccacaaactattgaattaaaaacaattgaatgaacagaatgtaacaaccaccggctataggcagatgtttctctcgttgcactaagttaccgcctagttttaaaatatttctaagttttaaaccatgttaaaagcgtccaaaaagagcgcttaggcatagagatgttctcgtgtatatatggcaagttctaatataataagtaaatatggtcgagaattgtatagttcatgaatgatattgttaatcgcaattccgaaatacaaactattcattgctcaactcaaagaatttcgtttttaatgatgttggttattccattaaaaaagcgagttacccctgtaagctgaagtgcacgaaacaccaggagactgtgtgcaggtatgaatgtgaaaaatgcgatggcgaatagcgattatttacgccaaaggatagattgatccttgtctggctacttagaaatatatactaaagcgaatgcttgcaggaagagagttagataattgcaaggcccagcaagagaattacaagagaagcccagctatcgaacgccaaacctccactgaagttcatgtctattgatatatatgcacggtggcaaatggcctccaaataatgaaagcgcaatgattgcatactttcatggaagaactggaattccctatcaaaaaagaatctcagattcaaaatctcatttaacaatgacagcggttctttacttatggagtaaaaataagcaattgttgacaagcatttatttatatttaagggcagattctttttagtgaattaagaaactgtcactaatagtgttaattgtcatatagattttgagatcatctgcgtaaagcaggtaattacaaaacaaatatcattgttacagatattaaaaagcaaagggcccagagaaacagtttcattaatctcaagaatcacgatgttatccaatttaaaaagaaagagtattcactcttcgaattcgaagaaactggccccgcaaagaaatatgataaactttgtcagtgttgaaataagaaggctaggttggtagaagttgagcttccatgcaa

SEQ ID NO: 20753 - DNA, 1646 bp, DROSOPHILA
aaaaacttgaatttcgtctgtaaaacatatctaatcggaaccaagccactgaaaaagtcgtagtttaggctaaataaacgagaaatcaacgagtgaaactaatttctatctgtggacagaacgcccccgcacctatttttgtgctgaggaacaagcgaagcagcgacgcacaattcagaaatttgcaaaccggttttcggcgcagaaacacccactcgatcgtccaagagtcaagcggagaacagtgaaaacatacattataaggatcaatttataaaagcaaagccgcaacaatcatgaacactggaatctccttaaacgagcgctttacgcagatgcagtcaaagcagccgccacagggacgcggtcgcagccgctccaggagcaggagtcgccgcattgtgagcagcggagccggaaatcaaggaatgtccgcggtcaactctaggctgctgaatgaattcaagaggctccacaccgttcagacggccctcaaactgaagcgcagaagcttacggaccaccgcagtcagcggtcgtggaccacgcgtcgccggcgtcaagtcgctgcgactggcgcccaacgggaagcccatacggtccaacaacgtgaccagggtagcaacgatgcgtgccgatctagtggcaagcggcaatgccgcacgcaatcgccgcagcggcagcagcatgcgcaatgtccccgccactaacggtggtggaggcggacttcggcagcggctaggacagcgccgcccttctgtgggcggtgccgccgagcgcgttgagcgtcgtcagcgacagcagcagcaagccccacgaggacgttcccgctctcagtcccgttcgcgccacccgcaaatacagcgtgtggacagagcacgttcccaaagccgtggacgcagcattgggcgttcccagagccgcaatcgcgatcgctccgcccagggccgagttccagtgaaacagcggctttcagtcaagcaccgccttggcgtgcgaaccggccagagaaacaaccaggccaagatcccaccgcagcgccgggcaccaagccaaattcgaggtgtggcaggcggacgggtcgagaagcgtcgtagtgctcagatttcccaaaagaagggagtttccgcctcgattgccggacgtcaaggacgaccacgtagaagatctgttgcaagaaacgctgcttctagcagtggggcagttaacaattctgcttctgctcgtcgctcacgctcgcgcaatcgtgctgccgccgtcgctgctgccgctatcgccgctactgttcagggccgggctaatcctcgccagagacgcggacgcagtgcaggcgctgccaagggcaagatcatcagaaatggtaaagctgacaaaaacgcgaaggtcaaggcgacaaacggtgtcaaaagtggcccgcagcaacaggttcgacggggacgcagtcgtagtcgtaagcctacaggcaaaccacagcgtccagaggttaagcgcgaggatcttgacatggaactggatcagtatatgtccaccactaagtcggagatggactacttgctgaagtaaacacaagtagattggaccacaaactattgaattaaaaacaattgaatgaacagaatgtaacaaccaccggctataggcagatgt

SEQ ID NO: 20754 - protein, 421 aa, DROSOPHILA
MNTGISLNERFTQMQSKQPPQGRGRSRSRSRSRRIVSSGAGNQGMSAVNSRLLNEFKRLHTVQTALKLKRRSLRTTAVSGRGPRVAGVKSLRLAPNGKPIRSNNVTRVATMRADLVASGNAARNRRSGSSMRNVPATNGGGGGLRQRLGQRRPSVGGAAERVERRQRQQQQAPRGRSRSQSRSRHPQIQRVDRARSQSRGRSIGRSQSRNRDRSAQGRVPVKQRLSVKHRLGVRTGQRNNQAKIPPQRRAPSQIRGVAGGRVEKRRSAQISQKKGVSASIAGRQGRPRRRSVARNAASSSGAVNNSASARRSRSRNRAAAVAAAAIAATVQGRANPRQRRGRSAGAAKGKIIRNGKADKNAKVKATNGVKSGPQQQVRRGRSRSRKPTGKPQRPEVKREDLDMELDQYMSTTKSEMDYLLK

SEQ ID NO: 20755 - DNA, 4947 bp, DROSOPHILA
ttcctcctgctagctccaccagcaataaagaaacgaagtaatcgacgccaaggaggtggtatcacggtaccaccgcggtattccgctttgtggggggcactgagcactatatttagctgtttagccataatcatattatcagaagcgtctcagcggaatttggcacacacggcactcacacttgcccagtggcattggccatccaaaatttacttgcgtcacaattgcggattaaatgtattggactttcaagcacggcgtgggcgcggtcacggttttgcatacggtgttctgacaggcggaaacattcagtttgagcagcgacaaaaaattaagcgcacaacggaactgagccaattcattaggcatttattttagaggtgggcaatctgcgatgtgccgtcaaagcgatgactttcgctggaacagcgattgttgcgattatcgatacctgctgctcggagtgttatctgctatcgaataacagcgcatttcatgtatgtaagcatgagtagctctaaaaattttgacctaaattataaggctcttttttaaacaaccggacaattacctgaatggagcatacaatgtgcattaattctgatgcactaattccgcttttcttaattatttggttcaaatttttgaacatcaataacaggcaaacggtcttggtcttaacattttatgaaaccgtggctacgactaacgtttaaaccttcgaatgcatacgacacggagagaatttttattcgagacattctaaacaattacaattcaagaaatcacagcacagcacaaccaataaaaaagaatcccgtttctaagttttcagcttaaatcatcctcccaaacacaaaaaaataagcaacagttgttactgcgatgcaactgtcgaaacggagcttttccgagccctgtgtgtacacacactgggggtggagggattaagctccaaagtgcttgctttgaagcagtttttccatcgagtttaaggcagctcatcctaattcagttgaattaaatcctgagccgtttgatttttatttctgaatctctcgttgcatgattcgcagttttgggatcgtgccttcaagaaatcgaaagtgattaataggatagaacagtatagttgttccttctataatttgttttacgattttgcaaccaaatctcagatgaacggttccgaaatacggaagggccaaaaaaacgggtaattcggagtacaccagcttccaaacgacttttttgctttgatccctagtcgttgtcttgcgaaaaatcgattccagttatcctgcgacgctgtgctgtcaaattcctgagcttttgctttcacgctgcagtgagaataatttttagtgacttgacttgtggtccgggtgcaatgagttgcgagtagtagactcgtgttcgccaggatcctcgcatgagccaagatgattgttacctccgcttctggactggatagcactccgacgctcggtacgtaaaaatgtatatgcaccccacaaaccacaccattctgacctgagccgtgactgttaaatctttcaggcaccatcgaggtgaccactttgctgggcgcctttttcggcgtcctcgttctactgctcctgttgtttcttttcatcagtcgcaagtgctgttttcactaccgccatgccatcaactgctgcgacgagcgccaccttgcagtcaagtgtgtgcagaagatcagtgagtaccgtgtttcgtggggattggggctgactggctaacttttaagtatcccgcagcccgcaaaaggcgttacgagaacaccagctccgactcggaggaagacatcttgaggcgcctgcggtggcatcaacagcaccaactgggcgagaagcctggcggatacgggctgggaatcagccaggctaatccgctgacggcgcagagcttcaactaccaccaagcaggcgcaagtgccgacctgcagcgtgtgacggtgtcgcgtgaccccttagccatcgccgagcgtggcaaggttggaatcccgtcatcgcacagtgagtgcagctcgaacgattccatggaggtctccgtggacagtcacacaggcgtcctgacgggtctgagcaaaggtaagcaaggcggggtcagggccagctaattgacagccgttgcaatgagtcacgaccttttgacagccacaaccacagttccccacccggcgacagccttccgcaatccgtgtggagaacaccgggccaagacccaggcactgaggtaccagcaccgggtcaacgtggctgctccgccaaagctggacaaggaacgggacaacgtgctggtggtgcccatggtcaatgcctacagcattaacaacaacaacaactcgataacaaccagcaataaccatcccagcagcaacaacaacgatgacgtaagttttacaacataagaggtactttaaatacctattcctttaaaagaaactatgcctagaaaggcattcaactttcggtcggactcgtaaagtttacccaacaagcatagtcgagtctaaccgactcttatggtccatatagtctgttaacaatctttttttgcttgacaagttaaaattcattaatgcgttgtataaattcattaatgcgttgcatgtgtaaaataaaagtttattatcttaactttgaaaaattatgtgcaccgcataaattaaaaattctttctaagaaatataattaatctgtcaaaatccgatactttgctaaaaaataaattaaagtgtttaagttactttacttgcgagtaccaattgatattccaaaaactatttatccctaggctcttattataaaatctttttgatgggtaatgcgttcttgatagtcgaggcactcaacgatagcatttcatattttcttgtaccatgctttagggcttttcattgaaactttttttaacatacaaaacttttcaacttccaggaacccctatttgacaccagcgatttgcgctcgatcaagtcggatgacctactggttggtgtggaccagaaggagccggccgtgcagaggggtcccatcgagctggagctgtcgctgctgtacgacgccccaatgcggaaaatgacggtgcacgtgatgcaggcaaaaaatcttccgcccctgggtagtgggcagaccacccacacgcaggtccggatgctgatgctgccaagcaaaaagcagaagctcaaaaccaagatccgtagcggcgaaaatccacagtatatggagagctttcttctccatcgcgtcaacccagaagatgtgaacaacatggggctgcgtgtgcggctttacggctgcgagcggctgcgcaaggaacgcctgattggggaggcgtatgtgagcttcgccactgttgaccttgaactggaaacaaacctatggctgccgctggagccacgaaacacctcgtcgggcctgggttctactagcgatctgttaagcctggctcggtcagaaagcgcgggctccacctcgtccatgcagcacgggggcgtctccgagttgctgctgggtttgagctacaacggggtcactgggcgtctgagcgtcgagatcatcaagggaagccagttccgcagcttgtcgctgaacaaggcgcccgacacgtacgttaaaatggttatggtcagcagcatcggacaagagatctcccgggccaaaacgtcaatccgcaggggtcagcctaacccgctttttaaggagacattcgcctttcaggtggccctgttccagctcaacgatgttactctgatgatctctgtgtacgccaagcggcacatgaagaaaaacgagatggtcggctggttcagcctgggtctgaactcgtccggatcagaggaagtggcccattgggcagacgtgtgcgagatgcccaagggagagatgctggcgcgttggcatgtgctggtggactcctgattcgagcagctgggccagtcatccggacgcagcggaaaggccctccgaaagctgagtctcgctgcgttcaaggaccggtcccgcgagaagagctcaaaggagtcgcgtctggaggagaacggagctcaattccatgcagcggttgcacttgatattgagccaggcctggagctggactttgtctaaagcagaggtctgtgtttgtgatttgtttttacaaggtcgatgccaaatgacgactgctgtcgtcaagtgcttggctcaggatgagaccgaccaagaggtagggtcatccgaacaatctagcctagactgggccataaaatatttgtaatttggaatcaatttggcacacattttgtttataaaatgtaggaaatatgaaatatgaaagcgaacaagaataaccagaatactcaaattttatacgcaagtacatacacgaaaagtacataccagtacttatatgtataactactcgaaatttgaattttatgattgtttgtgataaagaatactatatgaaatatcagatgtccgaatagagcgtatttaagattttgagtgtacatttgtacatctgtgcaagctacggatgagtgacgaatttttgtaatttacctttctgcatcttatatttaaatattaagcccggcataagatgcccaaagtctgttgagactagcacttttttattacccaaatatgaaaaccgaaaacacataggaacaattgtagccaatgcatacgtacatacaatacatcaaacctgcaacttacataccttaacaaacctacgtacataggtaactcttggttttttgatcaagagccatgcgcatgttccagttttgatattcaaagaaatacaaaagtatcggtaccttagaattcgaacgcacaaatacatattctacattcgaagataagttggaaaaaatgttggtaaaaatactaggacatctgtgaatgcaagcatgccgattcgcgtgccaggcga

SEQ ID NO: 20756 - DNA, 2203 bp, DROSOPHILA
ctcatcctaattcagttgaattaaatcctgagccgtttgatttttatttctgaatctctcgttgcatgattcgcagttttgggatcgtgccttcaagaaatcgaaagtgattaataggatagaacagtatagttgttccttctataatttgttttacgattttgcaaccaaatctcagatgaacggttccgaaatacggaagggccaaaaaaacgggtaattcggagtacaccagcttccaaacgacttttttgctttgatccctagtcgttgtcttgcgaaaaatcgattccagttatcctgcgacgctgtgctgtcaaattcctgagcttttgctttcacgctgcagtgagaataatttttagtgacttgacttgtggtccgggtgcaatgagttgcgagtagtagactcgtgttcgccaggatcctcgcatgagccaagatgattgttacctccgcttctggactggatagcactccgacgctcggcaccatcgaggtgaccactttgctgggcgcctttttcggcgtcctcgttctactgctcctgttgtttcttttcatcagtcgcaagtgctgttttcactaccgccatgccatcaactgctgcgacgagcgccaccttgcagtcaagtgtgtgcagaagatcacccgcaaaaggcgttacgagaacaccagctccgactcggaggaagacatcttgaggcgcctgcggtggcatcaacagcaccaactgggcgagaagcctggcggatacgggctgggaatcagccaggctaatccgctgacggcgcagagcttcaactaccaccaagcaggcgcaagtgccgacctgcagcgtgtgacggtgtcgcgtgaccccttagccatcgccgagcgtggcaaggttggaatcccgtcatcgcacagtgagtgcagctcgaacgattccatggaggtctccgtggacagtcacacaggcgtcctgacgggtctgagcaaagccacaaccacagttccccacccggcgacagccttccgcaatccgtgtggagaacaccgggccaagacccaggcactgaggtaccagcaccgggtcaacgtggctgctccgccaaagctggacaaggaacgggacaacgtgctggtggtgcccatggtcaatgcctacagcattaacaacaacaacaactcgataacaaccagcaataaccatcccagcagcaacaacaacgatgacgaacccctatttgacaccagcgatttgcgctcgatcaagtcggatgacctactggttggtgtggaccagaaggagccggccgtgcagaggggtcccatcgagctggagctgtcgctgctgtacgacgccccaatgcggaaaatgacggtgcacgtgatgcaggcaaaaaatcttccgcccctgggtagtgggcagaccacccacacgcaggtccggatgctgatgctgccaagcaaaaagcagaagctcaaaaccaagatccgtagcggcgaaaatccacagtatatggagagctttcttctccatcgcgtcaacccagaagatgtgaacaacatggggctgcgtgtgcggctttacggctgcgagcggctgcgcaaggaacgcctgattggggaggcgtatgtgagcttcgccactgttgaccttgaactggaaacaaacctatggctgccgctggagccacgaaacacctcgtcgggcctgggttctactagcgatctgttaagcctggctcggtcagaaagcgcgggctccacctcgtccatgcagcacgggggcgtctccgagttgctgctgggtttgagctacaacggggtcactgggcgtctgagcgtcgagatcatcaagggaagccagttccgcagcttgtcgctgaacaaggcgcccgacacgtacgttaaaatggttatggtcagcagcatcggacaagagatctcccgggccaaaacgtcaatccgcaggggtcagcctaacccgctttttaaggagacattcgcctttcaggtggccctgttccagctcaacgatgttactctgatgatctctgtgtacgccaagcggcacatgaagaaaaacgagatggtcggctggttcagcctgggtctgaactcgtccggatcagaggaagtggcccattgggcagacgtgtgcgagatgcccaagggagagatgctggcgcgttggcatgtgctggtggactcctga

SEQ ID NO: 20757 - protein, 586 aa, DROSOPHILA
MIVTSASGLDSTPTLGTIEVTTLLGAFFGVLVLLLLLFLFISRKCCFHYRHAINCCDERHLAVKCVQKITRKRRYENTSSDSEEDILRRLRWHQQHQLGEKPGGYGLGISQANPLTAQSFNYHQAGASADLQRVTVSRDPLAIAERGKVGIPSSHSECSSNDSMEVSVDSHTGVLTGLSKATTTVPHPATAFRNPCGEHRAKTQALRYQHRVNVAAPPKLDKERDNVLVVPMVNAYSINNNNNSITTSNNHPSSNNNDDEPLFDTSDLRSIKSDDLLVGVDQKEPAVQRGPIELELSLLYDAPMRKMTVHVMQAKNLPPLGSGQTTHTQVRMLMLPSKKQKLKTKIRSGENPQYMESFLLHRVNPEDVNNMGLRVRLYGCERLRKERLIGEAYVSFATVDLELETNLWLPLEPRNTSSGLGSTSDLLSLARSESAGSTSSMQHGGVSELLLGLSYNGVTGRLSVEIIKGSQFRSLSLNKAPDTYVKMVMVSSIGQEISRAKTSIRRGQPNPLFKETFAFQVALFQLNDVTLMISVYAKRHMKKNEMVGWFSLGLNSSGSEEVAHWADVCEMPKGEMLARWHVLVDS

SEQ ID NO: 20758 - DNA, 7915 bp, DROSOPHILA
aagaaagttaaaggaatctccaggatatgtatgagtgttcatagtacaacgcactaaataaaacaccatatataataatgaaagctaaagtcatagtcaggtataataataataatatcttcatctttattatgttattgcataaaaacatttcgtgggcaaatatcttagactagtttaatttacttaaaatgggatttatcaaggattacactgggctcacatcttaagtctcgaaattcgtttcatgacctcgacttagattttatggggtaaatactaattttgatccgttgctcagatttcgcgcatcttagctactctttaaaaatctctaaatttgtacttcttctttcgtcagtttcagttgcatcgaaaatattgtcattattgccaaaaggttaacaacaaaaaaaaaaagcgaaaaacttgtgaaattatattgaataattggatttatttgatttgatttcgttcgattcgaattcgctttcaactaacaaaatactgagagaataatatcagagaaagaactgagtgttatgcgcatatacgaatatgttaggttaaataagactaattaattattttagaaaacatactcattatgtatatgttataaactatattttattaatttgactttggactgttggtattgtttggttgtttcgcttgactcaacttacaaattagatttaacttaggcttatgtttctccatgcatttatgatagtttttaaaccgttttcagggtttttagtcgatttcgaaaatacaagagtgtataggagacagattgaaaggtggctacagttcaatacagttaggatagttagataaacttaggtctagaattagcggcttaattggcttatgtacaattttcgacaacaaaataatgtttggaaaacttatgctacgaatatatacaattctggacaacgattatatgataatagtgataaataataataacaaggtgatggtgatggggaacttaggagtgagcattcctggccatgtgaacgaagaggccgacgggtccgtcgcacttctcgccgcacatgttgcacttgaacacatcgtcgcagctgtggtagcccatgtgaatggtgtagagcacggcgtccttgaagaagatatcacagtacttgcactcgtagatggcacccgccgccgccggagttccggatggaggagctgcaaccgctgaggtggttccattgctgctggaattgctgctgctgttgccgttgctattgctgctggcattggagctgttccccgagctggacgccgtcgaactggcactggtattggcctgcggcacatgggccgtctccatcgactcatctgccgaactggtgcccgagcagtgctcctcgggcatgggtttgcgtccggcaatgggcgaggatgcagttggcatgggtgtgctgggtactttcagttgctcgggagatgtcatggcctccgatcgcagttgtaacagggtgtccagcttgaggacgcgtcccttgcgtctcgaggcattcgagctgctcatcagaggcgtggcctcctcctccaccttgagattcatggccagcggctgctgcggttgttgctgctgctcatcctccttcactggcgttccttgggacagatccatggcagagtccactgacttacgctcgtactcatcgtcctgctcctcctcctcattgtcgctctgctgctggttctgttgctgcagttgctctcgcattcttggcgacaattgggccaagacagcggcctgttgttgggcggccagcatctggagattgaggttccagtaggggaagaaggccatgttgcggttctgctgcagaaggctggccagaggaggcagaagattggctggactgggcaagctgggcgtctgttccacactggccacactcttggcaggagaggcgggcagcgggagcactggagatgccgccggaggagcggagttgccttgaaccagagggaatccttgcagggcggcactcagctgagatgtggcgactggctgagctggctgagattgctgttgctgcggagcgacagctgcaacatttgacttccggctgccgctgccacttcctccactggcaatcggtccaccattcttgctcttcggaccacgacgcgtgccgtaaacatcgatgaccaacgagggattcggggtgccatcctcgtccaaaaccatgccgggcttgtgaccatacttgcgcagatgcagcttgaagctgtggcaatacttggtggcgtaatcacaatccgcacaacggtactgatacacagaactgtgcgacttgcggtgcgagtttagcatggatttgttgacacacgtgtagctgcatttgtcgcactggaagggcttttggttcttgtgcttccggatatggtactccaagtggtgcttgaactcggtgacgaacgggcacttcgggcactgcaggatcttgtctggtttcatgtgggtgcgggtgtgcgcccagaagtccaccttggtgatggccaccacgccgcaggtcttgcacttgtagttcttcatcttgccgtgcgaattgtagatgggcatccggatgttggtatcatcgtcctcggactcggccatgtacttcatgtcctcgctggagttcgacatctgatcgtgctccttctccggctcaatattcgactgactcgacttggccggcgacttaggcggtgtgacatccatgggtggtgttagtgcctgcaacttctcgctgctgccagtggcaactgcaacgggcgcaattgtggaggcagatgtgggcgtgggctgcggactgggtcgcagattgccgccatagaagtgctgcatgggattgggcagaccaggtggcgtcagcggattgaatccacccatcagatggtgatggtgatgatgttgctgctgggctgcctggaaatgctgctggtactgctgttgctgcagcaactgttgctgcaagttagcatcgtaatgctgcaggctgttttgatcgttttggctgggtgatggggtcatggcgcacagggtatccatgggttgctgctgaagctgctgctgctgctgcttgaggaactgttccaggtgattggtcgagggaatgggcgattggcgcggactgctggccacgctattcccgtcgagatgatgacctggctcctgtttgatatttgccgcgaacatgctgttgtaccaggcgttgtgctgctcgtagttggtcgtggctgtcgtctcccagttctgcatcttggcggctctagacggctgtaatggataagaaaacagagagagtggggttagtgggcatattcatttattcattcatgcactgcgcctgcgtcgagttttttcctctttttttccgcttgtttttcattttatttttcctcgcttttattttttttttctctttttttggtgtgcttgcggcaccacccctaacaaaaaatacgtcaggggtggctgggcggcacccaccccctgaaggcgatttgagtgattttgtgttcaaaatggagacacttggtaatggctaacaatatcctaccgtttcgtggccgctcagtgcgtatgattgcgattgtatcgaagtatattccaaatttgtcgggattttcgtaaggatttgcaagtatattattggtgctgcttctgttgtgttgtcgcagtggtaacaaactcgtgactgactgaacaattgcaacaggcattagtttatatatcgctcaggtagacggatgcacgcgtcaagggattagatgggcagaggtgacgggaagtcaggtacaggtcgcggatcggtcgggaatcgaggatcacggatcgcggattgaggattgcgctcttgatccattctggattagagcagaaacaaaaaattatgcgcacttggatttggatgatccgggagcttagcggatggccagcttagcagcgagctgcgaattttccaccggttttctatggggattacgttggtcaggagtcgacagcaggagtaggcagctagcgtgggcagtttcgtagttaataataaaaagtaaaaaggattgcgggacttaactaaattaacggatcagaactgcttacacctgcgggaaaactctaaggaccaactaaactatatgcataatatgtgcagtataattattacacacccatttgaaaaacattttcctgacaacaattttccgccagacatttcactttgatttgcgtagtttttctaataattctcgcattaaaattgcttgttgcctatattttttccatttccaatttcacactgaaaaattgtgcagttgctgcatttttggctaattgtttgtgctttcaagtaaatattattaaaaacgcaaaacgggaaaaaggggcatttacggaatattattatgggaggatggtgctgtgctatctggcagctaaaatatctacaatacttaggcataattgatggttcaggaaacagaaagtgcaccacacaaaatgaagcttagcatatttatttaaattcgcttttgtggatatttttaaagaaagccaaaattaattgctcggcaagtgtgttagtgtgtgtgcgcactatgaaacaaagagaattttcgcctttcgtctgggcttttttgtgccatgcccaacaacagcaacaaagccaaactaaaggccaagtgtaaaattaatattacgccgggcaggggcatgggccaagggggcaggggtgggggcatggggaccatgcagtgggggttagtggcgtggtgtggccacaacgagtgcagccaggcaaccgaaactgcaaaagtaaactaaacatgtgctagtcgtttttggtgcctccccccccaccccaacaccggcccctttttaaccctctaaaaatatcatgaaaatggcaaaaatggaaaaattcgaaaacgcagaaaatgcgccacacaaaaaatgtttttgttgaaaaatccgtacaaaaagcaagccaagagcaggatatgcctgcttgtttgcaggcgtatataaaatatatgtatgtatgcgtatacatatgtgtagttgcaaccgttatgttgttggcttagaacaacttgttgttttttggagctgcattcgtttagggaaaactgcactgctgctgctgactgaagtgattcaatgtcatttgcggtttataaatatatcccgtataatatgtgcatatttatttttatgcgcctaacaaagccccatttgtttgaaatgcgctcagttctttttgtcggcaaacattaaaactgtcggatgacaatcaattctgcaaaagatcgtgcaataatgattcccatcatcatcctaaacaaaaaaaaaaaacaaagcctgcgagcgtcacataggtgtattcattatatttgaaatgcattttggcaagtgccgaactatttgccattaaaaaattgccacgttgactttgaattatagttcgatgtctaaatttaaattattaaaaaagaaaagtcgaaaatgcatttgccgaaagaagagcgaaaagaaatgctaaaaattgaaggggttatttggggggcaggaaggcgaaaaaaaaacaacatgaaagtcgacatgtaaacaaataaaattagctgtcaggcgtagaggggggcgtggccaggggcgttgcttaggaggagcaaatgaggaggggggggggtcggttgggggttggatatacgctgcagttctaggcaaaaacagacagagcgggcaaaaaacaagttcacccgaagatcggccaaaagccagacagattttaaaatattgttttagaatttttgccatttgcatttttagcaatgatttaccactctgtgtggttgtgtgtgtgcatgtgtgtgagatctcttgtttgtgttcctaaggttagacagaaaaagaagcactcgattacaaacaacaagaagagaacaagaaaatgtgcagaactagaagaaagttgagtacttgggattaaaggtgattatgacatagaataagcaaattggttatcagtcatcagattagcatgaattaataaagtaaaatacattaagcatagtgcataatagcatataaacgaactatttaaatctgtttcttttgaaagtatatcacatgatgaattataattaaacaactatatatcgaatatattctataaaaaaaaacagatttcgtatcaattgagaactaaattaaaatttacagggcgtatgtaaatcctcacaaaaactgtgtatattctggataccccaacattttggcatttgctcccgcaaaagcgatttgtaattcttgtttatttgtttatccgcggaaagcttttgcgaatttctacctccatgtgttttttacgatttattggaggtcgaatgcagtgtataactaggatattggatggtacgcccagttacttaccttgcggacagtccaagtgcaattctgcgggagaatttggaaacgggaaccgggagcaggagcaggagcacgtaagttttcgcttttcgctcgcggactctctctttcccactctctcgcttgaccgcggcacggttaccgttagaccaacacgcacagtgcgtgcgagggggagcggcgatgtgggggctccttgctcttcgtttttgtctattttttgggcctcgctttttagcttgcttttgtgctttctttttcgcggaattcgcgcatgtgcgggatgtggtctttgccaaaaaataagttttcgggacaaaagtctttttgcaattggttatcttttagcacaagcacgaagtttaattgtatttaatggcaatatttgttttgatagcagttacgtttcgtcctttggatgtttggttatttttgtatttcagtggctgcctgtcaatgctggcgactttcgttttcgggactcggagcacaactgaccaaactcacgctcagcgggctcttctaatagctgaaaatctcctcactgctcctcacaacagtgcactcgccaaaaaagaactcaaatctaaaatctcaattgcaaagcaaaaacaaatgccagaagtgcaacaacacaaaggcgcacgagagccgttacacggagaagcagaaatcgaaatgagagagcagccggagagcatcaacaacgtaacgacgaaactcactcaaaacggatacggatgctagctgtaaatctgagtgactttccccatccccaaaagcaataactaaacagcatccccttcgtggcgttcgctctttcactcactcacccactctctcgctctgactcgctcattttatccttttgcattttctggcgctgcattttggccgaatgcagctgcctttttggctctttgccgttttttggcatctccgcttcactattgattattgatttctggcccaaaagtgagagagcggaaatggaggaagatggggggccttcgccaattgttttttgggcaactttaagcccagacacattaacaacttagccaactgcaattgggacgatggaagtttgggccgaggagattccttgttgctttaacacattttcctgttgctgtgcgtgttaacttaatttgggcaaagctttgccacaattagcattcgaaattccaaatctccttaaggtagtttgtgcatattgggtgtattccacctttttaagctaatttcggaaaatgtatcattgttagcttgacaaggattatggttagcaataaatgcatatcattaatagtatcattcggtttagaccaatttttttcccaagcggaatgttcgcttttagaatgataaattaggagcgattgttctaactaggtttaatgacaaattttggactaaaaaaaaaaactattattattattcattattcatagttcattggtaaaaacc

SEQ ID NO: 20759 - DNA, 2762 bp, DROSOPHILA
aaagtcgccagcattgacaggcagccactgaaatacaaaaataaccaaacatccaaaggacgaaacgtaactgctatcaaaacaaatattgccattaaatacaattaaacttcgtgcttgtgctaaaagataaccaattgcaaaaagacttttgtcccgaaaacttattttttggcaaagaccacatcccgcacatgcgcgaattccgcgaaaaagaaagcacaaaagcaagctaaaaagcgaggcccaaaaaatagacaaaaacgaagagcaaggagcccccacatcgccgctccccctcgcacgcactgtgcgtgttggtctaacggtaaccgtgccgcggtcaagcgagagagtgggaaagagagagtccgcgagcgaaaagcgaaaacttacgtgctcctgctcctgctcccggttcccgtttccaaattctcccgcagaattgcacttggactgtccgcaagccgtctagagccgccaagatgcagaactgggagacgacagccacgaccaactacgagcagcacaacgcctggtacaacagcatgttcgcggcaaatatcaaacaggagccaggtcatcatctcgacgggaatagcgtggccagcagtccgcgccaatcgcccattccctcgaccaatcacctggaacagttcctcaagcagcagcagcagcagcttcagcagcaacccatggataccctgtgcgccatgaccccatcacccagccaaaacgatcaaaacagcctgcagcattacgatgctaacttgcagcaacagttgctgcagcaacagcagtaccagcagcatttccaggcagcccagcagcaacatcatcaccatcaccatctgatgggtggattcaatccgctgacgccacctggtctgcccaatcccatgcagcacttctatggcggcaatctgcgacccagtccgcagcccacgcccacatctgcctccacaattgcgcccgttgcagttgccactggcagcagcgagaagttgcaggcactaacaccacccatggatgtcacaccgcctaagtcgccggccaagtcgagtcagtcgaatattgagccggagaaggagcacgatcagatgtcgaactccagcgaggacatgaagtacatggccgagtccgaggacgatgataccaacatccggatgcccatctacaattcgcacggcaagatgaagaactacaagtgcaagacctgcggcgtggtggccatcaccaaggtggacttctgggcgcacacccgcacccacatgaaaccagacaagatcctgcagtgcccgaagtgcccgttcgtcaccgagttcaagcaccacttggagtaccatatccggaagcacaagaaccaaaagcccttccagtgcgacaaatgcagctacacgtgtgtcaacaaatccatgctaaactcgcaccgcaagtcgcacagttctgtgtatcagtaccgttgtgcggattgtgattacgccaccaagtattgccacagcttcaagctgcatctgcgcaagtatggtcacaagcccggcatggttttggacgaggatggcaccccgaatccctcgttggtcatcgatgtttacggcacgcgtcgtggtccgaagagcaagaatggtggaccgattgccagtggaggaagtggcagcggcagccggaagtcaaatgttgcagctgtcgctccgcagcaacagcaatctcagccagctcagccagtcgccacatctcagctgagtgccgccctgcaaggattccctctggttcaaggcaactccgctcctccggcggcatctccagtgctcccgctgcccgcctctcctgccaagagtgtggccagtgtggaacagacgcccagcttgcccagtccagccaatcttctgcctcctctggccagccttctgcagcagaaccgcaacatggccttcttcccctactggaacctcaatctccagatgctggccgcccaacaacaggccgctgtcttggcccaattgtcgccaagaatgcgagagcaactgcagcaacagaaccagcagcagagcgacaatgaggaggaggagcaggacgatgagtacgagcgtaagtcagtggactctgccatggatctgtcccaaggaacgccagtgaaggaggatgagcagcagcaacaaccgcagcagccgctggccatgaatctcaaggtggaggaggaggccacgcctctgatgagcagctcgaatgcctcgagacgcaagggacgcgtcctcaagctggacaccctgttacaactgcgatcggaggccatgacatctcccgagcaactgaaagtacccagcacacccatgccaactgcatcctcgcccattgccggacgcaaacccatgcccgaggagcactgctcgggcaccagttcggcagatgagtcgatggagacggcccatgtgccgcaggccaataccagtgccagttcgacggcgtccagctcggggaacagctccaatgccagcagcaatagcaacggcaacagcagcagcaattccagcagcaatggaaccacctcagcggttgcagctcctccatccggaactccggcggcggcgggtgccatctacgagtgcaagtactgtgatatcttcttcaaggacgccgtgctctacaccattcacatgggctaccacagctgcgacgatgtgttcaagtgcaacatgtgcggcgagaagtgcgacggacccgtcggcctcttcgttcacatggccaggaatgctcactcctaa

SEQ ID NO: 20760 - protein, 758 aa, DROSOPHILA
MQNWETTATTNYEQHNAWYNSMFAANIKQEPGHHLDGNSVASSPRQSPIPSTNHLEQFLKQQQQQLQQQPMDTLCAMTPSPSQNDQNSLQHYDANLQQQLLQQQQYQQHFQAAQQQHHHHHHLMGGFNPLTPPGLPNPMQHFYGGNLRPSPQPTPTSASTIAPVAVATGSSEKLQALTPPMDVTPPKSPAKSSQSNIEPEKEHDQMSNSSEDMKYMAESEDDDTNIRMPIYNSHGKMKNYKCKTCGVVAITKVDFWAHTRTHMKPDKILQCPKCPFVTEFKHHLEYHIRKHKNQKPFQCDKCSYTCVNKSMLNSHRKSHSSVYQYRCADCDYATKYCHSFKLHLRKYGHKPGMVLDEDGTPNPSLVIDVYGTRRGPKSKNGGPIASGGSGSGSRKSNVAAVAPQQQQSQPAQPVATSQLSAALQGFPLVQGNSAPPAASPVLPLPASPAKSVASVEQTPSLPSPANLLPPLASLLQQNRNMAFFPYWNLNLQMLAAQQQAAVLAQLSPRMREQLQQQNQQQSDNEEEEQDDEYERKSVDSAMDLSQGTPVKEDEQQQQPQQPLAMNLKVEEEATPLMSSSNASRRKGRVLKLDTLLQLRSEAMTSPEQLKVPSTPMPTASSPIAGRKPMPEEHCSGTSSADESMETAHVPQANTSASSTASSSGNSSNASSNSNGNSSSNSSSNGTTSAVAAPPSGTPAAAGAIYECKYCDIFFKDAVLYTIHMGYHSCDDVFKCNMCGEKCDGPVGLFVHMARNAHS

SEQ ID NO: 20761 - DNA, 2939 bp, DROSOPHILA
tcttcagcagctcagccttttccagtttgcccgacagctcggaacctacgtcctctgaatccacataagcgtgcacctgtactggcttgaacaacgtggacaagttcgtctccggtttttttcgagaaaataaaaaggccgcacgatgcagtcggcgcagggacaaatcaattgaaaaggacggacgcaggtagagtgtcatccgcaaaaggcccgttaggctgatgcagcgcctgcagttttgcatggttgtccactttagtggaacacgcgtggtttttattcaccaattcccgcaaaatgaatctccgtactcacgttcctatctctgatataacagagaagtacaatcagctgacgcacatctggttgttgggttgacaatgctcttacagaatagcattgccatatcgatggtttttatgctacgtatgcggggaattcttttgaaaaattattaaaaaattagttttagaaaacacatcagaaaaacgattgtggaatttaatttatactaaaaaaatattttaaaaaagtattaaaacatttaattgtattacgacggatataaaataggatatttgagaacatatatgcatttacaataaaaagcaaataaaatatgttgttcctaggcaatcgcaaaatatttataaataaaaatgaaaaaatgaaaattgattccacaatagtcgttaaaaaatgtagtatcggtatttggcattgcattttttcgcaatacagtctcgctttatatatggaatattttaaaaatattttcataaaatcgataaaatgaaaaacaattacgtattctaagccagcatacgcaaataataaaatttatttaataatcggtagattaaatgttaatgtccttataagcaattttaaaacttaataataaaaactctttaaatatatcgatctatcgatgattggctatgctaacaagaagtcatatatattggcaacgctgtgtttgtttgtcagaatcaaaataaaatgactcacttgtttgtttaaacaaaaaaagaattttaataacaattccagacaattatcataacagttagtgccatgggcttattcggcagaactcccagtaaagatcccaaagagcaggtaacgacgcagaggcgtggcagtgatttttttgggaatgatgtcattccagttggattgattttattagacctttccccatctgtccattgtgcgttatgaatattgttttgaaatgtaaattcccattaggtgcaggagtggacgcataagatacggaaagagggcaaccagctggatcgccagatccgaagtatccagcgcgaggaagagaaagtaaaacgctcgctgaaacaggcagcacagaaaaatgaccgcgacacctgcgtcattcttgccaaggagattgtgaatgcgcgaaaggccatcaaccgcatatatacgtcgaaggcgcacctcaactccattcagatgcagatgaaaaatcagctatgtgagtgaactcttcgcttgtttgatacgacctgattatcgaatcctccttgcagccaccttgcgtgtagctggatctctgcaaaagtctacagaggtcttgcaagctatgcagagcctggtgcgctatccagagcttgcaggcatcatgcgcgacatgtcaaaggaaatgatgaaggccggcattattgaggagatgctagacgagaccatggactcgctggaggagtccgaggagctggaggaggaggcaagcaaggaggtggacaaggttttgtgggagatcacagatggcaagctcggggaagctcccctgcctccagaggctacaccggcggacaaggcgtctgcgtctgctgcgcgcgtcgaggctgagcaggacgatgaggagggtgaggaactgcaagagatgcaaagccgcctggcctcgctgcgatcttaaaacaactgctatgggtattttatttagatttgaaattaaaggcaagtgattttgactggcagaccttatcaaaatcataaacggcaacccccacgccgtcatttgattgtagaaaccaaaataatctccagaaacttgaattgagtttttatattataagtgtacagtacaccagatcaagaagtgttgaactctgcgcgttttaccgttgaatctacacgagataacttaatttattgtaaaatctacctttcattaaaaatcgatatttactgtggcatgtcccattttacaatggtaatctgcacgatttacgatcaatccctaagaatgttaattttcgtcatttaagattaagccctaacgttgttttctatccagttcagatacgcttcaacccttgtgtacacgccgggccatccttttaggccacagggcgtgggtccgtaggagaccacaccagcaatgtagtagtttgagtttccattggagtagtcctcgagcagaagggggccacccgagtccccgcgacaggaatcaaccccctcaactccgccggcgcacatctgtttggtggtgacagtccttctttgggtggcgtatctttggttgcattcggacgtcggtaccgtatccaactcagccttcagcttgatattggacgtaaaatttgtctccgtgcgaccccaccctgccaccaccacctttcggccaaggaatatattgttgtgctgggacgctaaagtgggcagacatactggtaatatgaagtcgctgtactgaacctcgtcccgcaatcgcagcaacgcaatgtcatttagctggtcccgtgagtttcccgggtactgcgggtgcggaatacgctcctcaacagggtagtctacgtacggttcgttgcagtcccgtcgtccgtttttaccgactgtgcaatccggattggtgctcgcatcccactcacccaggcgtactcccgtcagctcccaatcactgggaatagccg

SEQ ID NO: 20762 - DNA, 752 bp, DROSOPHILA
ataaaatgactcacttgtttgtttaaacaaaaaaagaattttaataacaattccagacaattatcataacagttagtgccatgggcttattcggcagaactcccagtaaagatcccaaagagcaggtgcaggagtggacgcataagatacggaaagagggcaaccagctggatcgccagatccgaagtatccagcgcgaggaagagaaagtaaaacgctcgctgaaacaggcagcacagaaaaatgaccgcgacacctgcgtcattcttgccaaggagattgtgaatgcgcgaaaggccatcaaccgcatatatacgtcgaaggcgcacctcaactccattcagatgcagatgaaaaatcagctatccaccttgcgtgtagctggatctctgcaaaagtctacagaggtcttgcaagctatgcagagcctggtgcgctatccagagcttgcaggcatcatgcgcgacatgtcaaaggaaatgatgaaggccggcattattgaggagatgctagacgagaccatggactcgctggaggagtccgaggagctggaggaggaggcaagcaaggaggtggacaaggttttgtgggagatcacagatggcaagctcggggaagctcccctgcctccagaggctacaccggcggacaaggcgtctgcgtctgctgcgcgcgtcgaggctgagcaggacgatgaggagggtgaggaactgcaagagatgcaaagccgcctggcctcgctgcgatcttaa

SEQ ID NO: 20763 - protein, 223 aa, DROSOPHILA
MGLFGRTPSKDPKEQVQEWTHKIRKEGNQLDRQIRSIQREEEKVKRSLKQAAQKNDRDTCVILAKEIVNARKAINRIYTSKAHLNSIQMQMKNQLSTLRVAGSLQKSTEVLQAMQSLVRYPELAGIMRDMSKEMMKAGIIEEMLDETMDSLEESEELEEEASKEVDKVLWEITDGKLGEAPLPPEATPADKASASAARVEAEQDDEEGEELQEMQSRLASLRS

SEQ ID NO: 20764 - DNA, 4341 bp, DROSOPHILA
tacagttatagaataggagcaggagcaatcggagcggagaaattagtgggttgcaattgcagtatatagatgccactagctgagccaggttcaacggcacttgacagtggcagcaaagacttacttgtaaaatcgtcgagctcttcctgctccgcttcggcggcgagttcctcgggcgtcttctttttccgcatcaggggattgggctcttcttggggggccgcctccacgatctcctccttcttcttgatgttgtactgaatggttaatgtggagtcgatagatcaataggttgattagaccactgggcttggctaggagtctggtatcttaacagctaacacatttttaagtgctcctctgttgtgtcgctcctttgcagctcaatctgactccgttagggagtcgctcattaaaggactccctactagagtcaatttgagctccaccaggactggttccgccatgtcagggcatggattgcatacatggatttttcactgtgattgcgaagttcccaaaaaccccggacacttaccttatcgcgaatgtcttgcctcatcttctcgcgctcctcctccattttccggtgcttttcctttcggcggtcctcggcctccttgatggcctcctgacgctccctctcctcctcctctgccttttccttgtcgtcgccatcatcgcctccatcacctcctacagcgcctgtgtaagtgacgaggtataagatgtttagtatgagatttaactttgcgcttaaaagtttttgtagaaattgagacaactggactaagtttgtttttaatttactcaaaatcggccgtgaccaattttagattgaatccaaaccccgacatcttgacacatatgattaacgtacgcctttcagcttggctcgttatcgcctagcgtgttatcattccgagtgatttacatttttattccagcaccactgtctctgacagggaaaacaaatgggaaaccgattagttgggatctagtgtgtctaagccgcagtctggaagcagaagcacggaagtgggccgaggtattaagagcgaccttttgctgttccgacctctaagaagaaaacaaggcccactacctccggcgcaaacggcaaatggcgtcgtgctcattttgattcgagcgactacagcaccagcacccaggagaaatgatttcaaaagcactggccgtcctgtggatagctggcatcgcctacggccaggacgatctgctcagggtggaaaccgaattgttgagcttctctcacaacctagagccgtatctcgacaccagcaagcagccctgccaggacttctacggttatgtctgctcgcacagcgccaacctcagcgagactggcaggcagcgattccaaagcttgcttaaggaaacggacgtggcgcagctgatggacatggaactccaactgataaacttcttcaagtcttgcgagagcgggcgtggcgtagaggcgctcaagggatctcaattgtataggcagagtgggggctggcctagcttggaaccgaacaaagtcaatgccagtcagcggactaaccaaacccaaagatggctgggacttcttgggtacttccacgaagtgggcgcgccctatttcttcgagacgtcggtcaccatgcagtccaacaagcgacttgtggtactgcaacccgacggcacgcgccgaaacactctaagaaaattcgagcagcgggtgggcgaagtcctgcaaagcttcgggatagaacagagccgcgcccacgtgaccgccctcgaagtgctcagcttggagcgcagtagacgggacattgtaaaggcggatcacgtcgaggatcaagtgcagttttcctatggaaactttaagcgcatcgtcttcggaaacgcctcgctgatcagactggactgggatggctacttccgcaagttgctaggcggcaaaacgccacaggccagcgacaccattgtagtcaaacaactgcccagactggttgagtacttcgcgctgctccaaaacacaagcatggttcgacttcttaattggatatggacggactacttgatgggtgagtttttccagaattttcaaaatgactactattctattcgtattcaaatatacagtcattttccactgttgtttgctaacccaaaagttttctaaaatatgttaacaaagaaaggtcatgtttattcaatcgataattcagagattcctgataagcatcctatagaacttaattttttttcaactcattccgttgaaatattttcgtaacgaatatttgagagcatcttttaatgcgttctttgacaccacaaaatgcacatttcaaatgtgttcaaacttttcctattaaagctatttagcttagctttaaaataggactgaactattgaggttgaaagtcataaaaaactcaatatttaatttgttcatccctttattagacatcgtagatgcagactgccaccaattatcggaaacctacgccggggacctttacgcccacgtagtgcaacgtgttacggcaaatcgagtcgaactggcccaaatgtactcggagctgggaaaggcctacacagaccagctaggcggcagtgtgtggatcgatgagatctctaggcagagctcgagacagtttttgggtaacataatgcacactacgctgaatggagatgagcgattggacgcggcataccactcgattttgttgggtcggcggagcctctaccgcaacctggagaagctgcgcaagtttcagcgcacgcgacgtttggcctcccattccgcccagcaggtgcgtcgctacgcccaaatgttcgctccagtaaatgcgttcctagggcagcacaatctgagcacgccgctcaactacctcctactgggggagttcttttcgcgaagccttgtagccgcaggtagcagctctcgtacgcaaggagcctggcggagctcggactccgagaggcgctttgccatcttccaacagtgcgtaggtaagcagacgaacgccatcgatctgcttctgagcctgctcgcccaaaggcaagcgcttagtgcttacggtcagtggcttgccacccaggcggggctagtggagagagtcgacgcggttctggccgccggtagctcgaagatgtccctacagaggctctttttcgttaccagcctgctcgtcgactgccgctccgagctgggcgccctgcagcaggaccgtaagcggcaggtgactcacgccacactgcgcaactcgccggagttcctggaggcctttaggtgccgtcctggagatgtcctctacccgcaggaccagcgctgcaatcctctttagggtcggaccttgaacttttagctgctgttgccaccggtggtgttaaaaatcaataggacgtgcctacaacaactggagggcttctaaggcagcgaccaacccccaattgattgatttttcccgtcacaatttgcacagtttcatggatcaccatatgcttacggaaacgttacgttacgtgaaaaataaatgttgttcgcttggaaagacttacatggaacagaagttcggtaagagtgacagcgttagtgtgttgtggcgagttgagtagtagtttagtaggttggttgagtggtggcagtgtgttgtagaaggggaagaagacgaattcagtgtgtccgccgccggaaatcgaaccgaaaggcagtgttggaaggcagactggacttagactcggtttatgcttcataccaatgaaattcatgatttcagggcgctctggaccgatgctatctgtccgtcgtggggccttctatcttcgtttccgtcccaagtggatgcaaccgttgcctaagccgactctggcactactggactcgctgtcagtcaggagctgcaccatctccgacccactggctcggtcgcagtgccgacgtggtcatcttaatcgattcgaagcagttgcccgaagtgcagtgcaaacgcgaccaccagtttccgcgaactgagtgcagaaagaggtcttgacaggcggacaggcgcacaaaacagcgaactttagctacaggagtgcgaacccggagtgggagttctgctagtcctgctccggccttttatgtcatggcgtggcacgggttgcctctgccgcgtcgcagtcgaggcaacccagcgcctgcgcaggttccagcggattgagtccggctcggattctggcggtacgctggtgctggctgatttgctagtaagagcagcctggcattttctctgcctgttctgataacgaaccctgtggggcgacagagacgcattatctctgagggcgcagaatccggctttcgac

SEQ ID NO: 20765 - DNA, 1956 bp, DROSOPHILA
gtgtgtctaagccgcagtctggaagcagaagcacggaagtgggccgaggtattaagagcgaccttttgctgttccgacctctaagaagaaaacaaggcccactacctccggcgcaaacggcaaatggcgtcgtgctcattttgattcgagcgactacagcaccagcacccaggagaaatgatttcaaaagcactggccgtcctgtggatagctggcatcgcctacggccaggacgatctgctcagggtggaaaccgaattgttgagcttctctcacaacctagagccgtatctcgacaccagcaagcagccctgccaggacttctacggttatgtctgctcgcacagcgccaacctcagcgagactggcaggcagcgattccaaagcttgcttaaggaaacggacgtggcgcagctgatggacatggaactccaactgataaacttcttcaagtcttgcgagagcgggcgtggcgtagaggcgctcaagggatctcaattgtataggcagagtgggggctggcctagcttggaaccgaacaaagtcaatgccagtcagcggactaaccaaacccaaagatggctgggacttcttgggtacttccacgaagtgggcgcgccctatttcttcgagacgtcggtcaccatgcagtccaacaagcgacttgtggtactgcaacccgacggcacgcgccgaaacactctaagaaaattcgagcagcgggtgggcgaagtcctgcaaagcttcgggatagaacagagccgcgcccacgtgaccgccctcgaagtgctcagcttggagcgcagtagacgggacattgtaaaggcggatcacgtcgaggatcaagtgcagttttcctatggaaactttaagcgcatcgtcttcggaaacgcctcgctgatcagactggactgggatggctacttccgcaagttgctaggcggcaaaacgccacaggccagcgacaccattgtagtcaaacaactgcccagactggttgagtacttcgcgctgctccaaaacacaagcatggttcgacttcttaattggatatggacggactacttgatggacatcgtagatgcagactgccaccaattatcggaaacctacgccggggacctttacgcccacgtagtgcaacgtgttacggcaaatcgagtcgaactggcccaaatgtactcggagctgggaaaggcctacacagaccagctaggcggcagtgtgtggatcgatgagatctctaggcagagctcgagacagtttttgggtaacataatgcacactacgctgaatggagatgagcgattggacgcggcataccactcgattttgttgggtcggcggagcctctaccgcaacctggagaagctgcgcaagtttcagcgcacgcgacgtttggcctcccattccgcccagcaggtgcgtcgctacgcccaaatgttcgctccagtaaatgcgttcctagggcagcacaatctgagcacgccgctcaactacctcctactgggggagttcttttcgcgaagccttgtagccgcaggtagcagctctcgtacgcaaggagcctggcggagctcggactccgagaggcgctttgccatcttccaacagtgcgtaggtaagcagacgaacgccatcgatctgcttctgagcctgctcgcccaaaggcaagcgcttagtgcttacggtcagtggcttgccacccaggcggggctagtggagagagtcgacgcggttctggccgccggtagctcgaagatgtccctacagaggctctttttcgttaccagcctgctcgtcgactgccgctccgagctgggcgccctgcagcaggaccgtaagcggcaggtgactcacgccacactgcgcaactcgccggagttcctggaggcctttaggtgccgtcctggagatgtcctctacccgcaggaccagcgctgcaatcctctttag

SEQ ID NO: 20766 - protein, 592 aa, DROSOPHILA
MISKALAVLWIAGIAYGQDDLLRVETELLSFSHNLEPYLDTSKQPCQDFYGYVCSHSANLSETGRQRFQSLLKETDVAQLMDMELQLINFFKSCESGRGVEALKGSQLYRQSGGWPSLEPNKVNASQRTNQTQRWLGLLGYFHEVGAPYFFETSVTMQSNKRLVVLQPDGTRRNTLRKFEQRVGEVLQSFGIEQSRAHVTALEVLSLERSRRDIVKADHVEDQVQFSYGNFKRIVFGNASLIRLDWDGYFRKLLGGKTPQASDTIVVKQLPRLVEYFALLQNTSMVRLLNWIWTDYLMDIVDADCHQLSETYAGDLYAHVVQRVTANRVELAQMYSELGKAYTDQLGGSVWIDEISRQSSRQFLGNIMHTTLNGDERLDAAYHSILLGRRSLYRNLEKLRKFQRTRRLASHSAQQVRRYAQMFAPVNAFLGQHNLSTPLNYLLLGEFFSRSLVAAGSSSRTQGAWRSSDSERRFAIFQQCVGKQTNAIDLLLSLLAQRQALSAYGQWLATQAGLVERVDAVLAAGSSKMSLQRLFFVTSLLVDCRSELGALQQDRKRQVTHATLRNSPEFLEAFRCRPGDVLYPQDQRCNPL

SEQ ID NO: 20767 - DNA, 2895 bp, DROSOPHILA
ttgtataatttttggtttgacagtgaactgtattttactcacctttcattgtgtgttctatgtgattaaagactttacttttgctattaagactttaattttctacgaatgatcacggaaaagtaatccactgttaagtttaaaagttaaatatattttctttgtggttaagtttgtgtgtgaatgtcacaaagtcttggaattaactgaaatgggatcgcatttttggcactttcaacaaaaacatttttcagctgataatgactaatagtatagataacattctattggtcaaggaagtagacaattggttattaataatgtacgatgataaacatcttttcacttttgttttcgttataattaatttcggtgagatatgacaacaattaagttccccgaaagcattccaatctctatattaaacagatattgcaagtaggcacccaatgttttacattcttataaagaacggggtttattgttcgttacgtgttacctacttttaggcatcattagataatggtaatcagaagataatgataataataaatattgaagaaatattttaaggcaaattggtctagcttacccgctaaagaaggcaggtaaaagatttgcaactagatagatctaaaagtggtcgattggatgtcttagaaatatgatacttttcattcactaaagtatgaaagattttatgatagaacgtcaacccaaaacaaaaatggtcttgaacctgggcacacgttcatatgtaggaatgccacctttgatcagacgttacatatgttttatatgaactcttatcaattctgagtaagaaaataaagatagtactcatattcgagtaactctatcatatgaacagtacaatcagattctagcatttaacatactagcaaatcatgcaaattacttataaatgctactctataaaaacgcagttcaatgaatggaaagtttcagttcgataaaacactcgatagcatcacacaaaatgaagctatttggactgctctgcgtaatgttagtacttcaagaaagtactctggctgttgtacaagtatgttggaaaacattcttaaaagtatgaaaaattagaatgttcactttcacagaacggatttgcgttcaagacgtccttatgcgagggtaaaaatggtggactcttgcccatgtttggatcctgtaaaggatattacgtgtgtgctgatggaaacgctgtgaccggaacttgtgaaaagaatacgttgtttaatcctttaacgttgcactgcgatgatcctgacaatgtggattgcattttcgatggcaaggataatattgttgacgacacgtcaagttctgaaagcgacgaagacgatgatgaggaaatggccaaaactgatcctcccgttactgtcaaagcgacgaaaaagccgcgtcctacaacccttgacaaaatgtgtgctggcaagaaggatggagtgatgcttacaaagaacgggtcctgccaggaatattatgtctgcaaagcaaaaaagccccatctgcgctcttgtcctgacaaacaacattttagtccaactcgtcgcatttgcatgaaggcctcagaagccaagtgttcgggtggaacccgagaaaataaagaatcagatggtcctgccaccacgggaggagtgtgttcagatgaaaaggaaaactctcttgttgctcatcgcagcgattgtggcaagtttatgctctgcagcaacatgatgtttttggtaatggactgcccaactggcctgcatttcaatatagccacatcacgatgcgattatcccaaaattgcaaaatgccagacgaagctaaatgaaagcaaatccaagtcaaagaaacctgtgcgcaagtcaaaaaaacgtcgattctaactatatttttttaagaccccaataaagtgcttgaattataataatttttaatagtccaaagcctaaacagagaaaatatagccacatcatatagtactaaaaataaggggaatattttctattctctgcttagaataagtagtttttatctatagaaaaacgaaaatcttttcgtttaatactctgctttaaatattgtttattgaaaccacttagcacttaacattatcgggccaatcgcaggatttgacctgcaaattgaacaaaagtccagaggaacaagtgaagttcacctcacactcgcactggcagactacataattagaactacaatctccgctggcatcggcgaacatggtaccatcccgctggccaacgcatcgtccgtggctctcgcaataagttcccgagggtccggcaatcggaccacttggcggtgcagatccatcgtcgcattgaacattttcgggataatcgcactgctctattattgaattgtattgcaggttgttggagcaccgctgctcatatttgttaccatttacgcactggtagaaggcggagcaatttttctccacgggccagatggaattgttgggcacatcgcagcagtcgggatcgcaggttttgggaatgcacacattctctgtgtcgacctcgcattccttcagtgtggtattgaagaactgcgtagcggagcacttcctggccacaaagactccgtttatgcactgtaggtatccggcgcagtccgcaggattcaccttaacctcattctcagtgcatgtcgttccatttccgttgcactgaccattatccacatcgcagacctctgactggctgttccagtagtaaccactgtcgcaggacttggtcacatacttgccaccggaacagatctcatacatggtacagtcggccaagggttttgtagatccctctttacaattgacacatattccctcgtcgtcttgtacacaagtctccagtgtggcattga

SEQ ID NO: 20768 - DNA, 840 bp, DROSOPHILA
atgaagctatttggactgctctgcgtaatgttagtacttcaagaaagtactctggctgttgtacaaaacggatttgcgttcaagacgtccttatgcgagggtaaaaatggtggactcttgcccatgtttggatcctgtaaaggatattacgtgtgtgctgatggaaacgctgtgaccggaacttgtgaaaagaatacgttgtttaatcctttaacgttgcactgcgatgatcctgacaatgtggattgcattttcgatggcaaggataatattgttgacgacacgtcaagttctgaaagcgacgaagacgatgatgaggaaatggccaaaactgatcctcccgttactgtcaaagcgacgaaaaagccgcgtcctacaacccttgacaaaatgtgtgctggcaagaaggatggagtgatgcttacaaagaacgggtcctgccaggaatattatgtctgcaaagcaaaaaagccccatctgcgctcttgtcctgacaaacaacattttagtccaactcgtcgcatttgcatgaaggcctcagaagccaagtgttcgggtggaacccgagaaaataaagaatcagatggtcctgccaccacgggaggagtgtgttcagatgaaaaggaaaactctcttgttgctcatcgcagcgattgtggcaagtttatgctctgcagcaacatgatgtttttggtaatggactgcccaactggcctgcatttcaatatagccacatcacgatgcgattatcccaaaattgcaaaatgccagacgaagctaaatgaaagcaaatccaagtcaaagaaacctgtgcgcaagtcaaaaaaacgtcgattctaa

SEQ ID NO: 20769 - protein, 279 aa, DROSOPHILA
MKLFGLLCVMLVLQESTLAVVQNGFAFKTSLCEGKNGGLLPMFGSCKGYYVCADGNAVTGTCEKNTLFNPLTLHCDDPDNVDCIFDGKDNIVDDTSSSESDEDDDEEMAKTDPPVTVKATKKPRPTTLDKMCAGKKDGVMLTKNGSCQEYYVCKAKKPHLRSCPDKQHFSPTRRICMKASEAKCSGGTRENKESDGPATTGGVCSDEKENSLVAHRSDCGKFMLCSNMMFLVMDCPTGLHFNIATSRCDYPKIAKCQTKLNESKSKSKKPVRKSKKRRF

SEQ ID NO: 20770 - DNA, 2055 bp, DROSOPHILA
atcgaaagtgaacaaacccgtttgtctgacctttacacattaatatttgttagcacatctctgtcctccgtcagcatgcgacataaagtatacaaaaaaaaaacaaaaaaaaacaaaaataaaatagcaaatcttacaggaaacccgaatggcaactactaataaatattaattattagcctaaacaaatccagctctttacgacctttacaggtgataaatctaaatagagttaaaagtgagaacaaattctgctgattttgcaagcatataagcctattgttgattgaatatcgctgttttagatcttcactttgctaaatttattataatttcatgcttcttattcagttaattaccatatttcttgtcgtatcattcaaagagtttccactgtatatgtaggggcgggcacatatgtattttatgtacacaatatttacgacttcaggttctgtattgaataacccgtccaaccagacctgtcccgtccgtccgatcgcccaagagttgggttcgagctggaagtcacgaggattagatgcgtgtagatgttggccaaccttgcccgggggattcaccagatgccattccatcactgaatcgattcgaatagatccgtttcgtatcgattcgaaagtcgagcggtacattgcaccagcgacttcgaaattcaagttattccagtaaataatactcgtaattaacgaaacattgttcgtataaacaaccaatgggattttaatggcaacaattcagtattgatttatgtaaaatttgaatatttaagcatctaatcatggcaacaaataggcacttgcatttaaattctaatgttactgactaatgatagcaagatcgaatttttcaagaaaccttcagaatacttatttaaagtataatttaatttaagtataaggaagtgtgttttttgtctttttaaccatttgaaaattatttcagtaattaaatggtgttccacttttggcaatggtttttaatgagctatttttggcagttttcaaagtatttaaatgagtaaaagcataagtatttaaaataggagctatatacgattggcatgaattattaaataattttgtttcattgcagtataattatataattattaataatttattatattttttttaatccacttagctgcctgctcttcatcgtctgcgtcctgtgctacggagtggtctccgctcaggaggagggtggtcccgccgtttcgccggcgaagagaatcgccgccctgcgccgtccggtcgggaaggcggccaaggtgacaaccacgacgacagcggcgccagcacaagcggatgccggcggcgagggcgaggagtatgacgaggaaaccggcgagcacggcgatcatggcgaggagggcgacgaggcgtcctttgccagctctaccaccaccaccaccacggaggcgcccaaaaaggtcggcccggttatccggccgttccgctccaacgatgacttcctcaactcgctgaagcgccgtcaggcgaacgcgaagaagcaccgtgccgagaagccgcccagtcccagcaagccggccaagaagagcgacgagtccaactccggcgagcaggaggagcaggcatccgcgccagcacccgccccagcatccagtcccgccaagggctacaagggcaactcagcatgtaagttagtcagggattaggccaggattttgctctaaatggactagcagtgccttctgaatttactaattttgaaataattgacattaaactagaatagaaatctttaaaatcatctctctatatcaagttattaaatccattactaactaacgctttaactatccccagtgagccgtcgcaagctgtcgaagcccgccaaggcgacgcccgtggaggcggtggaggatgccgccgctgaggaatcggagcagcagcagaaggaggagacgaagcccaagcgccccatcggtcgtctggccctgcggaagcgcaacttgagcgttgattttgagtgtcaatcagatccaactcctattctacacacattcccagt

SEQ ID NO: 20771 - DNA, 693 bp, DROSOPHILA
atgagctatttttggcagttttcaaactgcctgctcttcatcgtctgcgtcctgtgctacggagtggtctccgctcaggaggagggtggtcccgccgtttcgccggcgaagagaatcgccgccctgcgccgtccggtcgggaaggcggccaaggtgacaaccacgacgacagcggcgccagcacaagcggatgccggcggcgagggcgaggagtatgacgaggaaaccggcgagcacggcgatcatggcgaggagggcgacgaggcgtcctttgccagctctaccaccaccaccaccacggaggcgcccaaaaaggtcggcccggttatccggccgttccgctccaacgatgacttcctcaactcgctgaagcgccgtcaggcgaacgcgaagaagcaccgtgccgagaagccgcccagtcccagcaagccggccaagaagagcgacgagtccaactccggcgagcaggaggagcaggcatccgcgccagcacccgccccagcatccagtcccgccaagggctacaagggcaactcagcattgagccgtcgcaagctgtcgaagcccgccaaggcgacgcccgtggaggcggtggaggatgccgccgctgaggaatcggagcagcagcagaaggaggagacgaagcccaagcgccccatcggtcgtctggccctgcggaagcgcaacttgagc

SEQ ID NO: 20772 - protein, 231 aa, DROSOPHILA
MSYFWQFSNCLLFIVCVLCYGVVSAQEEGGPAVSPAKRIAALRRPVGKAAKVTTTTTAAPAQADAGGEGEEYDEETGEHGDHGEEGDEASFASSTTTTTTEAPKKVGPVIRPFRSNDDFLNSLKRRQANAKKHRAEKPPSPSKPAKKSDESNSGEQEEQASAPAPAPASSPAKGYKGNSALSRRKLSKPAKATPVEAVEDAAAEESEQQQKEETKPKRPIGRLALRKRNLS

SEQ ID NO: 20773 - DNA, 6043 bp, DROSOPHILA
acgactcacttggcgtagacacgtcgaggcaaaaagaacacactaaaagccaatagtctacattggcttcttagtatacgctctcctctgagactagaatataaggtcttactctacaactccgtcctaaaaccgacctggacctatccagctatccagctatgggggaacgccagtaacagcaacgtagaaatcatccaacgagcccaatcgaaattcctgagtaccatcaccggcgttcgaagtgataacttacatagggatttattcatacttccggtcagagatgaaatagccaaacaaatggaaaaatatcgcaacaaactacgtgcccgcccatccgaacaggcatgcgagagacttaacacggctttctagccgaatcttcgtcgtaacgatatgccaacccaacgataactattagggccacacaaactcatatcagttgcaatagtaactgttagttaagaactttttaagatttttaaacttattgttagtctcataatgagaagcttcaataaacaaagcaacgcataaaaatatatatatatattacaaccatgagtaagagcagaaggagctgaatttaaatgctccttcttcaagttcacgatccaattaaaaaacacaacacatgtgatcaagagttatttttgtcaagactcctaccacgtggcaattttttgggaatgcaagtgttgcacttttaaaggcttctctgttgcacagaacctagagaaaataagaaaaaatacgatgtcttaagaatctaaaatttcatttaatcccgcacaggaactacttcttacgtaagcgtctctccaaggggcccaacaaaatagtcctttctgccagcgattttgtttttccagtggattcccgaagggtaagcaccatgaccccaatttctatatcatcgccccacttttttaataacacgtccaatttttttttttttttttttatttgatttcaggttgatgagggtatagaggccatgctatgctgttggctacagcaactgcaggagtttggaggcccggaagtagacaaaccggatcttcttaagggttccattggctcccttaagaatctaggtttcgtgattcccggcgcagcagctccgggatcggctggagccatcacaaccacggcgaacgggaaaagcggctcttccgccactggcagcttagccaggcacaaccccgcccatctggacatgagagctcggtataacggagatctcgtgcagcttaaggaggtgaatataaacggatctgcggaattgcgcaccaaggcaatggatctactcgtaatggcccatgggctgaggcacgaaaatataaaccccttaattggatggctatcagatccaaaccgcacggccatggtctttgattactgctccagaggatcgctgcaagatgtgcttatcatggatgagatcaagctggactggtcgtttcggctaagcttgcttacggatctggtcaggggcatgcgctacctacacacctcgcctttgagagttcatggtgccttgacctcgagaaactgcgtagtggatgctcgatgggtcctgaaaatcacagactatgggttgaattctttttatgaatcgcagggacttccgccaagaaccagaagtgctaaagagctattatggacagctcctgagctccttcgaaacatgaagctgcaccagcatcaccatcagcacggccgcattcagttgggaacccaacttggagacgtatattccttcggaatcataatgcaggaggtggtagtcaggggagagccctactgcatgctctccctctcgccggaggaaataatagtgaaaattaaaaagcccccgcctctgatacggccctccgtttccaagggagccgctcccccggaggccatcaatatcatgcgccagtgctgggccgaacagcctgacatgcgtcccgacttcaactcgtaagtaccacccacaaaagcttattggacagttcgaaaggcacacgcaatcctaatctaataatagttatacaggaaatgtacatagatagtgttggatgtttcgttatgaggacatttccttttacagcgtttccaataagaaggaatcacaaaagagtaaactagataggttgaaaagaatttagaagttagcagtaagcgcttccgaaactataaattataggttaaacttcgttattcttgattatataatatctttttagaggtatataagactcagttgcttccttatatttcctatatgtgtcatggctttatcttctttatttacataccttagcgtgtatgagcgcttcaagatgctgaaccatggacgcaaggtaaactttgtggacactatgttccaaatgctcgagaagtactcgaataacttggaggagttgattcgggagcgcactgaacaactggacattgaacgaaagaagactgaacagctgctgaatcgcatgttaccaaggtaagacaccatcaatcaacacataggtccaacaatatatatgttatgtaccctgttatacccttgttaaaagctcggttgctgaaaaactaaagatgggcttggccgtcgacccggaagaattttccgacgtaaccatatacttcagtgacattgttggttttacaacaatcgccgcccattgcagtccggttcaagttgtagatttgctcaacgatctctatacgatcttcgatgccacaatcaacgcctacaacgtttacaaggtaaggtatacattacctttatgattgatttcaattattttcgttactttagtataataaaacgttacacttaacttatctagtataaagatctgaaatccaaaatcctttttccttaaaccacaaatttagttatgcatgagaatgtcacgatagttttagtttactaaataactatcttttgctttgcaagttaaaggtagaggaatgaattgttagttctttgaataattttccacttctttggtcaggtggagacaatcggcgatgcgtatatggtggtgagcgggctacccgtaaaaatacccgaccatgctgagcagatagctaccatggccttggatcttctgcatcaaagtggtcgtttcaatgttaagcatcttcccggagttccactccaactgagaatcggcctccacacgggtccgtgttgcgccggagtggtgggtctcacgatgcccaggtactgtctttttggggacacagtgaacacggcatcgagaatggagtcgaccggtaatcgcaaatttagctttttaagtcgccacacatttaactaacgatatgtgcacttaaggatcctcctggcgcatccatatgtcccaggagacgcgggatcgactggatgctcggggtggctatgccatcgagccaagaggtctcatcgacatcaagggaaagggcatgatgaacaccttctggctgctgggaaaaaaaggattcgataagcccctgcccgcaccgccgcctattgggtgagaatattgcgatacaaatatcagttgggcaatcaaacggcactcgaaggattctcgataaaacctctttcatttattatcacagtaataaaccggtttccttaagctgtttatacaaaaataatttataaatatgaaatggaaccattttttagaattttttttaaatttgttttacccgcatcttaatttggccaagaattgattcgtatactctttttatgatttcacatttttaaccaaacaatataatgtataattaatggaatatttaccacctttcgacatatgctttcctacaattctactagagaatctcacgggtatgttgaagatcgcttatcgcgactgcttttagtaactttttttattggtattccgcagcttggatgagtcccttatacgcaactcaataacgttgaaggcgcaggccaacaagtctcggacgagcacaaatccctcctcttcgcagagctcctcgctggctggggaatccgtcgaggtgaaggtcgagataacaccgcccaccaacgcagacctggcttccgggaccaatctccccaactcatactccctggactccaattccaccaacacaattagccccaacgccaccctttgtccggagtttccgggcaagacaacccccagcagtaccagtccacagtcgcggaagctctccgaactgactccagaaaatctactcaacccgaacagctttaaccgtctgccaagctccacaggaggatccagctcaaggctgtacaaaaagatcgaggagatgatggacctcagttcgccgtacaaccactacaaatgcctcagtcccagcgagagcaacctcacccagttctacgacggaaaatacctctacggcagtgtggcgggcggagcgggtggtggacaagcgggcggaggcgcctgcgcctcgatagccttgagcggaagtgggtgtgggggaggagcctctcggttcgacagcaagcccggctccagtcgccttctgcgtcggcagttcagcttggatcgcgacgaccagcaggcgaagggagagcagcagcaccaccagcactccctgcaggcaaacacctactcggggttggtgggcggttgtggtgggggtgtcaagagctccatgctggacatacctctcttgcacgacactactcgcagtcccaagggaacgctaacgcggtcccacaagcagaactctgcctcgatcacccaggatctggagaagatcgaggagatcccgctgtcgccggcctcctcgcagcaccacagtagcctggacagcaatctaaaccgcagtccgccatcaacgctggaggcgcagtcgccgccgctgccgcccatgagtccgccccagctttccgcccccacatcgccggccccgtccaggactttgaacgggatctatgcccacaacagcaatagtaccagttcccatggtgcagccaacaacaataatggcacccatcccggcccagagctgacccttaatgcagagcaactgctgagcagatagggcacaatctaaggcccccacacggggcgccgtttaaagctttaggtctcatccgaaccgagattgagtgtgcgagtgtgtgtgtgatgggggggaggtcaagctggagaaatgttgtctaacacccatgtttcaccgacacacactttttatatttttccataaaaggtgtcttgaaaattgggtttcggctcgtgtggagttgaatgtgcccgtggaattaataaatgaaccagtacaagcgaaaataaagccttttgccgaactatatcccttatttttaaaaagtaaaataacgcacttggcctacatttaaacgttcttaggtaataattgattcttcaagcgcaaaatatttttattttctgaaatatttagcataatgtactttattaaccacaataatcgtttttagctgtgaagcaaattaatgtacttgcaaatatgtattccaagcttgggaaagacttggccaactcggtgaaaactcatcgacagactacatttccccaacgcatcttcccagtcccacagtgcggtgtgagtatgtgaatgatatcaatttgaaaatgttgtgatgtgaaagcaaagtacctcgatccagggcagcttcatccagctgcaattgaaagtacaatttagttcaaggtgtgactaataacctagtccgcagtccattgtcattagcaaaaatctgcgtttctcaaatatagaacgtaggcttaccggaatctatttacttctaggaaaagaggtccttgagcatttagttgtacccagtgctcatattagatggctgacgacatgggtagattgctgatcttaataaaatattattatttactactttaatgataaaaatgcaatagctaaatagcaaattaaatgtatttaattaactattatgtaaacttagtaatcatttgaaaacttcgtatatgtatgtatgatttgaagcgtgacaggtaacagaaaaagaaaccattgtaagcttttctac

SEQ ID NO: 20774 - DNA, 2928 bp, DROSOPHILA
atgctatgctgttggctacagcaactgcaggagtttggaggcccggaagtagacaaaccggatcttcttaagggttccattggctcccttaagaatctaggtttcgtgattcccggcgcagcagctccgggatcggctggagccatcacaaccacggcgaacgggaaaagcggctcttccgccactggcagcttagccaggcacaaccccgcccatctggacatgagagctcggtataacggagatctcgtgcagcttaaggaggtgaatataaacggatctgcggaattgcgcaccaaggcaatggatctactcgtaatggcccatgggctgaggcacgaaaatataaaccccttaattggatggctatcagatccaaaccgcacggccatggtctttgattactgctccagaggatcgctgcaagatgtgcttatcatggatgagatcaagctggactggtcgtttcggctaagcttgcttacggatctggtcaggggcatgcgctacctacacacctcgcctttgagagttcatggtgccttgacctcgagaaactgcgtagtggatgctcgatgggtcctgaaaatcacagactatgggttgaattctttttatgaatcgcagggacttccgccaagaaccagaagtgctaaagagctattatggacagctcctgagctccttcgaaacatgaagctgcaccagcatcaccatcagcacggccgcattcagttgggaacccaacttggagacgtatattccttcggaatcataatgcaggaggtggtagtcaggggagagccctactgcatgctctccctctcgccggaggaaataatagtgaaaattaaaaagcccccgcctctgatacggccctccgtttccaagggagccgctcccccggaggccatcaatatcatgcgccagtgctgggccgaacagcctgacatgcgtcccgacttcaactccgtgtatgagcgcttcaagatgctgaaccatggacgcaaggtaaactttgtggacactatgttccaaatgctcgagaagtactcgaataacttggaggagttgattcgggagcgcactgaacaactggacattgaacgaaagaagactgaacagctgctgaatcgcatgttaccaagctcggttgctgaaaaactaaagatgggcttggccgtcgacccggaagaattttccgacgtaaccatatacttcagtgacattgttggttttacaacaatcgccgcccattgcagtccggttcaagttgtagatttgctcaacgatctctatacgatcttcgatgccacaatcaacgcctacaacgtttacaaggtggagacaatcggcgatgcgtatatggtggtgagcgggctacccgtaaaaatacccgaccatgctgagcagatagctaccatggccttggatcttctgcatcaaagtggtcgtttcaatgttaagcatcttcccggagttccactccaactgagaatcggcctccacacgggtccgtgttgcgccggagtggtgggtctcacgatgcccaggtactgtctttttggggacacagtgaacacggcatcgagaatggagtcgaccggatcctcctggcgcatccatatgtcccaggagacgcgggatcgactggatgctcggggtggctatgccatcgagccaagaggtctcatcgacatcaagggaaagggcatgatgaacaccttctggctgctgggaaaaaaaggattcgataagcccctgcccgcaccgccgcctattggcttggatgagtcccttatacgcaactcaataacgttgaaggcgcaggccaacaagtctcggacgagcacaaatccctcctcttcgcagagctcctcgctggctggggaatccgtcgaggtgaaggtcgagataacaccgcccaccaacgcagacctggcttccgggaccaatctccccaactcatactccctggactccaattccaccaacacaattagccccaacgccaccctttgtccggagtttccgggcaagacaacccccagcagtaccagtccacagtcgcggaagctctccgaactgactccagaaaatctactcaacccgaacagctttaaccgtctgccaagctccacaggaggatccagctcaaggctgtacaaaaagatcgaggagatgatggacctcagttcgccgtacaaccactacaaatgcctcagtcccagcgagagcaacctcacccagttctacgacggaaaatacctctacggcagtgtggcgggcggagcgggtggtggacaagcgggcggaggcgcctgcgcctcgatagccttgagcggaagtgggtgtgggggaggagcctctcggttcgacagcaagcccggctccagtcgccttctgcgtcggcagttcagcttggatcgcgacgaccagcaggcgaagggagagcagcagcaccaccagcactccctgcaggcaaacacctactcggggttggtgggcggttgtggtgggggtgtcaagagctccatgctggacatacctctcttgcacgacactactcgcagtcccaagggaacgctaacgcggtcccacaagcagaactctgcctcgatcacccaggatctggagaagatcgaggagatcccgctgtcgccggcctcctcgcagcaccacagtagcctggacagcaatctaaaccgcagtccgccatcaacgctggaggcgcagtcgccgccgctgccgcccatgagtccgccccagctttccgcccccacatcgccggccccgtccaggactttgaacgggatctatgcccacaacagcaatagtaccagttcccatggtgcagccaacaacaataatggcacccatcccggcccagagctgacccttaatgcagagcaactgctgagcagatag

SEQ ID NO: 20775 - protein, 975 aa, DROSOPHILA
MLCCWLQQLQEFGGPEVDKPDLLKGSIGSLKNLGFVIPGAAAPGSAGAITTTANGKSGSSATGSLARHNPAHLDMRARYNGDLVQLKEVNINGSAELRTKAMDLLVMAHGLRHENINPLIGWLSDPNRTAMVFDYCSRGSLQDVLIMDEIKLDWSFRLSLLTDLVRGMRYLHTSPLRVHGALTSRNCVVDARWVLKITDYGLNSFYESQGLPPRTRSAKELLWTAPELLRNMKLHQHHHQHGRIQLGTQLGDVYSFGIIMQEVVVRGEPYCMLSLSPEEIIVKIKKPPPLIRPSVSKGAAPPEAINIMRQCWAEQPDMRPDFNSVYERFKMLNHGRKVNFVDTMFQMLEKYSNNLEELIRERTEQLDIERKKTEQLLNRMLPSSVAEKLKMGLAVDPEEFSDVTIYFSDIVGFTTIAAHCSPVQVVDLLNDLYTIFDATINAYNVYKVETIGDAYMVVSGLPVKIPDHAEQIATMALDLLHQSGRFNVKHLPGVPLQLRIGLHTGPCCAGVVGLTMPRYCLFGDTVNTASRMESTGSSWRIHMSQETRDRLDARGGYAIEPRGLIDIKGKGMMNTFWLLGKKGFDKPLPAPPPIGLDESLIRNSITLKAQANKSRTSTNPSSSQSSSLAGESVEVKVEITPPTNADLASGTNLPNSYSLDSNSTNTISPNATLCPEFPGKTTPSSTSPQSRKLSELTPENLLNPNSFNRLPSSTGGSSSRLYKKIEEMMDLSSPYNHYKCLSPSESNLTQFYDGKYLYGSVAGGAGGGQAGGGACASIALSGSGCGGGASRFDSKPGSSRLLRRQFSLDRDDQQAKGEQQHHQHSLQANTYSGLVGGCGGGVKSSMLDIPLLHDTTRSPKGTLTRSHKQNSASITQDLEKIEEIPLSPASSQHHSSLDSNLNRSPPSTLEAQSPPLPPMSPPQLSAPTSPAPSRTLNGIYAHNSNSTSSHGAANNNNGTHPGPELTLNAEQLLSR

SEQ ID NO: 20776 - DNA, 3765 bp, DROSOPHILA
tccaccagttagtcagtcagtcatcaaaacattgccaattagtgggagtgggcaagggctgcgccagttcggatttccattgacccactgtacggtgggtgggggaagtcaatgcagattgcttgaattttctgcttggtggtctacttgggttgcagctatcgttaaggtgcagttcttatctaaactatccttatataaattttatagattatataccaatcagataatggaaaaaacatcgcatgccgctttataaaagtctacgtttccggagaaaaaccttttctttttgtttaaaacattaaaaatctttcgtaagttgagctggttggtttagaatcatggttaaaaagttcacttttctcttttttgttattcaaaaaattaaatacaatttgcctacattaaatagtagttaaatgaagataaaattatattcatactttgctactctattcaatataataccttttctctatatatttcacttgagaggcattcaaaaatatcacttttcagactccggtttctgcccattttggcttagagctctcacctggctctcatcaataagtttttgcctgttactggcaacagggtgtgtcatagtgtagatgtgtgacagtgaatgtggcgtaattaaccttttgacaaaccggttaaatacaaatatctagtgccatgacaccgtacaaataaaaataacaaaatgacagcagagcaaatagaacatatgtatgcaaacgaaaaagcgggattcattcagggcgggaataggtggaattggtagtaaacacaaatattattggttcgataattatgtataattacatatgtatgtattaacgtattttggagggggggagaggagaggaggcgctgagtcaacagctaacaagcaaacttaacacggtcacatgaggtcaataaaattagatcaacacggcggttatggaaacagagactaaagaataaagatatccagagcctcggctagctagtcaacatggtactccgtccgatggggcgagccgtgccgcttctccgccacaaagacaccactgacgccggccaaactggtcacgccccggactccggtgctgcggaaatatatcaacaggtattgctcgccgtgacgcagttccacatcgtcggcgaaatctagccgcaccaactcttgggcattagcctcctgatggcgacgctgtcgctggcgattcctgtgatgatgccgaccccttcgatgatgcgagggcgtctcaaacggatccggttggtgattggagtccgaggatgagggcgactcagcctgattgacatactcgtaggctacgtaatccgccaaactggcgtactccgacggaaagatgccaatccagtcgttggacccctcgtcgaactctgcctgcttgtgatactccaccgtgttctcgtccccaatcttccagagcgacagaggcgagaacaccacgccgggcgcccgtacattcgggtagagcttgatggtaaagtcactggtcaccggcttgtgatcactgatggtgtacaggggatgggacttatacgagcattgctcaatggatagctgcatgccgggctgccggttcagtggctgcacggcgtacattatccgatccgtccaggctggccgccgcttcaggtcgtactcggaggtgccctcgcggaacttgaaggtgggcggaaaggcgggcagtcgctcctgcagaacctgaaaggccagctgcgacttctcgcgaacttgatacaattgatcccgctggataagggcctcgtgctgggactcatcgcgtaccaactcgcgcacttccgtcgaggaatcgctgccctgcagtcggaagttcagatcgccaaaccagaagacatagtcgtgatcgtagatctccctataccgcttgacgtggtagtgatggttctccagtatctgcttgtagtcctcgatgcgctcgtccatcatatggtcatgggcagtcagatgggccaccacaaaggccagtccgcagccgtaaagggtgaacctgacactgacggcgcccttgttgccccaaatgccaccgaaaccggtcctcgtgaactccgcctcgatgtcctgcaagtgctcaacgtgctgccgcctcacgaacatgctgagcagcagcccctgcatctgctcggtctttacggccacatagtcgtagttgcgtagcagttccttagccttgtgcgtccacggatcctccttgaacagtcccaacacctgttgctgcggctgggcattgacctcctggagccccaacgcatagatgtccggcaagtgggcattagtctccttcgtgtccttatccaccgtcacatcctgcagtcccagcagatggcggagggatatgttatccggaaatcgactgcccacattccaggtgaccacatatacccggtaagtttccagctgttgcttccctttgcccttcgatccgtccggctccgagtccggaatcttgggtgtcttgctagcctccgtttggctcattgttgctggacttgacaaatcgaagagattaacccaactggctgctcacagcaatcaagttgtttacccaaccgattaaggttttattgtgtaagtcgattctttatgcctttgtggattttgttgctccaatctgggttgctggttaagttgggtggtgaacagcggcgagggcggtcggtaattgctgaaaatattgcagcacaaatagtttttaacacttgtttgcccagcagcagcaacaacaacaactgtgctacaacaacacgacgaacacaataacaacaactagggatggcaaaactgagaagatgacgatatcgactagcggtatttattttccagccctaaaaatgtaaatttcttagacgttaagaggtaacatatttgattcatctagtagtaaattcaagttgttttaaaatggcttgctaaaattgaaccaaaacaatatggtttcccctataacccattttttaagatttatttaacatttatactgtataatttctttgtcatatttgcaccttaataagggcttttatatttggcgctcatattatgttcgtttattatatttgctttatttctaatgcagaatctgtggtcactctagcactcgctgaattttaactcgctggaaattctttttaggacaactatcgattaacattagtacagtatttaaacttttgcattatcacacagccaagtaaaaacctaaacaaatacctcactccaacttaaagatacaaacgagaattccttttagtcaatgcaaatgcttagtattcaaatgacaacacaagcaaatggttacatatgttataagtcgcacttgaagcggttcttgagtaataagcccgtatggcagttcatcaccaattaaaaatatttaataattacagacttccaaaccgtaaacgtgcatgtaaccgatagctgcaggcaacgtatcgattagcacacgctgcccgacacgccgatagtatctgacaaacatcgattttggttccagctctactttgtggccacacacgcgttttttccccaatcaaatcgtgctcttttgaaattctgtttcttgcaaatcggtggtgcgtgttctcgtgcaacaatggaaaacctgaatgcgaccagcggcaaatgttaaattgcaattaaaagtgtggatttcgcggcggtaaaacgccaaaattcgtaccgaatcgctgcgcgcgtgtgtgtgtgagcagagc

SEQ ID NO: 20777 - DNA, 1765 bp, DROSOPHILA
tgctgctgggcaaacaagtgttaaaaactatttgtgctgcaatattttcagcaattaccgaccgccctcgccgctgttcaccacccaacttaaccagcaacccagattggagcaacaaaatccacaaaggcataaagaatcgacttacacaataaaaccttaatcggttgggtaaacaacttgattgctgtgagcagccagttgggttaatctcttcgatttgtcaagtccagcaacaatgagccaaacggaggctagcaagacacccaagattccggactcggagccggacggatcgaagggcaaagggaagcaacagctggaaacttaccgggtatatgtggtcacctggaatgtgggcagtcgatttccggataacatatccctccgccatctgctgggactgcaggatgtgacggtggataaggacacgaaggagactaatgcccacttgccggacatctatgcgttggggctccaggaggtcaatgcccagccgcagcaacaggtgttgggactgttcaaggaggatccgtggacgcacaaggctaaggaactgctacgcaactacgactatgtggccgtaaagaccgagcagatgcaggggctgctgctcagcatgttcgtgaggcggcagcacgttgagcacttgcaggacatcgaggcggagttcacgaggaccggtttcggtggcatttggggcaacaagggcgccgtcagtgtcaggttcaccctttacggctgcggactggcctttgtggtggcccatctgactgcccatgaccatatgatggacgagcgcatcgaggactacaagcagatactggagaaccatcactaccacgtcaagcggtatagggagatctacgatcacgactatgtcttctggtttggcgatctgaacttccgactgcagggcagcgattcctcgacggaagtgcgcgagttggtacgcgatgagtcccagcacgaggcccttatccagcgggatcaattgtatcaagttcgcgagaagtcgcagctggcctttcaggttctgcaggagcgactgcccgcctttccgcccaccttcaagttccgcgagggcacctccgagtacgacctgaagcggcggccagcctggacggatcggataatgtacgccgtgcagccactgaaccggcagcccggcatgcagctatccattgagcaatgctcgtataagtcccatcccctgtacaccatcagtgatcacaagccggtgaccagtgactttaccatcaagctctacccgaatgtacgggcgcccggcgtggtgttctcgcctctgtcgctctggaagattggggacgagaacacggtggagtatcacaagcaggcagagttcgacgaggggtccaacgactggattggcatctttccgtcggagtacgccagtttggcggattacgtagcctacgagtatgtcaatcaggctgagtcgccctcatcctcggactccaatcaccaaccggatccgtttgagacgccctcgcatcatcgaaggggtcggcatcatcacaggaatcgccagcgacagcgtcgccatcaggaggctaatgcccaagagttggtgcggctagatttcgccgacgatgtggaactgcgtcacggcgagcaatacctgttgatatatttccgcagcaccggagtccggggcgtgaccagtttggccggcgtcagtggtgtctttgtggcggagaagcggcacggctcgccccatcggacggagtaccatgttgactag

SEQ ID NO: 20778 - protein, 508 aa, DROSOPHILA
MSQTEASKTPKIPDSEPDGSKGKGKQQLETYRVYVVTWNVGSRFPDNISLRHLLGLQDVTVDKDTKETNAHLPDIYALGLQEVNAQPQQQVLGLFKEDPWTHKAKELLRNYDYVAVKTEQMQGLLLSMFVRRQHVEHLQDIEAEFTRTGFGGIWGNKGAVSVRFTLYGCGLAFVVAHLTAHDHMMDERIEDYKQILENHHYHVKRYREIYDHDYVFWFGDLNFRLQGSDSSTEVRELVRDESQHEALIQRDQLYQVREKSQLAFQVLQERLPAFPPTFKFREGTSEYDLKRRPAWTDRIMYAVQPLNRQPGMQLSIEQCSYKSHPLYTISDHKPVTSDFTIKLYPNVRAPGVVFSPLSLWKIGDENTVEYHKQAEFDEGSNDWIGIFPSEYASLADYVAYEYVNQAESPSSSDSNHQPDPFETPSHHRRGRHHHRNRQRQRRHQEANAQELVRLDFADDVELRHGEQYLLIYFRSTGVRGVTSLAGVSGVFVAEKRHGSPHRTEYHVD

SEQ ID NO: 20779 - DNA, 6483 bp, DROSOPHILA
cgtaaatcttgttattgttttgatgcaacaaatatttaataaagtttaactaaagatcatttatccgccgttacatcggcaacaaacttggtcgaggaatcaagtcgcccgtccgcaaactggacggaagatttgccaccttgaggtggaatcaccggcaaccggcgtgatcgctctcaagtcaaaacaatggtgtccaacagaagtcctcctccgaatcatggtcccttgccggggtccagtggtggcacctccctgctagccctgtgcctgatccacttcgtcctggccgtgatctccggctggggtctgaaacggagcaccggcagcaaggcgatggccgcctttgggatctactttggccacagcctgctctgcctgctgcggcacacgcatcccaatccgggcgcagtgcagcgtctgctgtgcgacaagtcgagacgttactcctgcgtcctatttgtcaccctggtggtgggcgagctgcagaccgtaaatccggccacccgaatgggtgacttcttcggcgccgactgggagcgtctggcctttggactgtggagcgctgtactggcacttgcagtcaccagcttgtggttcggcaacagtcgcagtccactgggtgccacattcataaaactggatgccgcgcaattgggcctctgtgttctgtggaatgtccactgtctttggcgcatcgccatcgtcgacgagcactggtggtcacttggcctggccctgcttgttctgctgaatcactttgtcctgtggcgactgccgctgcactacaacatcagccaattggaggtggccaccgtgggcatgtgctttagcaccatctttgcgctgaatgccatccaggagcaactggacgctgtggccagctgagagtagctggtcgggcaaccagggactggagccttgattgccaagctctaagacaccaacatttaattataagatgcacgttgttgaacaattttttgagtaataaaccagacttcttatttcgaaacaattattgcattgttatcatacatacataaaagtgtggaattatattggattagacggtttccttttgcataagctttttaatacatattttcgttttaaatatagtttaaattacttctctatgcgctttattacatattgatctgggcttggagtttctatactctcggttttgttcgccggctcgaagtgttccacgcaacgagcacggcctagccgaaaactaactctcattgttaaggaaaattaaatgtagcaagtatcgttagaaagaaaactatatatatatatatgtatacgatttaaaagaatgtgaaaacaaatcgtacgcctacgaaactaataattggggcgagagatggttgtggtgggttgagggatgaggttttgggcggggcaatttcctaggcgtgggtgctgtcgtcctcgacgaagtccttggcctcctccctggtcacacaatcaatgtgactgaccttatttcggaatcgcacgccgtagaacttgtgcgcgttctccagcaattccggccggaacgttgtcgtaatgaactgggcagtgtcgctgagctcatggatcatgttcgccaccgcctttcgatgcattgcatccagcgcctgcacaaaacattagtagatcattagtcaatcaaataaagtaatgcgtaattataggtaatgtgacgactcacctgatctatctcatcaaataggtagaagggagctggatcgcacttttggatggagaaaatgagggccagggcgacaagcgacttctgtccaccagacaactggttcatctcacgcatctcagcctcaacgccggtgaacgaaacccgaatgccgatccctgtgaaagcatcggagttttccacctccttttccatttcgtcgccttcgttgtccttggtcttcaggatgagaaagcccgcgcccatgggcaccagcttcttaaacaccttggtgaagttctgcgccacttgtcggaacgtaaattgaatggcctccactttttgcatctccaatgactgaattagcatgtggatcttctggtcaccgatgtcgagctcctctttgcggcgatagagcttctccttctgctcggagaagctcaagaactgatccagggctttcttgttcacatggttatacttcttcaggtgctggtttgccttctccagctctttgaagatgttcttcagggacatgcgtgtgtaggaaggatcaactagcggcacggcgcccaagctggcaatcttttccgtacactcatcgattttttcgttgagcatgttctccttggtcgaccatttctccagctgcttggaatccttgttaagattctcctcggcctccttctccttacgcacatgcgtttcgagctcctgctgcagctccttttgcagttgcacagcctccattacccgcttttcgatctcctccagatcggagttgaccttcttgattctcttttcggcggaaaccagttccgttttgcaattgtttagctttcgcttgcggtcctccacggaaatctcctgcagcgcttggatcagttcgtcgcgacgccggaacagattgttgatcagcaggttgtctagcttgttcttgcgcacctcgaactgcatacgctgcgtaaacgcttccttattctcctggttcagtcgacgaatgtcgtcgttcagctggtcaatctcacgctgatcctgcgacgacaacgtcgacatcagctcctgcttcagctccgcctccaaactagatttcgtactggtcatggactccaatgaggccttgcattgggccagtgagcgctccttgggcgcacgatactgctcgatgcgcaccagctcctccttcatcaggcgaatctcgccctgcaccttttcgaatacatccttcgacttgccctgcttcgtttccgtcttctgcatctcggatacgattgagttgatgttgttctcggtggacttgagctcgtttcgcagcttgctgagtttcttttcgaattcagctatctggctggtgtattccgtgcgcttcttttgcatctcaagacgggaacgggatgtattgaaatagccgccagtgagggatcccttggaggacacttgatctccgtccagcgtaacgcaatccagcccagtgctcttggccagctcggtggcgcgctccaaatttctgcagattagcgtttttccaaagatatacctcagcgccttgtcgtgctgttcatcgtacttcagtttggagatcataggtatggagtcgggatcatccggataatcgtgtattttaacctgaagtcgattcaggggcataaaggtcacctcgcccggtaatttcagcttattcatctccttgaggatttgcgtgccctcgtattctgactccacaatgtgatggaataaccgattggcggctgttacctccaccgccgtgtagatggtcttgtcgcagctgaagttctcaatgacgggtccatagtaggctctcgcaatctccgccgattgaccgccacgttccacaaagctgtcgagaaccttgcgcacagaatcgcaaccgttcaggatcggcttgccggccatgctgcgcagcgcctggtccgcccgcgatagctcctccttgtgcgtctgcagctgctgcgtcatctgtgtctccttgcgccacaactcgtttcgcatggactgatgctggtccttggtcttcttaagctcgtagtacttcttgttgtgctcgtcgatctgcagtcggagctgctccagttccgatgagtgctcctcgatcttttgacccagatccttttcggaggtagcgtccttcttcagatcctccacgagttttgcgtgatgagcgattttatcgcgcgtctgtttgctaattgacttcagctcgttggtgatccatttgtcgcgatcctccctagaggagaactgtgaaccgcgaccctgcttggcgtaaagctccttgcgcttctgttccttgagctgcagctctcgggagcagtcttcctccttgcgcttcatcgcctcgtatttgggctttacgtcgtccagttccttttcgcgttcggctatcgttaccttaaggttcttaagctcctggtcagcccgctccttggacttgttgtcgccctgaacctcgtcatttagatcgacaatggttaggtctagtttcgttttctcgcgcagtaactgttgctgctccgtcatcagtacggagcgctcctcctttgtgctctgcactttcttctttgcctctttaaggttcttttgcacatccttgatcttctcttgtgccttctgaatctcaatgttgtagatcttctttttgtccgaggacgacttgcgctgcagctggagctcgtcgagagccttcttggtgtccttcagctcggtttcgtagcgtatatactctagcgtgcggcgcgtcttgtcccacttctggtactcctttagctcttccttctcctcttcgagcgtctggagccgatcctcgatggtctttaggtactcgctgattttctccaccttgctgtccgtctcgcgcaatagatttaacgactcctccttccgttcgtcgtaaacacgcgttcccgcgacttcgcgtagcagcttgagacgataggaatcggcggcagttgccatctgattgattttgccctgcttgacaatgtagtagggatttgaactggaaaaaccagccgattccagcagattgaccacctcattgcgcggcaccaccttcttgttgaggaagtactggtcctttttggcgccaatcacgcgccgcagaaagatctcttctttgtcgatctacaaaataagcgtagcgtcagttatgaagtggctagaaatgtttgcctataagtttgaatattatgagaagatgctatgagcgggttgctttagaggattttgagcgatatgttacaaccattgactacatcttccaaggcagtagagttcttgcaaagactatgttttctgggtcacttggtttgactactcactggaactcggttgtccgagttgtcgaagatgatctccacataggcggagatgacgcgggcacctgttccctcgtgcagaagcgactgacgctgctccggccgcaagtgggtgaactcatcgcttagcacaaactggatggctgcaaagtggatgggatagcattagggtcgattaaatatggttagctgaacaggcaggctggagctgatactaaccgtagaagaagttgctcttcccggagccattacgtccaacaacaacgttatggcgcttgtcgaatggttccaccaccgtctggtccttgtaactcttgaagccttgtataataatctggaattaacgggtggatttcagatcttcggtgtccaatgggtggccaggagcatggccgtcatttcaacactcacctgcttgatgtgcatcttattatatgcgattttttgcacaaaatcgcgctctttttgttttacaacaaatacataaataatatcgactcgggcagcgacttatcgatgtttgcgtttcactatcgatgtcatcgatatcccaactttgaaaaacactggcttgcaatcgaaccaaaaattcaaatgatataaaacaaaaaaataattttaaattttacaactaaaagtgtccatcaataatggtttaagaagcaaacaaataattaatttaataaggtagtttgaaggtgtgaaatactaaaacaacgatagccgacgttatcgaatcgaatcgattactcttgttaaattcactcagtacagatatatttttatagaaagccactcgattcattcgatataaataaacacggaacaccgtttgtgtttattatattacgacgtgtctgtattttgacccgtgcccgaggatctggaaagttcgcgattgccgccaaaacaagcaaggaccccattcgggtgtagcaggtgcaggagcaggtggacaggaaacggagaagcagctgaaggaaactcaaaggaagtggtcacagtggggagaaggagcccgtgaactgaaccatcatcattaccatcgagcgcatttaggatggctgggtccgcactgcgccgcctgatggcggaatacaaacgtgagtcgaaagtccacagggcagcaacagctttcccttaccaccgctccgatcatctccagagttaacacttgacccgcccgagggcattgtggccggccccatcagcgaggacaacttcttcgagtgggaggcactgattgcgtgagttaagatccccgaacgatcgacacggatcggacagatgtggacagattaacccattaattgcactttgccctttgcagcggacctgagggcacttgtttcgagggcggagtgtttcctgcccggctcatctttccgaccgactatcctctgagtccgcctaaaatgaaattcacttgtgacatgttccatcccaacatattcgccgacg

SEQ ID NO: 20780 - DNA, 4059 bp, DROSOPHILA
agcgcgattttgtgcaaaaaatcgcatataataagatgcacatcaagcagattattatacaaggcttcaagagttacaaggaccagacggtggtggaaccattcgacaagcgccataacgttgttgttggacgtaatggctccgggaagagcaacttcttctacgccatccagtttgtgctaagcgatgagttcacccacttgcggccggagcagcgtcagtcgcttctgcacgagggaacaggtgcccgcgtcatctccgcctatgtggagatcatcttcgacaactcggacaaccgagttccaatcgacaaagaagagatctttctgcggcgcgtgattggcgccaaaaaggaccagtacttcctcaacaagaaggtggtgccgcgcaatgaggtggtcaatctgctggaatcggctggtttttccagttcaaatccctactacattgtcaagcagggcaaaatcaatcagatggcaactgccgccgattcctatcgtctcaagctgctacgcgaagtcgcgggaacgcgtgtttacgacgaacggaaggaggagtcgttaaatctattgcgcgagacggacagcaaggtggagaaaatcagcgagtacctaaagaccatcgaggatcggctccagacgctcgaagaggagaaggaagagctaaaggagtaccagaagtgggacaagacgcgccgcacgctagagtatatacgctacgaaaccgagctgaaggacaccaagaaggctctcgacgagctccagctgcagcgcaagtcgtcctcggacaaaaagaagatctacaacattgagattcagaaggcacaagagaagatcaaggatgtgcaaaagaaccttaaagaggcaaagaagaaagtgcagagcacaaaggaggagcgctccgtactgatgacggagcagcaacagttactgcgcgagaaaacgaaactagacctaaccattgtcgatctaaatgacgaggttcagggcgacaacaagtccaaggagcgggctgaccaggagcttaagaaccttaaggtaacgatagccgaacgcgaaaaggaactggacgacgtaaagcccaaatacgaggcgatgaagcgcaaggaggaagactgctcccgagagctgcagctcaaggaacagaagcgcaaggagctttacgccaagcagggtcgcggttcacagttctcctctagggaggatcgcgacaaatggatcaccaacgagctgaagtcaattagcaaacagacgcgcgataaaatcgctcatcacgcaaaactcgtggaggatctgaagaaggacgctacctccgaaaaggatctgggtcaaaagatcgaggagcactcatcggaactggagcagctccgactgcagatcgacgagcacaacaagaagtactacgagcttaagaagaccaaggaccagcatcagtccatgcgaaacgagttgtggcgcaaggagacacagatgacgcagcagctgcagacgcacaaggaggagctatcgcgggcggaccaggcgctgcgcagcatggccggcaagccgatcctgaacggttgcgattctgtgcgcaaggttctcgacagctttgtggaacgtggcggtcaatcggcggagattgcgagagcctactatggacccgtcattgagaacttcagctgcgacaagaccatctacacggcggtggaggtaacagccgccaatcggttattccatcacattgtggagtcagaatacgagggcacgcaaatcctcaaggagatgaataagctgaaattaccgggcgaggtgacctttatgcccctgaatcgacttcaggttaaaatacacgattatccggatgatcccgactccatacctatgatctccaaactgaagtacgatgaacagcacgacaaggcgctgaggtatatctttggaaaaacgctaatctgcagaaatttggagcgcgccaccgagctggccaagagcactgggctggattgcgttacgctggacggagatcaagtgtcctccaagggatccctcactggcggctatttcaatacatcccgttcccgtcttgagatgcaaaagaagcgcacggaatacaccagccagatagctgaattcgaaaagaaactcagcaagctgcgaaacgagctcaagtccaccgagaacaacatcaactcaatcgtatccgagatgcagaagacggaaacgaagcagggcaagtcgaaggatgtattcgaaaaggtgcagggcgagattcgcctgatgaaggaggagctggtgcgcatcgagcagtatcgtgcgcccaaggagcgctcactggcccaatgcaaggcctcattggagtccatgaccagtacgaaatctagtttggaggcggagctgaagcaggagctgatgtcgacgttgtcgtcgcaggatcagcgtgagattgaccagctgaacgacgacattcgtcgactgaaccaggagaataaggaagcgtttacgcagcgtatgcagttcgaggtgcgcaagaacaagctagacaacctgctgatcaacaatctgttccggcgtcgcgacgaactgatccaagcgctgcaggagatttccgtggaggaccgcaagcgaaagctaaacaattgcaaaacggaactggtttccgccgaaaagagaatcaagaaggtcaactccgatctggaggagatcgaaaagcgggtaatggaggctgtgcaactgcaaaaggagctgcagcaggagctcgaaacgcatgtgcgtaaggagaaggaggccgaggagaatcttaacaaggattccaagcagctggagaaatggtcgaccaaggagaacatgctcaacgaaaaaatcgatgagtgtacggaaaagattgccagcttgggcgccgtgccgctagttgatccttcctacacacgcatgtccctgaagaacatcttcaaagagctggagaaggcaaaccagcacctgaagaagtataaccatgtgaacaagaaagccctggatcagttcttgagcttctccgagcagaaggagaagctctatcgccgcaaagaggagctcgacatcggtgaccagaagatccacatgctaattcagtcattggagatgcaaaaagtggaggccattcaatttacgttccgacaagtggcgcagaacttcaccaaggtgtttaagaagctggtgcccatgggcgcgggctttctcatcctgaagaccaaggacaacgaaggcgacgaaatggaaaaggaggtggaaaactccgatgctttcacagggatcggcattcgggtttcgttcaccggcgttgaggctgagatgcgtgagatgaaccagttgtctggtggacagaagtcgcttgtcgccctggccctcattttctccatccaaaagtgcgatccagctcccttctacctatttgatgagatagatcaggcgctggatgcaatgcatcgaaaggcggtggcgaacatgatccatgagctcagcgacactgcccagttcattacgacaacgttccggccggaattgctggagaacgcgcacaagttctacggcgtgcgattccgaaataaggtcagtcacattgattgtgtgaccagggaggaggccaaggacttcgtcgaggacgacagcacccacgcctaggaaattgccccgcccaaaacctcatccctcaacccaccacaaccatctctcgccccaattattagtttcgtaggcgtacgatttgttttcacattcttttaaatcgtatacatatatatatatatagttttctttctaacgatacttgctacatttaattttccttaacaatgagagttagttttcggctaggccgtgctcgttgcgtggaacacttcgagccggcgaacaaaaccgagagtatagaaactccaagcccagatcaatatgtaataaagcgcatagagaagtaatttaaactatatttaaaacgaaaatatgtattaaaaagcttatgcaaaaggaaaccgtctaatccaatataattccacacttttatgtatgtatgataacaatgcaataattgtttcgaaataagaag

SEQ ID NO: 20781 - protein, 1211 aa, DROSOPHILA
RDFVQKIAYNKMHIKQIIIQGFKSYKDQTVVEPFDKRHNVVVGRNGSGKSNFFYAIQFVLSDEFTHLRPEQRQSLLHEGTGARVISAYVEIIFDNSDNRVPIDKEEIFLRRVIGAKKDQYFLNKKVVPRNEVVNLLESAGFSSSNPYYIVKQGKINQMATAADSYRLKLLREVAGTRVYDERKEESLNLLRETDSKVEKISEYLKTIEDRLQTLEEEKEELKEYQKWDKTRRTLEYIRYETELKDTKKALDELQLQRKSSSDKKKIYNIEIQKAQEKIKDVQKNLKEAKKKVQSTKEERSVLMTEQQQLLREKTKLDLTIVDLNDEVQGDNKSKERADQELKNLKVTIAEREKELDDVKPKYEAMKRKEEDCSRELQLKEQKRKELYAKQGRGSQFSSREDRDKWITNELKSISKQTRDKIAHHAKLVEDLKKDATSEKDLGQKIEEHSSELEQLRLQIDEHNKKYYELKKTKDQHQSMRNELWRKETQMTQQLQTHKEELSRADQALRSMAGKPILNGCDSVRKVLDSFVERGGQSAEIARAYYGPVIENFSCDKTIYTAVEVTAANRLFHHIVESEYEGTQILKEMNKLKLPGEVTFMPLNRLQVKIHDYPDDPDSIPMISKLKYDEQHDKALRYIFGKTLICRNLERATELAKSTGLDCVTLDGDQVSSKGSLTGGYFNTSRSRLEMQKKRTEYTSQIAEFEKKLSKLRNELKSTENNINSIVSEMQKTETKQGKSKDVFEKVQGEIRLMKEELVRIEQYRAPKERSLAQCKASLESMTSTKSSLEAELKQELMSTLSSQDQREIDQLNDDIRRLNQENKEAFTQRMQFEVRKNKLDNLLINNLFRRRDELIQALQEISVEDRKRKLNNCKTELVSAEKRIKKVNSDLEEIEKRVMEAVQLQKELQQELETHVRKEKEAEENLNKDSKQLEKWSTKENMLNEKIDECTEKIASLGAVPLVDPSYTRMSLKNIFKELEKANQHLKKYNHVNKKALDQFLSFSEQKEKLYRRKEELDIGDQKIHMLIQSLEMQKVEAIQFTFRQVAQNFTKVFKKLVPMGAGFLILKTKDNEGDEMEKEVENSDAFTGIGIRVSFTGVEAEMREMNQLSGGQKSLVALALIFSIQKCDPAPFYLFDEIDQALDAMHRKAVANMIHELSDTAQFITTTFRPELLENAHKFYGVRFRNKVSHIDCVTREEAKDFVEDDSTHA

SEQ ID NO: 20782 - DNA, 2657 bp, DROSOPHILA
agctggtcttctgtttcgtgtcgacttcgctgtgcctcaagttcaacctgccctttgtgagtgcgtgtatcctgttgctcgagagcacgcgactgctgatgaagatgcacgcctttgtgaggtacaatgctgagcgcgttctgaatggcaaggccaagaaggaagatgcggaggaggagaaagaaggcagtgagcgaccctttgtgccgccgctgagctgttacacgtactttttgtttgcacccacgcttatctaccgagacagctacccgcgcacctcccacatccgctggaagtttgccctgaatcgactgttggaggtggtggccatagccttcctgtacgcgttcatccatgagcggcacatccacgagcacttcggacagtacggactggaaccaatgggaccctcccagctgatcctcaagctgttcggcatgatgctgcccagcgcggtgatctttctgtgcggcttctacctaatcctgcactcgtggctgaacttcacgtcggagctgctacgcttcggtgatcgaatgttctacaaggactggtggacgtcgcacacttacgatggctactacagaaactggaatgtcgtcgtgcacgactggctgtacgagtacgtgtacaaggatatgtacactcatgtgttccgaggttccaaggtggccgcctcgctggcagtgttcatgatctccgctgtggtccatgagcaggttctcggctttgccctgcaaatgttcttcccagtgatgttcttcttctttggggtcgtgggtgttgccttggtattcctaatgcggagtgctccaaaagtgatgggcaacatctttctgtggttctctctgatcctgggaaatgccacgctgatctcactatacgccatggagcattacgccctaaagaactgcaacctaagcaacgagagttggacgtatcgcctgctgccggcggtatggcgctgctacaattagtcaattagttaaacactacttttaaactgtctgtacacagggcgtacgcttcgatttgtattttaggtaaataaacttaatgaaattaacagaaacgatgtcttcagttcgtttcgtgtctttgaacttcccagctgaaccctaaagctatggtttcttattttacatcaggctgcctgatgctaacttatgaaatactacgtgagcattgacgagtgcgtccttggaagagcattcctcggcggcatggcatcctccgcctaaccgcagagattcgcgatggcctgagccgcattagcggctgccacctgtggagcgtcctctgccggaatgcgtttgcgtcggaatagaatcacatgcggctccggcgcgtggaccatgtagtgcacccagccggggctctgctgcacgcccaggttgcgccactccgtctcggtcatcagatgagccttcggcacatgtttggccaaatccggtggcaagataacatgcctgcagggagggaaagtggtttgtgtgtaaacaaacagttcacggatgctgaaacgcaagttgaacgtacctgtattcaaagttgtcgtcgaagtacttctctgagtattgaatttgatcggccggcattgcgaaaagccagaaaacctgaggtaaattaagcaattttaccaaaataggtcaataaattcagatagatatgccacaactgattcgattctaaatactattgttatcgctgcacgtatcgaacataaagttatcgatttggttatcagctgtccagttaacagcacctttggcggtaaactcaaatgtactgtttttaatggcacgatcttagcgggctttaatatattgaacataaacttttttctgtataacaatatttttgcaatgtttaaagccattttaaagccattttgttaaaaaaacgagtactttgtaaaaagatgctgttagaaaatgttaacatatttagcgaatgaaaaactcaattggataatatgtgatttccagtgtgaccggaactcgcaggctcgcacattttccaaatgcaatcggcaatttctccgttactcgcccatggccacatttgtgcatgtgcgtttgaggttcctttcctttttatataagcccctcgtctcttgccaacaaaccaacaacaacaacaaccagccaggccagcgggcaacaacaacgcacaacaacgcgtataaataaacgtgaacgcatgtacttaatattagcatagagttgtcgcctgcgtgcatttcatatacataacataacatccacttactcccatgacaacgggactttagacagtaacggtggagcagctagaagaagaggaaaggcgaagtagaacgggaacaagaagaaaaagcagtggaagaggtgaggacgatacgtaaatacagtcaaacttccataagtagatacgactttactactacaataaaaagtgtcctttagtgatgaagaaaatgggttctaagaacctaaaacctttatgtatatgtactccctattgtcgcttaatgaatttaccgttacggtatgctagtaaataaatgcatacaatgtacatatgtagatacataggcacagcaaaaccacctataaattcgattgattttatgaagttctagttgaggaagtttgactgtatgtatgcgcgcattg

SEQ ID NO: 20783 - DNA, 587 bp, DROSOPHILA
tttattgacctattttggtaaaattgcttaatttacctcaggttttctggcttttcgcaatgccggccgatcaaattcaatactcagagaagtacttcgacgacaactttgaatacaggcatgttatcttgccaccggatttggccaaacatgtgccgaaggctcatctgatgaccgagacggagtggcgcaacctgggcgtgcagcagagccccggctgggtgcactacatggtccacgcgccggagccgcatgtgattctattccgacgcaaacgcattccggcagaggacgctccacaggtggcagccgctaatgcggctcaggccatcgcgaatctctgcggttaggcggaggatgccatgccgccgaggaatgctcttccaaggacgcactcgtcaatgctcacgtagtatttcataagttagcatcaggcagcctgatgtaaaataagaaaccatagctttagggttcagctgggaagttcaaagacacgaaacgaactgaagacatcgtttctgttaatttcattaagtttatttacctaaaatacaaatcgaagcgtacgccctgtgtacagacagttt

SEQ ID NO: 20784 - protein, 96 aa, DROSOPHILA
MPADQIQYSEKYFDDNFEYRHVILPPDLAKHVPKAHLMTETEWRNLGVQQSPGWVHYMVHAPEPHVILFRRKRIPAEDAPQVAAANAAQAIANLCG

SEQ ID NO: 20785 - DNA, 4517 bp, DROSOPHILA
agtgttttgttttaatgagtgctctcagtacttttttatttttattttatttacgaatctggggaaattccaactcactaccaaaaattagacccctgtgatgctttgtcttgcgccaactacttatacaaatttgaacttgaatatttttcctgcttagcttctcgattaacccttcgaaatgcagttatctgggtaaacgaatattcatcgcgatcagttgtggaatataatttaatctattctttaataaatccaattaaatgctgctagttatgaattttaatagtaacaagcaacttaatttgtgtttcatataacaaatcattagtgtgaccgaactcaactcataggtggtgtcatagccgcataataagaccgtatttggatgttgcagtgcactctccaataagaatcaagtttaacctcgtttcaaatcatttattcgccgatttcacgttgggtccgacacaaacagctctgaaatgttgatgcgacaattaagactaagttactggccgcctagtggtgctcggcgtgctccttggcctgcgattcggcccatgccttcttgttctcgggcgagttggctgaaaatgggcaggagggagaagtgcattagtacaaggggcccagaggtcgcgaggcgagtgttacgcacccagcttgctgatcttgtagaacacgggcacgcaggccacggccgcaatgaagtagtagcgccagatccattggttcttgatgtagtgcttgatggggaattgggctatcttcgcggagaaagtgtatgggtagcgcatggggcgtccagcgggtttctcggcagcagctttgtcggccatggtagtcgtggaattcgcagctgtggagggtcgaattaaacgaaatcaatttacgcaaaaattatgtaattttcggaggcggcagacgaacatacgaacctcacaaataaaagacagctatgggaatgccaactcgtgcggcgaggaaagcaccaaaaatgacactggctgctagcgagtctggcaaggccggccatgtgtttaccgcggcgaatcaagacggttatcgattcacttacatcgctatcaactggtggacgtttttttgccatcgtgagcaaaactttcgagttacttttcccgaataataatatagaatcgtaaggtaaagacagcaagcacactgcttaggtgctataagccagcattcgtgcttacccatagacgcaggattcagcttggatcttaattgcaccgccacaggagtctgaaccttttttaaccttttcacatcctttttcaccttaattgccatgtctctctcttttcaagctttcaaaatggttttaactagcgaacaggtgccacaggtagctagcttgcctcttagtaactaatttgccaagtagcgagtttcccaaatttagttttgatttagcatgtcggccgatttgatttcgtatttgatccaaacagtttgatagttttacatattgttacatcaataactaattccgtactccctatctggactgggactgacgcccagactttgaagagcaagcacaagaagcaaaggcaacgcaatcgaccgcgcaacaaacgaaatcgcctggaagacagccattcaacgacacaagaaacatcagccatcgacgccacgagtgcaatgcccggaaatgctgtggatccattggccacggagaagactcgtgaccagataatggccgagcgggaggcgaagaagctggctaagcaggccaagaaacagaaaactgcaccgactcctactgccgccactcctgctgttctgaccactccctctgctccggccaccaaaatcatcactgaagtggagcagaccaccattaccactaagctgacgaccaccaccacaacaaaggtgcaggatgcagtggcttcaaagacgactcagccagctgcggtaaatggcaaggatgcggaggcgggtgaaaagacacgcgagcagatcaaggcggaacgcgaggccaagaaggcagccaagaaagctggcaaaggcgggggagccaaggtagagggcatcgcacaacagctcgctgacctgaaagtagcagaaaaagctccagtcgcagccagtgctgcaccttcgacaacagaagcggaccaggaaaaggtaacttgctacatttatgatttccttgcttcatatacatctcacctcaccttgcacagaaaaagccagctcttagcaaagcggagcgtcgcgctatccaagaagcccaacgggcagccaaggcccaggtacagactaaaaaggcccagcatgcagccaaggcaccacccagcgcagctcccaaagggccgaaccggaagagcgtttcccccaccacagcggccaccagcagttcccccgtcaaatgtccagccagcacgcccaatgtagactgccgggtgaagctgttcaaccatctggtgtgcgccaaggaagacagccagttcatcaacgatccactcgttcatccgagcattgcgcgcttgggtgttcagtacgccaagcgcacggtggtggggtccaatgctcgatgcattgccttcctgcacgccctgcgccaggttgtccacgactttgagacgcccgccaagaaggagtttggtcgcagcctggacgccgccgtgaagcaccacgtagaccacctgcacaagtgccgaccgctggccgtgtccgtgtccaatgcgtacaaacaattcaagaaccaactgacacagctgccggcggatgttcccgaaacggaggtaagaatcaaaatatatttttttaactcaattggtaacatgcatttgctcaacagtcgaaggagctgctcgtccacttcatcgatacttacattgaaaatcaaatcggcaaggcggcccaagcgatcagcggttttctgcaggaaaagatcaccgatggcgacgtgctgctgaccttcgcctgttcctccctcattcagttcatctgcgaggaggccaagcggcgccaggtggccttccgcgtgattgtcgtcgattcgcgacccggatgcgaaggccaggagctgctgcgccgactgcacgccaccggaatcccgtgcacctacgtgctgatcaacgccgtgggctatgtgatggcggaggccacgaaggtgctgctgggagcacacgccctgctggccaacggatacgtgatggcgcgaacgggcaccgcccaggtggccctggtggccaatgcccacaacgtgccggtgctcgtgtgctgcgagacgcacaagttcagcgagcgcttccagacggacgccatcgtctacaacgagctgagcgatcccaaccaactggtgcgcggcgacaagtgccagctaagcaactgggcggccaagggaaagctgttgccgctcaacctgagctacgacattactccgccggagctggtgagtgccgtggtcaccgaggtggccatcctgccctgcaccagtgttcccgtcatactccgcatcaagccagacattggctactaatcagacttcatcgatcgctcagtagaactcgcagttgttgaataaataagttttattacactttgatcaaatcgacaaacaagattgatgcgtagttcataatttacgggtatgctagtggaatatgcttgatgccagggaccgctgctgcgaaggagggctaggcccaagtgtctgtacatccggcagaccgccgagttcctcggaaattataaatattttgatcaagagcaagtctgcgctctgacatgcaattgtactttccgtgcgggtggggctgggattagcaaatatgtagctctagattctaataacaaaatacagttttgtgcccggcttatagactaggacgatgcctggaagccaatcgctggtggattgatttggttttgctcttttgatttccatttgcaacaacttgaatgagcttctacaagcagctaagtctacaaatgcaacaataaatacacacaataaatttaatagcgtttccatatcgattgcacaccctagctccgctccattcctcgatcctgcctgccttgcctctacgggctttgcttttgcatttgccggaagcagccccggcacaccggcaccggctttccactgtcgtgtcctggcagagccacgttcttgtctatgcagcgctcgcagaagatgtccccgcagcgccagcagtgagtctattcgaggattggatcatcatcagtggcaggcttgcttaagtacgcggagttacccacctttttgctgaactgatcgaagggcgtggagcaggagcaggtggttacgttgcgcatgggcttccagtctacggccacggagttgatctcctcgggcagcgcctgcggcggactggattgttccgcgctcagcgacagactggcgaaggacatgttgctggccttcagcggatgatcgtcgtcggcggcagacagttcgctaagcttcttatcgtagttgtatctgcaataagcggatggattataaagcatac

SEQ ID NO: 20786 - DNA, 2056 bp, DROSOPHILA
atgacactggctgctagcgagtctggcaaggccggccatgtgtttaccgcggcgaatcaagacggttatcgattcacttacatcgctatcaactggtggacgtttttttgccatcgtgagcaaaactttcgagttacttttcccgaataataatatagaatcgtaagctttcaaaatggttttaactagcgaacaggtgccacagactttgaagagcaagcacaagaagcaaaggcaacgcaatcgaccgcgcaacaaacgaaatcgcctggaagacagccattcaacgacacaagaaacatcagccatcgacgccacgagtgcaatgcccggaaatgctgtggatccattggccacggagaagactcgtgaccagataatggccgagcgggaggcgaagaagctggctaagcaggccaagaaacagaaaactgcaccgactcctactgccgccactcctgctgttctgaccactccctctgctccggccaccaaaatcatcactgaagtggagcagaccaccattaccactaagctgacgaccaccaccacaacaaaggtgcaggatgcagtggcttcaaagacgactcagccagctgcggtaaatggcaaggatgcggaggcgggtgaaaagacacgcgagcagatcaaggcggaacgcgaggccaagaaggcagccaagaaagctggcaaaggcgggggagccaaggtagagggcatcgcacaacagctcgctgacctgaaagtagcagaaaaagctccagtcgcagccagtgctgcaccttcgacaacagaagcggaccaggaaaagaaaaagccagctcttagcaaagcggagcgtcgcgctatccaagaagcccaacgggcagccaaggcccaggtacagactaaaaaggcccagcatgcagccaaggcaccacccagcgcagctcccaaagggccgaaccggaagagcgtttcccccaccacagcggccaccagcagttcccccgtcaaatgtccagccagcacgcccaatgtagactgccgggtgaagctgttcaaccatctggtgtgcgccaaggaagacagccagttcatcaacgatccactcgttcatccgagcattgcgcgcttgggtgttcagtacgccaagcgcacggtggtggggtccaatgctcgatgcattgccttcctgcacgccctgcgccaggttgtccacgactttgagacgcccgccaagaaggagtttggtcgcagcctggacgccgccgtgaagcaccacgtagaccacctgcacaagtgccgaccgctggccgtgtccgtgtccaatgcgtacaaacaattcaagaaccaactgacacagctgccggcggatgttcccgaaacggagtcgaaggagctgctcgtccacttcatcgatacttacattgaaaatcaaatcggcaaggcggcccaagcgatcagcggttttctgcaggaaaagatcaccgatggcgacgtgctgctgaccttcgcctgttcctccctcattcagttcatctgcgaggaggccaagcggcgccaggtggccttccgcgtgattgtcgtcgattcgcgacccggatgcgaaggccaggagctgctgcgccgactgcacgccaccggaatcccgtgcacctacgtgctgatcaacgccgtgggctatgtgatggcggaggccacgaaggtgctgctgggagcacacgccctgctggccaacggatacgtgatggcgcgaacgggcaccgcccaggtggccctggtggccaatgcccacaacgtgccggtgctcgtgtgctgcgagacgcacaagttcagcgagcgcttccagacggacgccatcgtctacaacgagctgagcgatcccaaccaactggtgcgcggcgacaagtgccagctaagcaactgggcggccaagggaaagctgttgccgctcaacctgagctacgacattactccgccggagctggtgagtgccgtggtcaccgaggtggccatcctgccctgcaccagtgttcccgtcatactccgcatcaagccagacattggctactaa

SEQ ID NO: 20787 - protein, 626 aa, DROSOPHILA
MVLTSEQVPQTLKSKHKKQRQRNRPRNKRNRLEDSHSTTQETSAIDATSAMPGNAVDPLATEKTRDQIMAEREAKKLAKQAKKQKTAPTPTAATPAVLTTPSAPATKIITEVEQTTITTKLTTTTTTKVQDAVASKTTQPAAVNGKDAEAGEKTREQIKAEREAKKAAKKAGKGGGAKVEGIAQQLADLKVAEKAPVAASAAPSTTEADQEKKKPALSKAERRAIQEAQRAAKAQVQTKKAQHAAKAPPSAAPKGPNRKSVSPTTAATSSSPVKCPASTPNVDCRVKLFNHLVCAKEDSQFINDPLVHPSIARLGVQYAKRTVVGSNARCIAFLHALRQVVHDFETPAKKEFGRSLDAAVKHHVDHLHKCRPLAVSVSNAYKQFKNQLTQLPADVPETESKELLVHFIDTYIENQIGKAAQAISGFLQEKITDGDVLLTFACSSLIQFICEEAKRRQVAFRVIVVDSRPGCEGQELLRRLHATGIPCTYVLINAVGYVMAEATKVLLGAHALLANGYVMARTGTAQVALVANAHNVPVLVCCETHKFSERFQTDAIVYNELSDPNQLVRGDKCQLSNWAAKGKLLPLNLSYDITPPELVSAVVTEVAILPCTSVPVILRIKPDIGY

SEQ ID NO: 20788 - DNA, 26446 bp, DROSOPHILA
tcctttcccattaatgagcttgactctgaatgaaaaaagcgagacgacgcgagtgtatctgctttcgctggatttcgttcgatgccccgtccggcaatcaattgatattcataagacggtgtggcgagaacctgtattatccgcgtcgctgtatcgcttgaactttctgagtccgcgatcagatcagaattggaatggcctgagcccactgtgctggaatgtggaacctggattccgctcggccggtacaaagtgcagtctttgtccagttagcggcatcttaattgctctggccagaaaatagcagctcgcattgtgcaagtggccaagtcacgcccctcattacagcttcaactgggactgtctataatttcctgatctaaagtgttgatacacgggcgaattgttaattgcatgaatcttgcttttaaatgtgttttgcctctaatgcattgtcaattacagtgtctgtgctaagcgtactaagatataagcatgcacatgaaaattgatgcgtaggtctgctgtttggcaattcacgtcaatatcaattccaaaccccctggcggggtcataagttggctctgatttaaatacagctctgtctggcagttccctacattcccattaaaatatgtacacactatagtcaacaacacctttccgttccattgcagctcggttaacacaccaaatacaggaccgatcccattacttgcaacacagaaaccacaaacagaagcgacaacaaaatggcaatcatactgcaagaagcccagaagtggtatcgggacctaatggacaataaaagcggtatgtctgaaaaaggagttattcgttggtcattccctgagtgcgtctttaatttgcagatcctcgcgttaacgacttctttctgctatcctcgccactgcccacactttgtatgtgcatattctatgcctacttcagcaaatccctggggcccaggctgatggccaaacggaaaccgatggagttgcgatctgttttagttgtatacaacgcgatacaaacaatatttagcgcgtggatcttttatgaggtaaatgactcctgaacgaccaactttatctggccatcagcttaatccgtatttccctccattgcagtacttaatgagcggatggtggggccactacagcttaaagtgtcagcccgttgactatagcaccactggcttggccatgcgggtaaattggcccaaggctactcgtgcgaaagtaaactaaaactctattccaccgtctagatggtcaacatttgctggtggtactacatatctaagttcaccgagttcttcgacacactcttcttcattctgcgaaaaaagaacgagcacgtctccacactacacgtcatccatcacggctgcatgccgttctccgtctggatgggtctgaagtttgcgccaggtacatacatatacatatagtaatcgcgtttataaggatcgaaaatttacagctcgttaattctctcgttcacaggcggtcatagcactttctttgcccttctcaactcgtttgtgcacattgtaatgtatttctactacatgatcgccgccatgggtccaaagtaccagaagtacatctggtggaagaagtacctgaccaccttccaaatggtagtaaaaaatgttgccttcgtcggcgagatttctaaaggatctcctctgacttgcaggttcaattcgtggccattttcacccaccagttccagcttttgttccgcgaatgtgattaccccaagggcttcatggtctggatcggattgcacggcgttatgttcctgttcctgttctccgacttttacaaagcgaaatatctcaacgcagctcgacgtcgccggcaggcggtcaaggccaatggctatgccaacggctcggcttcgaatgggcacagcaagcatcttggagagggtgacgccctgattgcaaacggttgcaatactggggcttgcatggtaggtcttagtgccaccgcacacctaatctggggctaattgggggacacaaggtcattcattccctgagtgataaaagtggagactgagcacacatattttccttacatactcaaggccctgacgccccgacctcaccaaggtgagcgtctggtgcgggaggggcgagccgtcgtgggctgttatatcatcataattttgttgatcaacttaaaattctaactagctgagttaggcaaacagcacttgcgaactctcagcataggcgggggacgtttcaattagcgctcacatgtgaagccggatgcgaaggcccaagcccagtcccagcccaatctgccgcccattagaaaagcacatgggcggcatgttcgctgccagcacacgtgccatcgtccagtggagtctgaacccattgaactcattgagcactctgtgttttcttttcagccggtgatggaggacgagtacgtcaaaagcaaggggcaatcgaatggtgcctacaaggagggcttcttcaaggagggcgtgttatccaacaacgatgccatcttcaacccggacagcagtagttctagtctgcaccagcgcaaagtcaaataactgctgattaggtgtactacgatgatattcattatgtttatgttaagtgattagcgtgtaactgaaccagattgaagaacaagacgagcaagaaacttggcagaagtagcagaagacgattggcacgacagcagcgaaaaattaatagagctcggtttatggattgtttttgataatttatattttaaatacgtacaatacataaaatcagttatggcaaaagtcaatcggatgcgccgaaacttaccgaacaaacgccacctatgcccacccacccgaaccgtcattaactaaagctaagtagaaagagaagcggcagcacaaactaagatataatcaaaccatttttacaaacatgtcctacggcaccagtatgaacgtcccgcttgaagcacaaatacgcctctggtgcgcagagaaaagttattttttgaacgatatttatagagccataaagcctgtttaaaccagctacagataccaattatagtgtagcttaccgcatacaaacaccaacaaagacatacatacatacatactcactttaggtgtaaaattttgtatgaacatttttgataacaaattgagatgttacggcggccgaacctatgatatatgaaagctatacatgctctcttcagtctgctctaaactcaaagaagacgttatactatttgtagcttgttttgtatattgagagagaacggcattttgttgcaatactttgtaaaggtctaatagttaaacttatttatacattgtagctagctagccaattgcaaaatgcagcacgacccagacctccccttggccttcctggacaattgtgacaactaaacggacgaccggaccgaagatcacactatagtcagacaagaaagagtgacaaagatcatggagataaagcttttatactgtaagtgcaaaccggcttaaggacgaagacaatcagtttattagttggttgccgaccaatgtaaatgaatcttaacaaaagttttcaactattttcgcattgcattgaacctctttttggtgtggctcatatatattactttattactacctattcaatatccgcttgtttccatttttggtttgaagttgttaaacggtttttcagcgcagtgagaagtattggtgacaaattatttgtaagtgtaattctgtctgttaatccgtgcgtatggtttcgttgttagattatgtggcttaagctgacaagttcaaaaactatagaaaacctaaataaagctttttaatttatattaaaactgttcaagaaaatatttcaattgtattaacgcatattttgtacgtgtgtataactttcatgacgggattgaatccctggggccagtgtacagtgtaattgttaataaacgaacacattaagtgtattcccacttataactgataattagaggctttagagcctctgagggtgtggcaattgacccatgtggcctatcccctaatgagattggacattgtttcagagaaatacaaggcatcttgccagccacgaaaatctagaaataataaaggctttaaaataatgcctttactatcagatgcctgttgcttacttaacaaaatttccgagaatgggtcaagtgtaatattttatttacaagtcacatattaatttacaaattctaccgaattaatattgcatacaccaggcctaacacctgatgtgccttttgaacttttaataaaaaagaactcttgaaataatcgcattaggaattacgctgagcatgaatcaaatttcacatttcccactttatacgaccaagtagtgaaccaaatcataaatattttatgaattacatgaatattccaaataaaactatattatatttattaaaccaataacactatattataggatatatttagtgtctccctccacaagaaaagtcctttgaactacgtcgttgctaagttttaactttaatttaagaactccttgcgacgtttataacttaaaccgcaacgagaaaggaagttagccttgcacctgtagcttatttgcgtctgcagtactatgacgtcattttcagaattaaagggtatatatgtagattcgttgaaaagaaagaaatttaaagcggttatggtagtccgatcttagcgtaaaagatcaagcgattacataccaagactttgagaaaagtaaaaaaaaatttggctgagccccactaccaaacatatgttaaaattaaattggaaccttttgggcgtcttgttcgtcccttaaaaagcattttttgaaatactttacctaagcccataatttgtgctacatgtcattaaaaacgcgtttgcaaatgattatttgcttttcacaattgttttgtctcaaacaacagattaaaatgtaatacccattacccgtagagtcaaagggtagactataggtaggcagtttatgttcttttctgactcgataaagaacatattacttcatcaggaccaatagaccgtataaacgtcaagatctctcttgtttttttttttacgatgatcgttgaacgctcggctgtgcaaaagtgcagaaacgtaccaaacaatcgaaaaaatcaaataacaatacagattgccactgacttaatgtacaaatgggccagtacttaatagacgcgtactaatttttggcaaacaaatccgctaacaggcggcgacagctgggctgtacaggctaatatttaagcccctcttgaccttgtcggctctcgactcttgccgcatcagccggacagggcgcgatgttagccaagttgacataacttaatgcatcataatgcaccggcgtatttggagctggagctgcgacggagactatcggcacttcaggctagtgttagcgttagataataataactatttcccagctcactttggcacgcgccctttgatgcgttgtgaccaaacactgaaccctgaccaattatcaattgtattattactaccaagtatccgaatttcgtttacaaggaatgaactttggagaattaaaaaaactgttggaaaaaaactattaattcaggcaaaagctgcgagtaacgaccgctataaaaataaaacccctattttcttaaatactatcgatttggaacatataattgtaggataattagacaataaatcttaagtcaccccatattttgcgaaaactctttcatcatgttccaagcaattcttaattgttggtcatacggttggcccaaagtttcgaataaggccgtatatctgtgcgtatccatgattataagccagatcacctacacgggcaggaatcgtacgcctcgtaattaacatggatgatttaacgctgtgaaaggccaggtatcggggctgttcggaagttcactccatgtaatatttactcgctggcagtgtgcgattgctattgcgacggtagccacacttgaaccttgcctgcgccgctgacatcagacaaaaaaaaacaaggttcgggttcagatttgggtcttgggttcgggatctccggatctgaatcgagtcgcatcattcccggtgtccgggaatagccaagagccaatcaggccatttgccatcttcgtgcactgcacttgacgctcggcggcggaaagttttcgcactgcactcggtcggtgcttgccgctgaccgtaacgtttccaccgcagccgctgcgctgccagtggcgttcttccctgcgctggcgctcgcggttgcgcctgcgcctccgcttcgtcggcgtcgcgcgatccgcgtttaattagccgcgcggcgcgatcgcggctcagttttcattcagaagtcaagcgcgcgctaatcgcagacgcagtcaccgatcccgtgtgcgaaagccgaaagccaagagccaaaagctattgcgaaagtaatcattttacaaagttctttggcaacactttgtgaaatagttcgggccgcgcaatttgtgtgttgtggtttttgcagtttttagttttcagatttcggttgccagcgatttaccaaccgagctgctgctggccgccttccgttgcggatttcgagctgtttgcaagtggtaagctgtaagttgttcgcacatgtgatttttgtttttcgctcttttgcaactgcgcggcgcttggtccgttcacaataagcattttggacggcgctctccacgccaaaacacctccccgctctggccaatctgcccggctataaggcgcagatcgtccgagctaatcgatttgactggccaatcgggctgttcgatccggtgtttccaatggtgtggcaaccctgccatttggcggttgcacaaaatcagcttgcgtggggcatttgattcccagcgaggatccgatgctgaggacctctggagaatcctcgacgtgtggtcgcaggcgggattccggcgggatttagccctggcctgactggcagcgcagcggcagaccacgaacagctgggcggatttgtatgctgtttgagcagctgttctggtttctggactgttgactcccaatataccgataggttttgttttgctgacccctcgagataatgcataagaattagccagcatcgtaaagcttttcaccgttgacattgggtccaaagtagcagaagcgcaattagtgcgcccttcgcgaataattgccagagtttttcttgcactaaaaatatacaaaatggtaatccaaggcaactcgaaacaagtgcggaaacgattcgcacaaaaccggatctgcaatgacccgattttggccttggacttgtcgcagggcatcctgatcgtggcaaaaagtttccttgagtgtttcccagtcaggcgaggtggtcgaacgaaaaccgcttctgggaccgactttcgaggtcttgtgacttactgatcgataatgggataatggtagtgaatggctccagatcgacgatcgcttccgcgttggctgtaattggacatcataaattgaaccgcccagaagggcttgctcattgttcttacccggactggagccactcaggcgctcctcggcggatgccactaaggtggcaaatactttcaaacagtaagctgggatttcgctttccgtatttacatatgcaaaccatttgggtttttttcgcgctcaccgttcttcaaatgccacgcacgtagccgcgtttccagcgaatttacaggctacacgccaatcccctgagatcgcagatccgagatctgaggcccgactctcaagaagcctcaagaagcctcagccaaaacttacccaaacattaaatcgctcaacgctcgccggcgtggccgcagctctggctcacaccgcttactctctacttataaataatttaaacacaaaagtttgtttgtctagaagaggatctcgcttccacatcgaatagcgcaatggggcgtgctaacaactgcgatttgcggaagccaagtgttaggaaaagagccgtaaacgtttacatttacgtgaaagtatacctttatatgtatactattgtttgctattatgtttgctattgaatgcattacaaacggtttaaatgtattgataaatacaaaatagaagggcatacacttttgtctgactcccattatatatatatatatatgcatatgcatatatatgcatatatatacttctaccgaccataaaagccactaaccgatagataggccgccgcttgaataccaaaatgtcttgggcagttttcgaatattttaaacaattactacattacagttaagcgccaataacaatacccgtacaattcctggattaaagcaagatttcgtatcttaatctggtagcaatccagtttgtacaatacgaacattttgtatataaactttataaaaaacacctccaaatatgtgggattaaagtgacgatgacacttctcaagtcctaaaatggcaattagttaaacttttttttaacaaattttgcagacaaacacattttggaaaatgtcattcaaatcttgttttataaatacaagaattataactagaattgctcccccttcttcctagctaatcatcattcaacaagagatttaaatcatcaaaagattattcgatcacgatatacataaatggctctgatcagactctcggttctcatcgtcactacgtaaactgccatccacagcgatgttaggggactttacttgggataagcacacgtacctacttataatgtcaattggaagacagcgttttgcagtgactaatgaaaacaattaacagaatttcgtccgcctatgtctgcgacgtgtacggcattaaaaatattccagaagcaacaacactatcagccacatctccgcactttagacagaagatactcacaacttgttcatgacactaaaacaagttgagacatcacctagcttgcacttcggtttgcattaccttagttctgctttgagtttcaacttccccgatttgattcgacaaactggagtaactagcgtaactagacttactctactctaactagagtttacaacagcagtctttgaaaccccgggaaattagttaaatagcttgtcagtaaattgacttaattagtgagccgaagcgcgaacagcaaaacgaaaaggagctgcaatatgcccaataagactaacatttagaagaacaccacaaattgatcgttataagaaacttccgtttcagaaatataagtccaataccatggttaagtattccttatggttttcgagactagggtacattccttataaattcctaattaattattatacacaatacttgtagggtagacctgaacttgaaatgtatttgatagaaagcatatcttcgacgctttattttctttttgtttccggaattctattatgttttgataatttctaaggtagccgaagacaatttaaaaatgtatccttcgcaatcctccgtatatatgtacatatgtatgtgtattcgaacaaagactaggcagtcgaactagccaagttcatctggacttcctttagctgggtaataggtatctgatagtcaggaactcgatgaaagtgattactcttgtttttataaaatgctgaaagcattgtttgtttggccaaattgtgggaaataaatatcagccaatatggtttaatagaaacaagttagttaacacacttcgtgtaaatgcaattcaagcaagatcaatagaaaatgtttagaatgtgcttacacctcgttacacttagcaaacaggttgggaacttaatgctagaattgattgaaatcgattgatttcaggctttccgtagctaccttagtagagtcaacagcttttcacatggtaattatttccgcgtggaattgcagtcgcgttgcatgcaaataattcggaatgaattaattaggcgaaattcaagttgtcccggaagcaaacaggcaatagggcggaaaaggccgatccagcgagtagcattgagatcgggctttgccttgacatggcgaaaatatgagtgatcagacctgcccaaattactgactaatatgtccaaaacaaaaggcaattgtactcggatacgacgcatttgcgctgctcgttttaatgaacatttttcgcgccagcgcggttactttactcgcaataaatctgtcaacaaagcactgacttctcactcgaggattttgacattgaagatgaagacgccgacgccaaaggcgatggcgttgaagaccccgccaagcggcgccgattgagctgtcgagcagctccgaaatggtgccccctccccataccgccactcccagttccgaccattgtcttggccgagggccagctccattccggccaatctcgagagcctgtaatcgctcatttgcggtttatgcgccgcgagatgagcacacgcacatgtggaagtgtggaagtggctatatgggccgaaactagtgtgagtttcaacagagattagtggctattagcagagttaccttggagtggacaagctgggaaatgtgccccagaggaggccttgagctcgcgccggcttagtcgcgttttatgggacatcggaagagggtattaggttcttttcgacagccgattggtggttggtcttacaggtgtcatggggtgattcccgcccagtaatgccgataatagcactcggtaattagctgcggaatgctactatggaattacgaagttagatgcgatcccaagaggaggccttcaggtagcgaatgttaagccgttttattgccaataaagcagtagattctcaggctctgtgggcgacaaagtcgccgttggcgattggtgatgatatacctgcggagtgcaggtgtcaggcggttccttcctaattcacgcccatcatcgggtaattgcctggtgagtgccatcatgaaactgcattttacggctactcgaataattaaagcccccgcccccatgtttaactgctgattattcacagttcggccctccttccgcagtcgcagtggggccaaagtgcacttcagccagaccctttgctccgcccccaagttgagcatcgaatatttgacttacggaggcttgcgctcgaagtcggatgttggacgctaatccaatattttgtttggaaggctcgagtggtccggcccaacgtggaccgttgatctttggagcaaggtaaactttgcttgctcgctatgggcttccagaggtaaacaagctacaaattgcgccaagcgcggccaccggcgaaaacaactttcgattacattcttacactctcagagttagaggccaaaaccagaaataaatacttcatcccaatcagtcggcgaatgccctcaacagccctctcgaaacgctggttggggcttattggctttgctgggtgtgtttgcggcaaataatggggcttggaagctgtgatagcacaggtgtacagctcccgatctggggaaatagcagaagatcatgtcagccaagccgagacacacgattcccgtgcgagctcccacctgggtgtgtgcagcaatggacctgagaaaagggcaaagaagccacctccgacatggctgtcacttcgcattactgtggtagtactgtttcgacgatttccatacaccttttgtgtttgcacgccgattgcgaaagcgtaacgcctgactgtgttttatttccagccagatcatactagctgcctcatccgccattagccaagcagcaccaccgatccccaacttggtgggcgtgctcgcggatgtcggcggaggctatatgaactggccattatcagttgacttgattttagcccgatttcatggcattctcagggtccaaaattgcttaccgtttaccgcagccgcagattttatggcccgcggaactgctaccgacgtggaacgtcgagaaagtcattgtaagggccatctaagggcgttttctttgggccatctccgtctccaactgtcactttcggaggcgatggtgaagccacgaggccgttgacgattcatatttggcgtttggggtatttgccaaccataatcattatcattaccacacattagctaactaagccttcaatttgaaaggtggctttgtgctttgagtgttgcggtgacgtttctattgcgcaaaaggtaaagtgcccatcgtttccctcgccaacattccccaaaaattcggcccgaacttaagtccaatttaaatagatttcttttttccccggctggctctaccattgtctttgagtttgtcgcagctcgtaattttggtatctctgcatctttattaactattctgcttgatattgcttttggctgagaactcgagcacaccttattaaaatgcgaaatttaagtggctcgagtgttgagtgaatttcagttagatctgaaaaggctaacgcttgcaataagccatttctaatgttttatacataaagtcaatgctagcgcacttagtcattagaacttttaaattgatgcacctctacacagcgttgagtgtgcaactacagctaataattaagcacattccactatcattaaaaaacgctaatgaaaatcttgccttatattggcgcttagattggatatctcatttctcggaatgcttgcttcgatttgtgcatcgtaatcaagcaaatttgaaaatttaataagagtctttttgtggaacacatctaaactgcaattcattagattaaattaagtatagtttacaaacattactgacttggcttaatcattccttcaagcggataggttacaacagttttattagcttccacactgtgaatctagatgtagtgcaaaccaagccaaataaaccccaaatgttattgcatttttgcgctactaaaatagccagtagataaacaaatagtcagcacctgaggccataactgactgaagcttcaaaaatagtggcagcagaagccgccgatcgccgaatctacgaattctcatgcccaaaagcttttccaataacgcccacgtttaaatggccagtggccacgattttttgggcttctatttggcaatgtcgaatgtaaatgggtcaagctcatgacaactaaccctgccctgcaggttgcgtggaccattatggtctattgaagatctccttagtatttcaacacagctgattaaatttcaaagtaaatgaaatgaaatgacgccttagtctaattctcataaatttaattgtaggtggggtcaattacccttttcaaaatcaaactgaaccctatatatcagatgtaattctccgatcaaattgggacatacaaacatgcatacacatacgtacgctcttgatttgaatacccttttgaatttttgaggtggtgtcatacattttgatccctacttgtgacaccgccagggcaagtccgatagttaagctacaagacaagtctacacctcacatggcgcccgcatccaccaccgaatcccaatcgccatccccatcccaattccaattccaatccgttcgcgttgcctggcctgggtcgcttcgcctactggcacgccggcgcatataaatcgattaataagtttcgtaaataaaatgccagcggtggctactgcgttgacacagcaaagcaactgtagtaacgacgacggcgaaatcgcagccagatattgcgctgccgcctgtacaactccgtcggttgctccagcatcgtcatcaccgtcatcgccatcatcatcatatccatcatccggggcacaaagacggccattaaaactatcttatgacccgttagatgtcgaattgaaccagagatatgtgggcgatggcgcagccccaatggccaccgactgctcaatggccatatgtattccgctcatggttttggccaggccagcacaagtgagtcaagggcgcaggcgtcgctggccattgtgcgttttgagcaggcccatcacgtagagaagctttttggacttctttgggcggacagctatgatttgcctacgcccacaacatacaacttcgaactgccacagggatctgcatccttaccaagaattcgggatatgcttttgatatgtaaaggcccgcaattaacccattacctaaattagctaatgatttaaacaactattcgatttttgggttcaatgcaacgcggattgaaaacagtaactctcgtaaaagcaaatccaaaaaccttgccattcttgatataagaaatggaaatagcgatactaggatgtgtattgcgccaacaagtttttggagtaacaaaaatattaataccctataactaaacccactaaaactggatttatcacctgacgacatcccgattggaatccagaagcaaagaaacagaaaccatatttcgataacaataaatatttttaaccaatttgaatagtgcccaatgatgcattccttaatcttcgtttcgaaaacatttatacaataaacaataaaaacataaatacttattacggacgaggaatttgtatttgcatacatacattgcatacattgctatcaggaccaaaaaacaatgattaccaacccaaaagggtttaatttctcccaatatgtctatgcgtttgacttgaacagcttaaaaccaaatattctaggatgcaaaaaattaaaatctaatgctgttacataacaaaaaaaaatttactttccccaaaacctttaaaagtgaaagtacaaaatttgcaacatatgtacaacgctgttaacagcagacccatttccaaaagacaaacataaaaactgtccttaaacaaggattataaaggtatataaattatttcctgctgatttagataagcgaacagtgtgataaaacgaaaaatagttacgtgattctatttttgtagttctggtcagatgattttcttagagttaaataataagttgatgtagtttaacatttgcccattgtgtacataggttttctggtttatttttaatacagaaaatatcttcatttgttctgcaaaaaaataaataatagtaaaaattattttgcagaccgattcacacctatccaactcgcctcgaatggattggattgtcggccgctcgatgagccaagttcaaaaaactgttgttttcgttcgacggtgtgtgcaacataatttccggttcatttccttgcataaaaggacccaaccgaactgaacaccttgacccgcgttcccttcgctacgctgtgtaggtgtgttggtagtcctctgcgaatgtgttgcgtagttaaggggtggctcgaaacaaatcgagaccgagtgaagcccaaaaactaaaacaaaatgagagaccgaggcaatgacaactaagttgtgtttgatgaggggggtggtagttgagctctcccgctcgcgatgacataatgccgtcacctacacacgtacacaacgtttgttgtgtgttgttcttttcaagccgtggctcattcacggcagacttacttatttggcggcagctggctttcgcgtgagctagccgtggcaaccctggccgcctggctgaagccgaagccgaagaggtttaagagaaaagtgtggggcaacagcagccggtattttgcgccaagcaattaagtacaatgtatcttgcgcataaaaaaaagagagcggttgcgggaaagcagtgctttttgcttctggcgaacagcgcgtgacgcaacatcgagcgtgagtacccctgcgacagctggtgcttcttcttgcccgccttgccattctccggcggtctgcttcttgccgcttgccagccacaccgcatcctccagatacagatacacagcgctcagtgctcagtgctcagtgctcagtgccgctctctttggctctcttcgcacggctgccgtgccgtttcggggttctctcgctctttgccagcgggcagcagcagcgggtctcagttcgcatttcgctttgggttgtgcctcctcgtctggttcgctttttgggtcaggccagagcgatttccacacaaaattcctagtctgctgccgagtactaccactgcaaaacgaactcaaagtaaagtgttattccgttatagattgtgattcgaatcgattcgatttgggtgcctgtctttggttttctagtgaagtgttttttggtgcgcccagttccttgtgtcggtatcgcgctgtgggaccaacgtaacgtcgccgagtagcgtcttccaccccgaaaagctggccgtgcctgttcccgcccgccttgataaatcagccttggaatcaggcggaatcagttaaagccttccccccgtattccgtgctcccaataggtgtgccgaccggattttcaaatgctatgggtccaactgtgtcgagtgcctcaactaaaaaataaaaaaaaaataccaacgtgttgccccctcttccatttatcagttacctttacctgcgaacccgtctgcattttccgcaggcacggccatctaatcaactaataaagagcgataagagaccatcccagattaggaagcacccggccagaaccgaaaccagaaactattagataccacatacggaaagtccgagccgccgagttcgtcacgttgttgtaacacatgtgtgtaaagatatgacataattccgagacgttccgctcgcactcgcatccaacagcattgtctcccactctttcttattcggagaggaatcggaagagagcggttgtaaacgtgcagagagagagagagagcagcagagaaagtgacccctcaacaagtcaccgccgcggcgtccggccgccttcgaatccattagctaagcggatacactcgtcccgcccactgccagcatcgcccacctcccacctccctcgtgaaatgcgcggcccacgagcatctgcagtgcaagcgatctatgttggaaccgtcataactaactaacataacgcccactggattcgaggcatttcgaattgatgagccatattgttttgaaatttgttttaagggcgttttgatagggaattttggaaccacgttagcaataaaaaaatagcgaaaagtacacaaatattttgtatgatcatatgtacatggatacatatgtatgtaggtaccatggttttgtgcgatgtcaagttatatttgtttatatttccccgctttgcatttgctatattttgtattgtttgtcttgccattttattgcccaagttgcttatattgagatggatcaatccaattagtcataataggttgcattcatctggctcaggcgagtgtttttctgaatttagtttggaagcttggctaactgtggcaaccgtctcttgttggaggtggaaaataggaaaattcggttatggaggtcccactgactgtttgaatatttgcgcgggctgtgtgggccgcccttagaaagcagagggcttcgattacgaaaatgccatttttctccgttgggtgacccaataagcaacaaaggccgaaatagattattgcgtcaagacgtaaaacgcgtttcaatttccatttcatcaggtcaacctgttgttgttcgccgcctttcgttaccgcgctgctcgctgcttgctgctgtagcttctttttggcgacacacattcgtaaacagtttgaccatgaattcgattttgagcgcaaaagtcccaaaaacaaaaaaccaaaagccaaaaggcaaaagctaagagctaagagctaagagccaacaaaaaaagcgaaacgtgaaatgaaaacccgaaagccataaaaaacccagtccgtcccggtgcgagtatgtgtgaaatgccgtaataattaattgatcgacgagtgcggagctttgatttggtattcaagccatcacctgccactgaaatcgatcatgatcaagcggcggcccttgcctcatccaaatccgctccgttcttgcgacagcgcacctgttggctgcttttcgatcggaaggcttgctggctttcccaatcccaatcccaatcccactgcacatcccaattccacaaccaattacaagggaagagggtgcagttcgactgggagtcggattttgggtctacgcactgtgaatttcacctgcagcccataaagtgacggcatctaagcgtgcctgtacaaacatttgcatatgcacacagcacaatcaagcaagagccatccctatgttccgttcacaaaggcaatctatgcgaagaaatgtgaattaattcgttatggcccaccagcgtcaacgccaaagcctctgcccgcttgcaagctccggccgccgagtggtgtctgcgacttggacttggactacgtcttagactccaacaactccaaccgaggcagcgactgcgactgcggcgtagggttcgactgcgactgcggctgagctgcagcggccttagttcgtcagtcagtgtggcagccagttagtcgtgctccgctagtcgatgtcgacggttcgctgttttctgtgttgctcgccgcccgttcccgcctctcccgccgcatatcgaagtctcgcgtattgagtctcgaaaacaagtccaatctgatgtacggccgcatttccaaggactcccttttaaacactaattcaagcacggcatgccaggcccaataggtcgagtagcagtgggcgcgggtctgcaacaattagagcaataattgttgagcgccagcctatgcggtctacatagaaaccgaactaccggactatcgcccggtaaccacctatagtttacgccctggctttttggtagaacggcccaaagccgttcagcaaaaaaaaaaggtaaattctcggatcgattcaccgtaatgatctgtcgattgggcgccatttcgaatggattgactaaccgtcatccaatccacgccagagtatccttatcctttggccactcctgtacgtctaatcgggcgaagtgtacaaataagtatcaattataactttttaattatatgcacatatgcgacgcgtttcgattcgtttacgttaatgtgattaacggaatggaatttttggcggctgttgaagcgcatacaaatgagtctttcgatgatttgacgatgtgccatgtacttcaagttggcttgccagtaccgtctgcatcgatgcagtgcatcacacgcgactacttcaaggagcagttctcgtgcctgctgaagaacgataaacaaatgtcaaagcttgttattcctgcaacagcctggggtcaaaatcacttaacagatggtatcaattacttatgtgccagccctctcctggccaaatggccaatcaatcgggcccgtcttgcagcacttcagccaagtcaagagactgagctgtgcgcaaagcacgaaaatcaatagtcaatgaatatgggagtgggccagaggatgtccggagcctcgcgacaccttcgcagctcgagcgggtagatatgatggggcacctatccaccctttcaccgtccaagactgccaattattgtgtcaacaactgtggcaagcagcgagcgccacgcgccttttcggcgtcactcatggcgtgtttggcaggcattaagcgccttttcctcggcgacttatttgtggccgagcgtagaggcggctttcttggccaggccgagaagtcggaggtgcgtcgagtgagtcacgcgacaccaggcaccatgcacaaagcaccattctaaccacccacctggcatcaggtggcctgctctcgtggcccctttttcattcaagaaacgcgctgcgaggcactgcgcgcctctgcgcacgagcgaagggcaaagccagagaaaagagaaaccctagtcgcatcacgtgatgagattggaacaacgtggcgccttggctgacgccggtttagcggcgtgttgctgttgaatgggccagctgcggcgggcggagtgggcattgggtgtcgccttggatgcccatgtgtgcagtattgcttcatgcccatgctttccggaacggctctggtgtgggcttgtgatgagcagcagagaagcagctgaaagcaaccaaaccaggtcaatgaaatagcaatatttggcatggctttaagtcggcactgctgctgctgctgcgctgctggcatcgcttttcagttgccgcttcttcagcaagtttccagaggtgggcgaccactccaacccttttaaatcaggcgaaggcaagaccttggacaccaactaccacccaccacccaccgcccttagtttcttatgttttctgttctgacagcacttttcgcccgtaaacgtgtgctctttgcattgccttgttttgactttgaataagtatcaatttggctattcggtggcagtggcttaatttacattcttgttgccttttttagtgcctttttttgctacaggtttttgtttgcatcgcttgttgcttggatgaccccaccctaattgcagttcgaagttcgaagttctaagatatataataattaattggaattcaatttctagtgagttaggaagttaattggtctccaccttgatgaaggtgtcgcttccagatggaaaagaaaattattagcattcccagttatcgcactccaacaagcattattattaaacattttcgacactcttgcgtgacgtaccacgcagcgtatgagtaatgcgcccatggagctaaacactcgatatgggtaacattgtatatataaagatacggtttcaggaccacaatgcagaccgaggcgatgcaaatcttcagtttaaacacttaacccttgagaactcaatatgtgaggtacagatatgggcaattttcgtcaacgggttatgagaaatgttcatacttctcgaaatatagctttagtagtttccgatggccaaaaatatatgcatatatgcataaataaaggagcactgtaccccgccacgtactccagtgctgatgctccctgtttttggccactgcctttgcttaatttatcgacttgcgataactggtcgtgacagatacagataaggtgtatgtacaaattccgcgatgtgcataaaacgaaaatgaaaaatagaacaaaaggcgcggctcaaaacgagaatgttcaattataaacgagatgtaaatgtgccgatcaagtgctgaccgagctacttttggatttagtttattgacctcatttcgatggccgctcttattgggtgggcatatgggctcaaatacgaagctgcagggtgttgtgttggatgggtctgataagggccggctgatgtgggttgacttttgcgatttgtgggtactagtactagtattgttgtgtaatagcgaattataccatttatacttacagttcgaaaacccgcttggcaccgcatcaaatgcactaagtcccaagcactaaaattatccagatcagaagcaaaaccaagactttaaccaccaaccaattgtacaatcaaaaatcagcaaggaacacgaactacaaaccaaaggaatagtaggactccgcagtcggcgacaaacagtaaccactactcaacaacacaatggccttaattatgaaatacatcgacagcataagcagatacatggactcacatagtggtaagtaccagacctatcgggtgctgccggagtattcgctaatttggctaaccttgatttgggtggattttggtgtaaccagctaccgctggggaacaactcaatgtcgctgcccttcctcacgttcctctccgaaacatgggggatcaattattttgacaccagttctctaattggcaagagcggttggtagaactggtaaaaatggctcttccagtcgccaagctctcagcctcaatttctctcgagaattgccatttatatactgagaccggatacaaacgcatatatgcgagcaaatatatttattgtactatgtttatttcctaatacaccgctggaaacatactttttttacaaatgcaaaacatatgatatgtttgatacatatgattgatatatgatacatataatctaattatccatatccaaatccgagagagagttataagcagttactcatatttgtgttttgcattcatttccatttgcattgaaaatttgaatttggtaattataactttttatcaggtattatgggtacatatattttatatatttgagattataatgacgggcgctccctgttccgaaatgggaatgtacatatagagaaatcaatctgtgatggaaatgcgaattgacgtgcagtgcagggatgactatgctgacatgtggttgctatctatatctatataaatgtttgccaagatcagggtcaatggcagtgtgcggcggtgataagaacacgccattcgcttatctaaaagatgcttgtaacttccgatgttgacaatatatcgtagttcgtaatagtggtaaaatgcaaccgcgaatcaacaacgactccaataattatgtggtttctcttcgaacagactcgaggacaaagggctggcccatgatgtcgtccccattccccacactggccgtttgcctcacatatgtctatctggtcaaggtgagtgtacggagcacaaaattccaatttgcaggctgcccaatttgggcttcttattagtagttaaacgataagaaggtggtcttactaaatcaattgtaggtaggtttatgactactgtactgtactgtttcacataacaaacttatcaacttcgtgataataaaatggggtaaaattaatgttgataccaactgccgtccacaggtgctgggaccccgattaatggagaaccgaaagcctctgaatctgcaaaacactctagtcatgtacaatgccatacaggttgtatttagcgcatggctgttttatgaggtaggtattcccgaaccacccatccatcccatcccaccccgccccacttccccatcatcccagcagcttttcatcgcgtggcatcgtcgctggacaggtccacgcttctgcggaccgtggaggaccgtgctttccaatcgaatttaacctatttttgctgctaatgtctctgttctagtgcttgatgggcggctggtggggctcgtacagcttccggtgccagccggtggactacacagatagtcccacatcccggagagtaagtgtccctggcaaagcggccttgcgctagagtacctataagtgtgtgcttatccgatccgatttgaccgattttaccccgaccacttcagagaaatagctaataccgtagttattcgcgccccattctatatctgcagttcaggcaatccagcgcggcttctgcttaatctaatcctactatattgttattgatccactggccactgacctagccaacgctttttggagtgctaaccagccacgcctcgccgtgtagtcgtttcattgtattaactgcgtattgtactcaaataaaccccgactgccaaagatgcctgcgccagcttcgggcgcccggctttgactaataccgacctagtgtaccctaacgcacctcatgtgcaggacgcacttgtcctgttctgacccccagctgctctgttttgtatataaatgctagtcaaaccaacaccagtgctacagataagaccggtggataatttgcttctattaatagaattatcgcgtttaagcctaagttgataccatctaagtgctctatactcacactaacccccacaccgccaaacttgcacatctacaaatagttgacagctgagcgagcaagcgacctgaaagtgacgtctttcagccagtatccggtgacgatgccaacaccagtaccagcatatctctcacgaatcatccaagaaatcgagagccaagcgaagatatataagttaccttttgtgctctacatttccagataggcatttccggttggctaactggacattatagcttccgatgtcagccagtcgactatagtaataatcctagaacgttaagggtatgtgttaaccgccacacgcagtaagataacgaataacgataagcattttggttacgttttatttacgttttggtgtgagtgcacgaatagttgttatagataatcatacacgcacatttactcatatacacatacccatggtagtacctaagaagatgggtcattgtgacacaaactataatttacggtgttgtgggttgggcagcattgcttgcgtccttaacaaaactactcctagcacctaagcccataggatgctatcacagatttagcatgtgtaagccgtacataactgccttctcttccactatctctaaacttaactctcgagattcacagtaccaactgtgattgaggcctatctgttccctaacgatccaatctattcgcattccatctaaatttctttacttttaattgaatattgacccttcttggaaagccatattaacccaactgaatctcgaatgcgtgtgcgtatgtgtttaaataaatttattatttttcaatagtgctcatgcaagagtcaatgatgagacctgttgccggttgaatcgacacgactgcactccctattccatctgttatgactgcgagacccaaattcttgctggcttgcatttaacttgcacctagcagtgctcattcactggattgaatagggatgcgcagcactaagtccaaggggatgttaaaaacacgtcccacatatgtacatataatagttctaatataaacacctccctctccctattccctgaatcagatggttcatgcctgctggtggtactacttctcgaagtttacagaattcatggatacggtgagttgcagatcaacggatcaaagagaccgcgatcggtaattgtttcatttatcaacctgttgcgccttgccacagattttcttcgtgttgcgcaagaagtcgagccaagttaccacactgcacgtcatccatcacggctgcatgcccatgtcggtctggttcggcgtcaagttcacaccgggtgagttgctgtgggggtatatgtgagacgaacccatcctctgaccatccgaattctccctacacctctacaggtggtcacagcaccttcttcggcctgctcaacaccttcgtccacatcgtgatgtacacctactacatgttctccgccatgggtccgcagtaccagaaatacctctggtggaagaagtacctgaccactctgcagatggtaagctgcatgtgaagtgaaccctgtttctagcctaatcctctgctcccacaggtccagttcatcttgatcatggtgcacgccttccagctgctcttcatcgattgcaactacccgaaggcgttcgtctggtggattggcatgcatgccgtcatgttcttcttcctgttcaacgagttctacaaggcagcctacaggagccgcatgatggtgagttcgccccttagtacttctctaagccacagccagtccttaaatagctggccgagatcagcaaatagcgtctatgtggccgctcgagtattatcaatctgatattcccacgttgccgcggaggtttccagatttcggtctgtgttaatgaaaatgaaaaacgaatacctaaccgaaatgacgcgacgcgattcggagctgtgaggcaaacgtgattatatcatcatggctgcactgcaccttgcggcctgccaattacaaatgcgcaagatgatgtggtccaaattcattaacgagatttcgtcaagtaggtctctagcgactccagcactgggcggtggtacatatcgttaaccggcttcgtttcggcacccagcattcgctgagactcgtcgcacgagtgaaagtttggcggaaaggccacatccacagcttcgcattcagcgacaccgaaagggagacaaagccagacttacggacctacgacttcgaatgttgcatcattgcagtggtttcaagcttgtggctcgataaaaatctaagaaaatctctgaaaaaactataaaaactatagggaacgcaattgtcgaactccttggccatcaaatactcatgactcagccaaaggaagcaatgttcagtgtttaggtagtctgctaatttttaggatgtagttatttgtcaaaatctatagaaacactaaaaatgagtgcaaccatcattttattttagaagataattaataaattaggattttgaggcgtcaatggctttcgagaactccattttactgaccaatatatgagaaatcgaattgatgtgcgttatttgttctccttccagaaaaagaacggagccctggccaacggacacgccaagcccaatggctactgcaagagcatcaacgcccatgacgatctggccatgccacagaccacggaggcgacagcgacagcgacgcccgcatccaaggccaacgggagcagcaccccgccgagcaatggacatgccaatggggtggagaacgtctacaagcaggtggccaacggcagcgcgcacaaggggtcc

SEQ ID NO: 20789 - DNA, 1914 bp, DROSOPHILA
cgatctgttttagttgtatacaacgcgatacaaacaatatttagcgcgtggatcttttatgaggtacttaaagtgtcagcccgttgactatagcaccactggcttggccatgcggatggtcaacatttgctggtggtactacatatctaagttcaccgagttcttcgacacactcttcttcattctgcgaaaaaagaacgagcacgtctccacactacacgtcatccatcacggctgcatgccgttctccgtctggatgggtctgaagtttgcgccaggcggtcatagcactttctttgcccttctcaactcgtttgtgcacattgtaatgtatttctactacatgatcgccgccatgggtccaaagtaccagaagtacatctggtggaagaagtacctgaccaccttccaaatggttcaattcgtggccattttcacccaccagttccagcttttgttccgcgaatgtgattaccccaagggcttcatggtctggatcggattgcacggcgttatgttcctgttcctgttctccgacttttacaaagcgaaatatctcaacgcagctcgacgtcgccggcaggcggtcaaggccaatggctatgccaacggctcggcttcgaatgggcacagcaagcatcttggagagggtgacgccctgattgcaaacggttgcaatactggggcttgcatgccggtgatggaggacgagtacgtcaaaagcaaggggcaatcgaatggtgcctacaaggagggcttcttcaaggagggcgtgttatccaacaacgatgccatcttcaacccggacagcagtagttctagtctgcaccagcgcaaagtcaaataacgatttccacacaaaattcctagtctgctgccgagtactaccactgcaaaacgaactcaaattcgaaaacccgcttggcaccgcatcaaatgcactaagtcccaagcactaaaattatccagatcagaagcaaaaccaagactttaaccaccaaccaattgtacaatcaaaaatcagcaaggaacacgaactacaaaccaaaggaatagtaggactccgcagtcggcgacaaacagtaaccactactcaacaacacaatggccttaattatgaaatacatcgacagcataagcagatacatggactcacatagtgactcgaggacaaagggctggcccatgatgtcgtccccattccccacactggccgtttgcctcacatatgtctatctggtcaaggtgctgggaccccgattaatggagaaccgaaagcctctgaatctgcaaaacactctagtcatgtacaatgccatacaggttgtatttagcgcatggctgttttatgagataggcatttccggttggctaactggacattatagcttccgatgtcagccagtcgactatagtaataatcctagaacgttaaggatggttcatgcctgctggtggtactacttctcgaagtttacagaattcatggatacgattttcttcgtgttgcgcaagaagtcgagccaagttaccacactgcacgtcatccatcacggctgcatgcccatgtcggtctggttcggcgtcaagttcacaccgggtggtcacagcaccttcttcggcctgctcaacaccttcgtccacatcgtgatgtacacctactacatgttctccgccatgggtccgcagtaccagaaatacctctggtggaagaagtacctgaccactctgcagatggtccagttcatcttgatcatggtgcacgccttccagctgctcttcatcgattgcaactacccgaaggcgttcgtctggtggattggcatgcatgccgtcatgttcttcttcctgttcaacgagttctacaaggcagcctacaggagccgcatgatgctggccgagatcagcaaatag

SEQ ID NO: 20790 - protein, 245 aa, DROSOPHILA
MRMVNICWWYYISKFTEFFDTLFFILRKKNEHVSTLHVIHHGCMPFSVWMGLKFAPGGHSTFFALLNSFVHIVMYFYYMIAAMGPKYQKYIWWKKYLTTFQMVQFVAIFTHQFQLLFRECDYPKGFMVWIGLHGVMFLFLFSDFYKAKYLNAARRRRQAVKANGYANGSASNGHSKHLGEGDALIANGCNTGACMPVMEDEYVKSKGQSNGAYKEGFFKEGVLSNNDAIFNPDSSSSSLHQRKVK

SEQ ID NO: 20791 - DNA, 3209 bp, DROSOPHILA
tctaccgaagatgatggaactacctcaccggtcagattgaaaagaacccgacgtcggggacttaagaaaggcgggaaaggtgaaaatcgcacaaaggttacgcttccagttttcttttgcgatcagtgcggcaacaatattacagggaagtcctccttcgaccgtcacctacgcaaacacagcggaattaggccctttcagtgcgagtaagaaaagctttagctcgtcaattgtacaatctgatagttaactgtgtaacattgctctcatgtagactctgccccgcccgcttcctgtcctccggtgagctgaaaggacaccaagtgatgcacactggagatcgcaagttccagtgtcgttactgtgaccgcacctacgtcaactacagtggtcgcctgcgtcacgagcggacccacacaaatgatcgaccctttatttgtgcgcagtgcggcaagagctttaccaattcctacatcctcaagaaccacatgcttatccacacgggcgagcgcctgttcaggctagtaaactatgataaatagtgcttaagttaatgatcacctagccgatcctttgcagatgtgagctgtgccatcgatcctttgcgcgacccacccacttgaagactcacttccgctctaacactcataagcacaacttggagaaatcgatggcagacgcgggtggagttcagctgtcaccatcccagtcagcggatcaggtcaaattcgtgacggaaaaggagccagaagcagaggcggatgcctttacgatagaagtgcctttgcccgcggagcaggagcaggatgagtctttgggcctggctgctctggaaacatccactctaatgtatagtacaaactagaccttaatgagtccatctcaacctttaaagccaaatatagttcacaatttgattatccgttttgattttttttgtaaaaattcctattttggtaatgcaaccgttttcaactaagagcttcttaagtgataccttttagggtttatcaaagattgtgtctgctttctgcatgtttcgtctgtgagcatttgaacgataatgggtagtaaggtgtgtgtagcgactgaataacttatcgcagaggtcgcacctgcaaatagaatagattattattattacacttaagtactatttcgagtacccgcttacctaaaagccttctccccggtatgcacgagcatgtggttcttaagaatataggatgttgtgaaggcattgttacactccttgcagacaaaaggtcgttcgttagtgtgagtccgctcgtgcttcaaccgagtgctgtagtcagaaaagctgcgggaacagtgtctgcacttgaagggcttttccccggtatgcttgcgaatgtgacgcttaagttccgccggcgtgcagaagcgatcctcacagaatcttaaatgaagcggattagttaggatcaatcttaagtagaattgccacttactcgcacccaaactccttgacgccgcgatgtcgcttacaatgcagtatgaatgatattcgatcttttatgtgatttccgcactcctcacaaaagaaggtcctattggagtcgcggggatttcgacgatttctcctttttttgggattctcagagtctgatttgagttcctgctttgcatctacttcagtatcgctttcgtaaataaggtaatccatttcactataatcaatatcgtcctcattattgggctcgtcttcgttgattttagattcatttagaatgtcctccactttaaaaccggagctttgaatgggcccttcattgagatcgtctaatcgctcgacttctatgcttatttctgccagatccagttccaactcctcctgctcaaggacacttttgggagattcctggcagattctaaggaagtcttcatcatcttgggaatggagcaactccctttggacttccaaacagcgttccctaaaggatatggcttgttgcaaacaagtttggcaggacgcacatagtcgatttggcaacgtactacagttctttaactgtaaagagaaaaaactttagaaagttaaagacactacgcattattatcctctcaccacagctccagttagtagtttgatgtgttccagcgtagtttgattgcgcttttcaaaaatattcaatgatctttcagcattcgtgcgcttgccgcaagtgcgacacacttttccttccatttttgagccgataaaaaagtttgaaacgccaaactttttgtaaacaatgctatgcttgtcaatcagctgttccgtttgccattcgcatggaagcaatttttacagatgaaataaatgctcataagttgggatttgaagttttgatttattattcaatattaagttctacatattacaattggtttgttaattatttgcagaaatgctccttggctgtgcgccattgtcggtctagcattgcctgtaattgctatgtatatattataaggacagctttagatgtgcaggctgtcctcctcctcctccttgagttcacgtttctgctcctgctccaggacctgtttcatctcggctttctccagatgccgcttgtgtacgccagaccggaagtgggtgctcaggtgggtgggcagcataaaggacttgtcgcacagctcgcaccttgaggggaagattcagtattagatggcatttcaaacatttcagtaactgtaccagtatcactagtttcatattattataagaaattattataagataactaaatattactcacgaaatttggcaacataagtaatatttagttatcttaactctcataaggttttggaaaactcttgtaatgccgcataatatgatcttagaatttctaagaaacctagttattgggtttcccggtactgtgtagctgtatgactcaacgtacctgtaggcccgctcgccggaatgtatcagcatatggttcttaaggatgtagccggtagtgaaggccttgccgcaagtaccacagacgtaggggcgctcattggtgtgggtacgctcatgcttcacgcgcgtggtgtagtctgtgaagcagcggccacagtacttacatgcaaacggtcgctctccggtgtgcttgcgcatgtggcgtttcagctcggaagttgtgcagaagcgcgactgacagagtctgaaaataaatccatttagtcatactgtatccaaaaaggagtagaaa

SEQ ID NO: 20792 - DNA, 1041 bp, DROSOPHILA
atggaaggaaaagtgtgtcgcacttgcggcaagcgcacgaatgctgaaagatcattgaatatttttgaaaagcgcaatcaaactacgctggaacacatcaaactactaactggagctgtgttaaagaactgtagtacgttgccaaatcgactatgtgcgtcctgccaaacttgtttgcaacaagccatatcctttagggaacgctgtttggaagtccaaagggagttgctccattcccaagatgatgaagacttccttagaatctgccaggaatctcccaaaagtgtccttgagcaggaggagttggaactggatctggcagaaataagcatagaagtcgagcgattagacgatctcaatgaagggcccattcaaagctccggttttaaagtggaggacattctaaatgaatctaaaatcaacgaagacgagcccaataatgaggacgatattgattatagtgaaatggattaccttatttacgaaagcgatactgaagtagatgcaaagcaggaactcaaatcagactctgagaatcccaaaaaaaggagaaatcgtcgaaatccccgcgactccaataggaccttcttttgtgaggagtgcggaaatcacataaaagatcgaatatcattcatactgcattgtaagcgacatcgcggcgtcaaggagtttgggtgcgaattctgtgaggatcgcttctgcacgccggcggaacttaagcgtcacattcgcaagcataccggggaaaagcccttcaagtgcagacactgttcccgcagcttttctgactacagcactcggttgaagcacgagcggactcacactaacgaacgaccttttgtctgcaaggagtgtaacaatgccttcacaacatcctatattcttaagaaccacatgctcgtgcataccggggagaaggcttttaggtgcgacctctgcgataagttattcagtcgctacacacaccttactacccattatcgttcaaatgctcacagacgaaacatgcagaaagcagacacaatctttgataaaccctaa

SEQ ID NO: 20793 - protein, 346 aa, DROSOPHILA
MEGKVCRTCGKRTNAERSLNIFEKRNQTTLEHIKLLTGAVLKNCSTLPNRLCASCQTCLQQAISFRERCLEVQRELLHSQDDEDFLRICQESPKSVLEQEELELDLAEISIEVERLDDLNEGPIQSSGFKVEDILNESKINEDEPNNEDDIDYSEMDYLIYESDTEVDAKQELKSDSENPKKRRNRRNPRDSNRTFFCEECGNHIKDRISFILHCKRHRGVKEFGCEFCEDRFCTPAELKRHIRKHTGEKPFKCRHCSRSFSDYSTRLKHERTHTNERPFVCKECNNAFTTSYILKNHMLVHTGEKAFRCDLCDKLFSRYTHLTTHYRSNAHRRNMQKADTIFDKP

SEQ ID NO: 20794 - DNA, 6918 bp, DROSOPHILA
tgtctgcgatttttgatcgcaccagcagtttgggttttaaaatttccgagaatttcccgagaaatttgtaaatcattagagagggatttccctcagcagaacgcttgcctgcacttttgattaagggacaataaccttgcagcaaatgttgcagaaactcattactgcatcgtaatgatgaaagggccaaaactgaaggaacagcggggtgggggggagcacatggcaatggctcccaacagtgtaatttctgggaaccaaagccacaggattttattgggcggaaaattaaaagcataacatggcacgctttaaatttgagtgcagctgcaaaatgtgaaaagtggcaagtggcaagtggcaagcggaaagtggcaaagtggcagcaacagaagccgcagcatatcgcgccaagtctgacttggcaggactgccaaagaagagtgttccaagggtttcccaagacctttcccaaacacccaccacctcattttaccagttgcaacctgcagtttcggactcacgcgcatagtaaattcaacttattgacaggcttgcaaagaaacgtgttccgataagcgaccaggtgagtgagttgcacctgtggtccttctttcctcctccaactagtctggaaaagatttctcagctgagaaccgaactggcggtatcggcactacttcgcccatgaatcttgtcgacgacaggggaacccatgctaattacaaatttatgacactttctgcgtgggaaaatgtgctcgttttccctatcaaccagactgggcgaaggcctgtttctggcagtaagaacattgcttggagcttggagtatcacatggacggattttattgcagattctcaataggttaattacagctcagtgcgaatggagacgggtttacctaataatttgaccacagcataccagaatctaacagcacaatgatttctctcaaagtaaatgacgcaataaaatgacacagctgctagaagcactctattcaaagctgcgacccatcctggacagcaccggaggcatccactcctcgaactcgggaatatcgaacagcgggtgctggttgaggatgtcgaaacgcaccaccttgtacgtggagacgagccactggcccatgcagcgactgttgtcctgcacattgcccattctcgagggttccacggaatagtcgcgtcggaagcgcatgaacacctcggcgaagatcaggggatggggcacccttaactgagcgggatctatgaactcctttagcagctccgtcatctcactaagttccgccggcgagcgaaagtcattggatctccgcagggccacgaagaccacgtccaggaaggcgaaacgatggtcgtagtgccgcagcagctgcaccttgagcggaatggcccgccggaagtgctccttctcgaagcgcatcattttgagcctccagtcgggcggatcatccaacagatcgtgcttgatctgcttgaaacccataggcgtactgcatcgctccacattccgattgcggcggcgccttacgaagtccgtaaaaacggcggctgcctggctcgaattctcaatgaacttctgctcggagaagtcccagtcccaaaggagcttcagccggaggagagccaacttggtggtcaatcggctgagtgggctgtaaaagtatatcatcgtgggcagggacatttggtgcggctcgtccttggccacaaaaaagtcgagttcgatgtccagtttcttaccgggacttatttgcaccattggcacatcctttcccgaagcactctggtgatgtcccgttgaggtcgcagttcgcctggaagcccgaatcaaatgccgcagcacatgaccatagcgggtgcacttgtccatcagcaaccggtgtatccacatcattccatagtttaatttgttttgaattttgtctatttaaaaagccggaatattcaaattgaacggaatacatgtgagcgtcagcacttggcattgaatgctcggggtgagtgatagctagttgccacttcagttcatcctgcactctgttagtatgcactgaaagaaaggcttcccaatttgtcagtcaatcgattagaatatattccatagcaaagctctatcgtccctctatcgtttaaatgtactcaagctgctccatcctatagaatttaaagtgtaacctctcatattggcaaaacaacaataaggtcctaattaggccaacatggaagggaattcaatccgcctgagacagaggccaagacgctacacatccttcccgactcccgcagttgaagtggctccattgatttggcagcatgcaattatcgaatgcattaggaaacgcatagtgcctccgcatagggagctcctctcacctggagccaccttcgaccatctgagccacccgcacttgtttgcccagacgttcgtttatcccgggcgaagcaaacagacaatggcgaagaggaaggcattcaggactcgccaatttgccatgttgaatgagggttcgcccaacgacttctacatcgggttaattgcttgccaattgatttcgattcggggaagccgtctgcaaaatatgcaaatatttttgggataattaaatgaaagtctattgcacaagccacccagaaacaagctacttggtactttgcaaagtgtacagttgccgcaaaacatttgacttgcatgttcacgtccaaattattaataccgaaagagtgcatgaatgaaaagccttactggcttagctcttataagctatgttttattcatgtttttataaggctttatatcgggcataagaacaacaaataaccttcaagcctttaaagggtacagttgcctcaatgcgtatgcaaatccccgataaaaccgtttcagtttgatgcctacgaacgctttaactaattcagaaaacaaaaatacgtgcattcatttttgatgccgcagatttatcaaacgaaatattaaatgaccgaaacggaatgaacctacgacaatggagtttgagtatgaataaatgctgaaaatggcaggggacacgacgaatggagatgatattccaggcatttgggcacaccaaatccccgtgtaatccccgggaaaatagggggaaaacagaacgagaagtatcgcaataaaatatgttaagtaaatacgaaggggggaaaaactaaacaataagccaaaaagtacgcttgattaagtttaacttccggtctgttataaattgagcatttatgtgggatttgtttgggaatacagtttctactttgttggccagatccccgaaaaaaaaatctatggcatccatccatcggcgtgccaaacgagacaaatgtttaggccaacacacacacacacgctgacacacacacacatgtccgcatgtctatttccggcggaagtggtgaataaaacatgaaacgaaataaaatgacggcccgaggcggaggaagaatggagaacttttagtggccaaaagtgaacatcctgctactgagcctcctgctgttggcagtgttatattttgttttgtttacttgggcgcaaatgggtgaattattcctgaaccagccaatcgaagggtcaactaaaaattaaatgccaaacattttatcgagcactgtaagcagtctgagcactgtggctgcatctctggcacttaatatccgtagataaaatattcaatttccccctgatgacaaacctgggctatagccaagtgaatgggagacagcagggattcagctgcttgaaatatggaagtataatgaaatgtttgccgggcctattgactttgccaatgaatatcccaagcaggcaattgagtcggcaaactgaatattataatcattcggtcgttaaggttccaattatagttattgccctgctattgcattcaagcaatccgtatttgaccataaactatgattcagggccaaaatccatttcgaaattgcttcattaacgagctgtggctttgctcaccgcaaattattttaccaggatttccgttttgaccatacattaaggagtcaaagaactaacttctaagccaacttaaaaatttttacattttacaaagatactcagctaaaattcttaaaacatccatatatttcgaaagtagtgatttatgtatctggatttttggaatagtttattgttggtaatgtgatttgaaactgttttagttaattggtcacttgtagtatttttggaacatttttaaatacaataatatccgacacacttgccgccgaaaccgtagatgggatcgcattggcatgtgctgggggcacagggaggacattggttgcaggagatggacggcggacaaggacatctgcagctgtcgcatttaggtctgcatcgcggaggattggcgtatctgcagaccaagtcgtttggtggatagcctagcttgacttccactttgggtggcggtcgcttcggttttttttcttccggtttcttctcaggcttctttattagcacctgggacacgctgctctcgaagatcgctgttttcttgggctcccggtcatgatgacccctcacggatgcctcctttctattggtgacctttacctgcacggtactcacgatgtcagattcggaatgcccttcattcatctccttctctactgattccttctggtcatatacatcgagatctgtcgaactgatattactacataatagttaaggggtttactacgaatataatatgtttaagctaaggagctttaaacacctaccttgtatcttcattcttgacaagtgatggatcttcctccgaaattgaggaaatgtctgttggtagtgatggctgggatgaatccttgtttggcacttgggaaggaggggttatactagtaggcagtcgggaaggaggtggtgtaccactgggcagttgggatggcggtggtatatcgctgggcagttgggaaggaggtggtatatcgctgggcagttgggaaggaggtggtatatcgctgggcagttgggaaggaggtggtataccactgggcgggctggagttcgattcttcggcttcgggtgagtccaccggaattttgaccttgatgatggtcttctctaccttggctttagggtcatcaaaatcgcgctccgtcttctcatattcctggtagacgatctcctcctttgcatctttagattcagttattggcacctccgccctcatcgacaccagtaagggctccagctcggaatgcctcatggctcgataaggaattgcatccttgtcttggacgtactttggttcgtaatcattctccccaaggcgctgagtttccgtcacgggaaactgggtgaccgactgaaccttttcgatgatcgtctccgtctttccggtgcgatgcttcaccttcatctcctttgtggtgatgtcggtgatcgctatatactcgggctcgcattcgtccatctcgtccgtttgaacgccgacttcgtgggttatgcaacaacatggtctggtccagtttggacaaggcggctgaaagcagttctgtcgattttgttggccacaacgagaaacacaaggagattgttgcgaacactgctgagaatattcttgggaaaattgctgagaatggtcgggcagagctcgcattggaggttgatgtccacagaaacagttttgaggatgctggaaactccaactctgaacagattcctgagaaagtatttgaggatttctttgggaaaaattctgaaaaacttcccgaggatctggtctgttctgccagcgaggacgtagatccgaaccacacatcagatatttctccgggaaacatttctcttggcagggcatcggctgattgggcaaacgaagttcataccgacaccgtggacattggcaggattcattcatcgctctgtagtccatcgtcctgaatcacaggatttgaatagcaattccggacaagaaatcatcgaacaacgttcaaataggattctaggcacccagcacacacaattttttcagtaaaacatcgaaatggttgttgttgttctttgtttacaaggcatacttcgctagttttcagaaaaacactttaaataaacataaaccagataaaagatatagctacatccacattttaatgcagaatggggatttaataggattaaaacaattacaggttatatagaatcgctttgattttattccatttaaaatcgaaaaataaattcaacaaattattcaatcatatctacctttgacatcaatattagttataaagctccacacgaaatccagttttttgtgaccacatgtctgactaagatcctgtttttttttttttattaacaattttctagaaaataaaattatagagtaaaaaattccgccacatagtgaatagccatgagtttccagaataagctggatgagtacaccaggaacttggacctggccaagtggtatatgggaatctcggcgaaacaggaggccacgatgtccacaatgtccgagagcctccgggatgacttcgagcagggaacaggggaaaagatgttcaaggcactgatatccctgggcctccagccggtgatatccaaaaagaagatcagccggatcgtgcagttgagcaggaacaacatactggccttcctgttctttgtgatggagggctactacaagacgaaacaaacggatggcgtttacagcattaatgagcagctgctaatgaatgccattgccaagatcgacatgttgcccaccattcgtgctctggacattgtgctgccccagcctccggtcaaaaaaccggatcctcaaactcaatcgttagcttccctgaccacggagcgtccacaaaagaaaccctccaagaagtcgccctactttctaaggcaaccgaagccgg

SEQ ID NO: 20795 - DNA, 2517 bp, DROSOPHILA
atgaatgaatcctgccaatgtccacggtgtcggtatgaacttcgtttgcccaatcagccgatgccctgccaagagaaatgtttcccggagaaatatctgatgtgtggttcggatctacgtcctcgctggcagaacagaccagatcctcgggaagtttttcagaatttttcccaaagaaatcctcaaatactttctcaggaatctgttcagagttggagtttccagcatcctcaaaactgtttctgtggacatcaacctccaatgcgagctctgcccgaccattctcagcaattttcccaagaatattctcagcagtgttcgcaacaatctccttgtgtttctcgttgtggccaacaaaatcgacagaactgctttcagccgccttgtccaaactggaccagaccatgttgttgcataacccacgaagtcggcgttcaaacggacgagatggacgaatgcgagcccgagtatatagcgatcaccgacatcaccacaaaggagatgaaggtgaagcatcgcaccggaaagacggagacgatcatcgaaaaggttcagtcggtcacccagtttcccgtgacggaaactcagcgccttggggagaatgattacgaaccaaagtacgtccaagacaaggatgcaattccttatcgagccatgaggcattccgagctggagcccttactggtgtcgatgagggcggaggtgccaataactgaatctaaagatgcaaaggaggagatcgtctaccaggaatatgagaagacggagcgcgattttgatgaccctaaagccaaggtagagaagaccatcatcaaggtcaaaattccggtggactcacccgaagccgaagaatcgaactccagcccgcccagtggtataccacctccttcccaactgcccagcgatataccacctccttcccaactgcccagcgatataccacctccttcccaactgcccagcgatataccaccgccatcccaactgcccagtggtacaccacctccttcccgactgcctactagtataacccctccttcccaagtgccaaacaaggattcatcccagccatcactaccaacagacatttcctcaatttcggaggaagatccatcacttgtcaagaatgaagatacaagtaatatcagttcgacagatctcgatgtatatgaccagaaggaatcagtagagaaggagatgaatgaagggcattccgaatctgacatcgtgagtaccgtgcaggtaaaggtcaccaatagaaaggaggcatccgtgaggggtcatcatgaccgggagcccaagaaaacagcgatcttcgagagcagcgtgtcccaggtgctaataaagaagcctgagaagaaaccggaagaaaaaaaaccgaagcgaccgccacccaaagtggaagtcaagctaggctatccaccaaacgacttggtctgcagatacgccaatcctccgcgatgcagacctaaatgcgacagctgcagatgtccttgtccgccgtccatctcctgcaaccaatgtcctccctgtgcccccagcacatgccaatgcgatcccatctacggtttcggcggcaagtgttggcaactagctatcactcaccccgagcattcaatgccaagtgctgacgctcacatgtattccgttcaatttgaatattccggctttttaaatagacaaaattcaaaacaaattaaactatggaatgatgtggatacaccggttgctgatggacaagtgcacccgctatggtcatgtgctgcggcatttgattcgggcttccaggcgaactgcgacctcaacgggacatcaccagagtgcttcgggaaaggatgtgccaatggtgcaaataagtcccgccgattgaccaccaagttggctctcctccggctgaagctcctttgggactgggacttctccgagcagaagttcattgagaattcgagccaggcagccgccgtttttacggacttcgtaaggcgccgccgcaatcggaatgtggagcgatgcagtacgcctatgggtttcaagcagatcaagcacgatctgttggatgatccgcccgactggaggctcaaaatgatgcgcttcgagaaggagcacttccggcgggccattccgctcaaggtgcagctgctgcggcactacgaccatcgtttcgccttcctggacgtggtcttcgtggccctgcggagatccaatgactttcgctcgccggcggaacttagtgagatgacggagctgctaaaggagttcatagatcccgctcagttaagggtgccccatcccctgatcttcgccgaggtgttcatgcgcttccgacgcgactattccgtggaaccctcgagaatgggcaatgtgcaggacaacagtcgctgcatgggccagtggctcgtctccacgtacaaggtggtgcgtttcgacatcctcaaccagcacccgctgttcgatattcccgagttcgaggagtggatgcctccggtgctgtccaggatgggtcgcagctttgaatag

SEQ ID NO: 20796 - protein, 838 aa, DROSOPHILA
MNESCQCPRCRYELRLPNQPMPCQEKCFPEKYLMCGSDLRPRWQNRPDPREVFQNFSQRNPQILSQESVQSWSFQHPQNCFCGHQPPMRALPDHSQQFSQEYSQQCSQQSPCVSRCGQQNRQNCFQPPCPNWTRPCCCITHEVGVQTDEMDECEPEYIAITDITTKEMKVKHRTGKTETIIEKVQSVTQFPVTETQRLGENDYEPKYVQDKDAIPYRAMRHSELEPLLVSMRAEVPITESKDAKEEIVYQEYEKTERDFDDPKAKVEKTIIKVKIPVDSPEAEESNSSPPSGIPPPSQLPSDIPPPSQLPSDIPPPSQLPSDIPPPSQLPSGTPPPSRLPTSITPPSQVPNKDSSQPSLPTDISSISEEDPSLVKNEDTSNISSTDLDVYDQKESVEKEMNEGHSESDIVSTVQVKVTNRKEASVRGHHDREPKKTAIFESSVSQVLIKKPEKKPEEKKPKRPPPKVEVKLGYPPNDLVCRYANPPRCRPKCDSCRCPCPPSISCNQCPPCAPSTCQCDPIYGFGGKCWQLAITHPEHSMPSADAHMYSVQFEYSGFLNRQNSKQIKLWNDVDTPVADGQVHPLWSCAAAFDSGFQANCDLNGTSPECFGKGCANGANKSRRLTTKLALLRLKLLWDWDFSEQKFIENSSQAAAVFTDFVRRRRNRNVERCSTPMGFKQIKHDLLDDPPDWRLKMMRFEKEHFRRAIPLKVQLLRHYDHRFAFLDVVFVALRRSNDFRSPAELSEMTELLKEFIDPAQLRVPHPLIFAEVFMRFRRDYSVEPSRMGNVQDNSRCMGQWLVSTYKVVRFDILNQHPLFDIPEFEEWMPPVLSRMGRSFE

SEQ ID NO: 20797 - DNA, 3725 bp, DROSOPHILA
tccttgacgccgcgatgtcgcttacaatgcagtatgaatgatattcgatcttttatgtgatttccgcactcctcacaaaagaaggtcctattggagtcgcggggatttcgacgatttctcctttttttgggattctcagagtctgatttgagttcctgctttgcatctacttcagtatcgctttcgtaaataaggtaatccatttcactataatcaatatcgtcctcattattgggctcgtcttcgttgattttagattcatttagaatgtcctccactttaaaaccggagctttgaatgggcccttcattgagatcgtctaatcgctcgacttctatgcttatttctgccagatccagttccaactcctcctgctcaaggacacttttgggagattcctggcagattctaaggaagtcttcatcatcttgggaatggagcaactccctttggacttccaaacagcgttccctaaaggatatggcttgttgcaaacaagtttggcaggacgcacatagtcgatttggcaacgtactacagttctttaactgtaaagagaaaaaactttagaaagttaaagacactacgcattattatcctctcaccacagctccagttagtagtttgatgtgttccagcgtagtttgattgcgcttttcaaaaatattcaatgatctttcagcattcgtgcgcttgccgcaagtgcgacacacttttccttccatttttgagccgataaaaaagtttgaaacgccaaactttttgtaaacaatgctatgcttgtcaatcagctgttccgtttgccattcgcatggaagcaatttttacagatgaaataaatgctcataagttgggatttgaagttttgatttattattcaatattaagttctacatattacaattggtttgttaattatttgcagaaatgctccttggctgtgcgccattgtcggtctagcattgcctgtaattgctatgtatatattataaggacagctttagatgtgcaggctgtcctcctcctcctccttgagttcacgtttctgctcctgctccaggacctgtttcatctcggctttctccagatgccgcttgtgtacgccagaccggaagtgggtgctcaggtgggtgggcagcataaaggacttgtcgcacagctcgcaccttgaggggaagattcagtattagatggcatttcaaacatttcagtaactgtaccagtatcactagtttcatattattataagaaattattataagataactaaatattactcacgaaatttggcaacataagtaatatttagttatcttaactctcataaggttttggaaaactcttgtaatgccgcataatatgatcttagaatttctaagaaacctagttattgggtttcccggtactgtgtagctgtatgactcaacgtacctgtaggcccgctcgccggaatgtatcagcatatggttcttaaggatgtagccggtagtgaaggccttgccgcaagtaccacagacgtaggggcgctcattggtgtgggtacgctcatgcttcacgcgcgtggtgtagtctgtgaagcagcggccacagtacttacatgcaaacggtcgctctccggtgtgcttgcgcatgtggcgtttcagctcggaagttgtgcagaagcgcgactgacagagtctgaaaataaatccatttagtcatactgtatccaaaaaggagtagaaatgtactcactcgcagccaaattgcttgtccccacgatggcgacgacagtgaagttcaaaggccatgcgtcccttgatgtgattgccgcactgctcgcagatgtatactccgccggtgccacgacgacgcgcatcatccgaccggacctttggctttggcggcagactacacttcttgacgacaatgttttcatgctcgtactcatcatccagcacgttgtcaagaacggccacctcatcatccgaatcgtagacgtacgcgtcgttgacgtcgcccacaattagctcggtgtcttcgtccagctccaacgtttgctgctgctcttcgtcttcggccattatggaatcatagtcggcctcttcaatcaaggaggctgcgtcgtcctcgccggcgtgtccctcggccacctcgtagtaggtattatcgtactctaccttggtgtcgtcgatctcttccttaggttcttccaatacgatttcctgataagtggcatagacctcatcatcgtcgggcgtcttcaccgtctggacaatatcctcgcccatgacagccgcccggtagaaggccgagatgccttggcgttgctcctcggtcaatcccaagagtagctcacgctgggcggcgatgcagcgctccctcagcttaacggcggaggccagttccatgctgcagcattcacatatctgatccggcaggcaaccgtagttctccagctagattaaacaccaataaattaagctataactacataaattccataaagccgcagtgaaaaatttacccgaaggcctgtgagcgcctcaatgttgtcgatcatctttgtgttgctccgctcgaataacttcggcgaccgcttgttgcttgcatactttgcgcatacgcggcaggtgctctttaggtgtttcagcgccgatttcgacatttttcattcgcaatccgaaatgaaatcgtttttaagatatttgtgaacacaaaaaataaacgcgtcgcttgtcaactgcatttgccattcacccggtgtttcgtgttaatatttgccattcgccccgaaataaacatattttcagtggcgtaggcaaaggggttcatatgatgccaaaatatatatatatcctcgaaaatgaattactttgttaacgttagtattatatattgctttgatatttaacggatttgcatatttattatactccaataatatcacatataaatttgaattaatttgttttataattttaaatttataaaattataaataaaatcttttatttaaatctttaaattaaatcttttttataaattaatttctatagagctgcaagcgaaacgaaatatatacagtagaacaggttctaagctaaagtccctggaattagtacagtttctttggtgtatttcatccctgaccggctacgtccatgtcatgttggcaagcagctgtcaggaatgccgacaacaacaaccacgacgctatggcgaacttggaatggtaatttatttattttcccccgaaaataaacaaataagcattgataaccatttctcctgactgcagggtgtgcgtgccgcgatgctacgaggtccggaagaattgcctgactgggcaggccacgctggagcatcccctaaagcagcggacggtgacggtgggtaaatggtacaacgcccttatctgtaagtgattttaatgaaagaacaatctccaccaggtggtggacagcaatcccttgagccgagctctagagggcacagatccgctctcgcagtttgcacgccaagatgatgagctcaacgatccgctcagtcaaatggtcagcgaattcgtaagtagagtggtgcaccggcaaggaacatgactaagtttttcgcacttggatgttcaggatctcaagtcgaagcgtcgtgaacgggaccgaacggagcccgaggacaacacactgcagtggagcagccgacgactaggcatcctcaaccgctttacaaccaatgagaagctatcg

SEQ ID NO: 20798 - DNA, 1335 bp, DROSOPHILA
cagttgacaagcgacgcgtttattttttgtgttcacaaatatcttaaaaacgatttcatttcggattgcgaatgaaaaatgtcgaaatcggcgctgaaacacctaaagagcacctgccgcgtatgcgcaaagtatgcaagcaacaagcggtcgccgaagttattcgagcggagcaacacaaagatgatcgacaacattgaggcgctcacaggccttcggctggagaactacggttgcctgccggatcagatatgtgaatgctgcagcatggaactggcctccgccgttaagctgagggagcgctgcatcgccgcccagcgtgagctactcttgggattgaccgaggagcaacgccaaggcatctcggccttctaccgggcggctgtcatgggcgaggatattgtccagacggtgaagacgcccgacgatgatgaggtctatgccacttatcaggaaatcgtattggaagaacctaaggaagagatcgacgacaccaaggtagagtacgataatacctactacgaggtggccgagggacacgccggcgaggacgacgcagcctccttgattgaagaggccgactatgattccataatggccgaagacgaagagcagcagcaaacgttggagctggacgaagacaccgagctaattgtgggcgacgtcaacgacgcgtacgtctacgattcggatgatgaggtggccgttcttgacaacgtgctggatgatgagtacgagcatgaaaacattgtcgtcaagaagtgtagtctgccgccaaagccaaaggtccggtcggatgatgcgcgtcgtcgtggcaccggcggagtatacatctgcgagcagtgcggcaatcacatcaagggacgcatggcctttgaacttcactgtcgtcgccatcgtggggacaagcaatttggctgcgaactctgtcagtcgcgcttctgcacaacttccgagctgaaacgccacatgcgcaagcacaccggagagcgaccgtttgcatgtaagtactgtggccgctgcttcacagactacaccacgcgcgtgaagcatgagcgtacccacaccaatgagcgcccctacgtctgtggtacttgcggcaaggccttcactaccggctacatccttaagaaccatatgctgatacattccggcgagcgggcctacaggtgcgagctgtgcgacaagtcctttatgctgcccacccacctgagcacccacttccggtctggcgtacacaagcggcatctggagaaagccgagatgaaacaggtcctggagcaggagcagaaacgtgaactcaaggaggaggaggaggacagcctgcacatctaa

SEQ ID NO: 20799 - protein, 418 aa, DROSOPHILA
MSKSALKHLKSTCRVCAKYASNKRSPKLFERSNTKMIDNIEALTGLRLENYGCLPDQICECCSMELASAVKLRERCIAAQRELLLGLTEEQRQGISAFYRAAVMGEDIVQTVKTPDDDEVYATYQEIVLEEPKEEIDDTKVEYDNTYYEVAEGHAGEDDAASLIEEADYDSIMAEDEEQQQTLELDEDTELIVGDVNDAYVYDSDDEVAVLDNVLDDEYEHENIVVKKCSLPPKPKVRSDDARRRGTGGVYICEQCGNHIKGRMAFELHCRRHRGDKQFGCELCQSRFCTTSELKRHMRKHTGERPFACKYCGRCFTDYTTRVKHERTHTNERPYVCGTCGKAFTTGYILKNHMLIHSGERAYRCELCDKSFMLPTHLSTHFRSGVHKRHLEKAEMKQVLEQEQKRELKEEEEDSLHI

SEQ ID NO: 20800 - DNA, 12929 bp, DROSOPHILA
acgtttttgcttaaccttgacgaggaaccgacaaattttgtattacatttctgtgcaattaaaagttataacgtttgtggatatgaataaaaattttaccatacctacgtaggtgataaacgcgtacttagtagatggtttcattaaactaaaacaacatttttatggtgtttgtaaaagcgcaattttttaatgcgtttactcaattatttattgcccaggcccgtttgccacagcccatttagcaactttagctgtgcgttaccaactatttatatgcgttaccacatttgaaattgtatgagacagctggtattacaaagagtatatcttattaattcacattgtagcactggtgtaaaagtggcatatacattgaattacgaatgagagtgtaaaaatacggtgtacatttgtgtattcttattatttttggtagttttaaacatttgaggcatttctgtcgtttgcaatttacaaataaatggctaaaaactatggctgacgaatgagaacaccaaattgaaatcaacgaacttaagcgaaagctatatgaatatcgaagttacatgtgagatatatcaccgtgtatgtatgcttacgtaaatatatatatatatatgattccaaatgggtatttcttgatcaaagatactaacgattttctgaagggtccttaaatatttacgagtaattcacctttttgttgggtgaaactatttagttattaaacttgtacaaaaataaaaataaaattttgaaaatttcacaaactttgtggcaaataattcaacaatatattgtaggtctattacgatataaaatgaattggcacttcatgtataaatatgttattaaaaaatcaaaacataatataattctagtttattcaaggccctaaagagaatggtttttacttttgagatagaactacccatgccggagatgcgtgagaaaaatgtataaaaagcttagtcggcagtctagcgtttcctccaattcagaaattcgtctccttgaactccttggattgcagtacaggcgaaatagctcccccatcgccgttttcatttccattattgtgctcctctccgccgcccaccgtgtaggccatcacagtggcatgatccaatttcccgggcaatgctacaaaggcgctgctgtccaccacacgcttcctggccgcgcgatgctgcatgcggttcagttgcacctcacgcttggcgccatctggtcccgtagagagtttatagaagagttccctttgctccagggtcttcctcctggctgacgttatcatccgtacaaaatcgataagcaagtggcagagcctgcgtgccgatacgcagggcgaaaacgtgccgttgatgccatagctgagcagatcctctaagcggtagagggtaagagcatgccgctggggaccggtaacaaggggcagtcctgaaatggacttcggaatgcgttggggcaccaccgatggcggtggagctgataccaatccctggcgtggttcaataagcgtttgggagcgcatatactttggtcgactaggcgcattattaggcggactttccgccttggactgacgagctggtcgcgtgggcggagtcgaaggatgcagacgggcatagatggcggatgcactcttgttctgccgtttgggtgccaagttggcgggcttgacatgtcccgacgtctgaagcttaacatccggagtccaggcttcggcaaacttgcccacaactggatcgaagttatcgctgattccatccgacgttaaaaagactatgtctccactttcaatgcaggtcatcgagaaggttagattgctcagctctggcttgttgccatccgccggtccaagggcacccaacgcatcgcgcatgtccctcatggaactgatgtcgtgggatgcctgtgttagttcccgtactccgtgcttcttggagtacacatagcccagggaatcgccaacattacacgagcacacgacatatttccctggcgctccgtccagcggcagcacaacggctatggtgagagtagatagggctcctccaacttccaggatacaaccgtgtccctcccaaagactacgcagcaaactcacaaaaacctcctgggttgtggtggctcggcactccagcgcctgtccgaagaccgcccggtccagatagtccaaacaaccgtgaacagctgaacgggcggccagacgagcgccatcaccccagttgacaccatctgccatggccatggcagctgagtctccgcgcactaccattccgtagcagtcggcgatgggattgcccatgggttctttagtcagcatgttggtctcgtagagggacaccgagataccatatgcgaagtcgcactccatgcgccagttctccacgccagcgatcaaagctgcgggatcagagccaccctggttgcttacagcttcgcggagcaaacgttcccgctctgagttgggatccccatccgtcgagacctcagtctttgcatttaacacattcctattgttctgatcgctgttggcttttccagcatccgtgccagcagacgcagcggccagattggctatgctgcttttggaattcttgcgggaacgcattcccgacgcagaagcagatccggagggctgctccgcactgctctgtctgcgaggtcctgccggcggccgtccgaatttgctggtaagtcgggttgagttctgtgtggccacctgaactggtggtgtactcctcctaacgccatagcaatcatcgttctcctgctgcgtatctatgaagtcaatgtcatccgcgaagctggtgctcaagtgcagtttggagcgcttgatgccggtgagcccctcgtcaggacctgtgcaggcggctgttatagagcagtttccagcttcgtatgtatccaacttgagaacgggcatgtccgtgggattctggccattgtaaatctccggaccctcaacaaactgacgctgcattcggctgtcggtgaaggtggtcgggtaaatatttgagcaactttcgcaggctactaggtttctatttacttacccctccagatatttagttatgaagctaccatcatcatcctcgtgctcgctggcccgccggcgaccctcgcgaggctccgcgatgaagctcaactggcggaagtaagtggtgactttctggcgcagcgacggcatctttagtcgagttgctccctcctcctcgccagcagttctcgccctccagttagggttctcttaattgccagagatggaggggctaaaaaatggatgctgggatgctgaccagttcgttcacctcatcagtggcaattgttgtgggagtcgagtcactccaaacgaatccagccgccgaccctgcaaagaggtttaatttagagcttcatttaattatcaataaattatgcaattaaatgggactgggcaaacacgaaagaattacaagcaaattgcataggcagccgcataactgacattactccctcctttcaaccgcctactcctaaatgacgagatgtgctttttagttgccgcaggccctgcatcctttccctggccacacaaaacccttcgctcatcaggagcaggatgtcagaggagaaatcccaccctgtgaatgggcttttacccagctcattgcgaatgcagtagacactgaactgatgcggacacagaaatcccctccttccttcggggttcagatgacatagcttttagcagggctctccgcatgtgttctgaaccagagatgccaatttggttctttgctcaactaattttaaattgtttatggattaacttatgtgccaaactacttgcctttcaaaataaaccatttataaaatcgaacgcaataatttgggacttgatttatcacaacatttatttatttatattaaacccttttcaggatcaactttcaaatagtcctttagcatgaattaagtaactggcatcactgatgtgttgatgattaatgaatggacaaaccaactgcctggggcgacctgcaactccagcagatgttgggttttcggattctgacagcatcaagttcggtttcaatggaaagatgatatcatataggggtaagtttgccggcgagaaacacaccaaggtctgctgtacaattatgtatctaactctccgccgctatcgcagacgacatttaattgccgtgttagggcatttaactacctgatccattctcgtagacaatgtaacgccaagacagccttcatttcggcgagattacaatggatcgcaaacacaataaatgctaatcttcagcagcaattgccgtggagatgcttttccttagacgatgtacacaaaacgatttgtataaatgataaacaacaacaaaaaagtcggcacggaaagtagtttcgttgatgggggcaattattcaagataccccccctcccttgttgttgctgaaattttcacaaatgcttcaaagatatatataaaaagaaaaaaacacaatcaaccactttaatttgtggcataagtacttcaagtgacaaatgagtggtcaattaaaaactatgtcgattaacggtgaatactgtgggtcggtacgcctctctatgcgcttctcataaacggcacttaacggcacgcgaaaatcgcatgaaccctgaaccaattgttcgagtttcgatgaacttgaactgcactcacgaatcaatcagcgagtaatgtaattcaatttcaatctgatggccccaagatgcgcgatttcttggcaattgctgggcactgatccgattgccaccacacccgcattccttgcggcaaagcattaaaatcaaattaacccacataaccattaagtgcaggagtgggagatttcccattaccatatccacatttcccagatacaaatcaaatgaattgaaaagtcagagccgcgagacaaagtcgatcgctggacgaaagggatggatagctgagtgcccatgtggttataaagatatatctttctgtggatgcattgaggcgcggccagctgtgtgcactcgtaccggtccagggcaatcaatacggatgattgaaaagcccaccttcacatcaccacaaaacaattcaatttagccacaacaatgtgcagcttgcgattaaatgtgcagccaaagagattacaactgcaccacaagagccaacattgaagctcagccacaagcgttttgtagttcccatctgcaattgctccaatttctttacgcctcctccagatctgctcatccacgtcaatcagagtcgtcatcacttgacacacaataggcatctgactgtgacttactggcttctcaattccctcagctttttcgcttataagtgtccattgtgggatctcacaaattatttaagttctgacttttgtccacctgacggcacgtgccgagaataaagtataggttttatagagatggaaaaatctctggattgagaagtaaactcatgtaagatgcccgtagcagccgttttgtttacccatgtacatatattattttttaatctttaattgcattttatgtatgtattcaattgtatatgaaatgacactcccccaaacattaaacaaacaattcttcgaggcgtgtgccgcaatcaatcgacacttttcgattggatttcgggaccatcgaaattttcaacacttgaaactaatcaagcgtggaaatggggaaataggaacgcggtgctgtgagatcattgtgcaagatctgggtggggcgatccgtggtgtataaaaacaactgagtaaatattatcggatgtggcacagatctcgtgagtctttcgaactttgtttatgctcgaaaaccaaaataaaccatttgcgcttcctccaaccaaaaatagttgtgttggcccgtatttatagctgccgcccgtggaaacaaaaaatgtctgggtgaatttctcgcttgaaaaactcatttgggcaaggctttgaaatgcatttcccgtcgcattcgaaatcagctaaattttctgagctaatcaaatgcgcaaaattattgtttacacactgggttaattagatgtggagattggtttctctgctccgcttcgagattcttttgtgctctttcggctttgtgcatacttaaaatgtgtgtggatttacgagggagaagtgctaaaacccaatgcaaacaagtctgctttggggtccaaccaaatgctccaaccaaatgcaaacacacccgtgacattcagagtctggatgcacttgaggcaagtgacagttgtctgcagattatgtgctatgtgctgcatattgtggaatctcaaggtgcagtcggtgggccaaagccgcagtcaaagaaaaagccttaacagcacaagtcaagtgaggctgctcaaagccgttttgtgtgcttctgtttgggccagacaacaaacaacaagaagctataaaagcagagagtgaaaatttgttgcattcattgcgtgttttcttcgaaagaaagttgaaggccatcgttaagctgtagattaaatagagctgtctgcttgattacgagctcccaaatatttcaatcatttcgagcgacccactttatgtatattgcttttgtagcgagttccctccttaacgtataagttgtgtagcttaggtattctaagaccttagattagatgattctcccttatgggaattataatatatgaaacaaaaccgtatgcacaaaccacatacacgcgtcaagtgctgattcaaccgcagtcaaggcaatcttggataggaaatgcatgcttaattttcatttcctcatatgcaatttttctcatttcaagtccaggctgatcaagccgcataaaaataaaatattaagtagcaaatgcattaagcaaaatggacggggttccccaacccagagttttaaactgacaagcttttggcttaaaccttcccccaatatttgaccatgtgttgactcattggacaagccgtcagctgcattaataatgcattagaccagccccaggacataaaagtccccccatcgtgctaaagtgggcgcaacacggcctggggcttcatgaaaatctggcaattaaaatgttttacattatgtaaaccgcacgaaaacaatcactaaagagttccttcacctcgaaatggcgtcgtgaatatgaagcgatatgtatgatgtgggaaacaaaggaggagttgaggagtctcttcccggttttcgaagcatttcttataaattgccacctaattggcgtgttcaacattgtgactgtgcgtggtacgcctcatttcctgttgcaacaatttgcattaatagagggtctcataccacagattcagttcgagatctccccatccgtatgcgaatgcgaatctattccagtgaatgcatttcagtaccattcaattgaaggcgcgatgaaatggaaagttaagatccctttggaggattggatgtgtgtcagaagttgagaaacatcctttgttttatgtgccttccatgtgcattcgcacttaacgccaatgccaggacctaagagcacccaaacccacccagtttttccccactgcatttccgcttgcatgttttcccttgtttttccgcttttcgggtcgcgccacttggcccgcttttcagccacgaaaaactatacttgaagaacttgccacacgccgaatacaataaactaaaactggggcaaggcgaaataattcgggcctagaaaggcaatatcaaaggagtgccggagcttatgtatggtataagggtaaattacctttcggacttactgggtatatagcatcaaaccaccctcacacaaaacatttagtatgattgtttttaaagccatataattacggcgaaggaaagccattcccataccattctactaattggttgattttttgttggatttcgcaaacatctggcagaaaaattgatgccgccaaacaactccacacacatttggcaagcccacaagataatttgcataaattgaattgaagtctttacttgttggccaggtagcgacagctgtcgtcggtttatgtaggacttatatacgactaatcctgcatgaataaattaaatgggaagcctcaactaagtctgtctggcggcggatgggttttgggtttggcctctgccgaagcctttgttgccaagcatacaaatgagttgaatccaaactcctgggcgctgtcactctatgcaaatctagaaaaccagtaaccagttgttgtaggatggagaaggcacggtggacggactttcggggcgctcaactcacatattaaattaaatgttaatggcaacaaagacaattcaaacggagtcaaggcccgggccaaagaactgtggctaacaaagaggcaaacaacaccaatttctcgactgccccgcagcaattgagcaaccaacgagccactttgttcgccccatataccccgcccacatcccagcccctgtccacccgtgaaatctgttctccacctccagctacctctagataatattgcactgttcggtgtcaaatggctgcccactgacggacttcttggtttgtcaggtgccatggttattccacctacagtagaagctcttgaaagtggaatttctttctatctaataataaaagataattgccgagacagttttggttaaaagtggtcaaagtgctcaaagactctctatcgtcggttatgtacgttaatcatattagaagtaagtgaaaatgtccccagaaaggacgttcattacaaggagcccctactgtacaagaccttgcggcgggttaagtgaccgattggctgtcagtccccagccaaccaacctcacctctcggacttctagttttaatttgaatttcattccgtctcgtgtggtggccaaacgctttggtggttcgcttagtcatatcactcggctgactaatcattgaaagcggagcgtgcttggagggaaaccttaagccccagatataccccccttctaactccaaaccatttaccgaaatctccaccccgccaaaaccccacacagctgcaaattcaatgaacctttgctgctgttgactttgctgattaattggaaattggcaaaatgttatttattttcgcgcggctggtctagcgccaaatggttgtttttcatcaaaggcataaagttctataaatgttcccagacaaattggttttaatgagccggaaactttttcggttgagctcggatttttacgggtttggcggatagaaggagaagccacatattgtacccgattggctttaaacaaacacggacatactatactgagacaacttcttcagtggctcgctaatgcattatacaagaatgaactcctttgcaggcacggccgagcaaacaaacttcaacttgtccggaccaactgcgtcataaaagagccaacggcagcgccaatcgccatctccgtttccagcgagacaacaaaggatgttgggcgccgggaagcaggaggagcaggacctgggaaaccagccagttgtggatggagcgcagacagaacaacttcatgcaaccccatcccctgggaaccagacggcagccaggagtctgtgtgcctgatccttgccatctcgaaacgaaaaagaagccggcgaaaaatatataaaatggagaaacaaaatattttcccgatgtgcatgcatagttcaaagttagtttcaggcatctgtgcaccaccaaatacaccacattccccactacttacaagcagaattgtgaaaattttttggttgccaagcgaaagtgattgaattcctagggattttgtcgggcgccagttgaaaaggaatttttgatgcgtttaagtgccgaagtttccctaaaaaagtttggccttagagtcaggggatgtattaaaaagaaaaatgtcgaaagtttttgaaagaagagattaacaatgatgtgtgatacaatgattgtgtgttttggtctggagaatttaaatctcaataaaaaactacaaaatgtatattaatgaggctaacgatggttatattatgcaaacaagtgttggggggaatataattatttaaaataattgcatttttttgcgattcccactttgcaattctaatccctaataaaactagagataacttatcttatgaagcaatttgtttactactgcgactggtctacagaatatactgatgcaatcgctttagaagtgtggtaggtaatcccgttcgttctcagccggaaatcacccccaataagaagtttagataatcttagatacggtatctgcttgttgtttgccacatgcatctacaccctggattctaaacttagttcccccaaaatatctgaccgagttgtcccctttaatttacagcttatatccggcatgtttttctcccgtttgaattttgccacagtttgcgccagaagttgtgaaaagggcagaaagagaacgagttgaaagttcccattagaatgcccaatccaagccatcctgttcctttattgcgtggccccttttttttacattttccgtaattcccagccaggcaccatcacgtgtcgggttttctccaaggtattgggcttcgtggagaatcgattttgtggcctgacgagcctgttatccttggagcgagcgcttttggcttgtttcaggacatagaaattgcctgctgcatgtccgaaaggctcaacgagaaattatgctagctacactgaaatctaaacttcagttcaaggaactcaggaaagaaaatactattcagaaaatgaagtttttatgttttaaaacttttataacagtttataatattattgatacgatgtcaatattttatatttgttttagttcggtaaaatgaagattatcatgaatttttctcagtgtgcgaatggaggtgagtgcgaaaacgagaaggaggaagcatccatcacatgcatctgcagttggcaggcaggtaaaaatgttgtacaaaaaatgaataactgacattttaagtgggaaagtttttgcatcaaaatcaactgcctgccaatgctgctaccgaaattcaatatattaacaagtgctccgtaattgtaaattatcgccactttttacagtcattactattagtaagtttataattatgtgggtaacaaagcggtaaaatatgccaaacgaaaaacaacaccagctattagcacagtttcgaaatacgataaagcttgaaaaccggttattgcaccaacgaaagctgacttttgttgttcttgttttgtttgttattgttatttttgctagagcagctgagatttcgcagctgcccgtgaagttgaaaacaaaataagagaaaaaaacaaacggcaggtgaatcaacagcggttcaagcgcccaacccacccacaagtttgttggaggggggacgacgacgtaaaaaacagaataataaagacgtaaacccagttaaatggaaaaatcaaggcgaacgaacacacacggaagcaaaagcacaaaacaaaaggcgacaaaaacacgtcgaaggcggcaaaaaaatttggagaacccaaaaatcaatagaacttcgaaatatccataaccatgtaacacagtgcacattcacttacaataagtgtgccttcctcttctgggttgttttcttatcgctactttacatatgttggcgccacttgcaatggggaaatatatgtaagtgcgtgcgttccgttggtggtgtgtataaatatttaacatttgccggagggtggttccatcgcccagaacttcggcttctgcatggaatactaacataaatcgcgctgcacagtccacttttgtgtgttgcacttcgagtcccaatggttaccaattaatgtcgctacgaaatggaactgctaacgactgtttccgccgcggaccgacgttcctgcttcgatttgaaattcgaagtgaattggccaagccaagcgatatttgtggtaatcgaatcgtcgatatgaaacacactattctatgtgcaaccaaccgagttggcagctcccagcgcgatttttcagtatattttgcagtattttaattgttgcagacggctttttaaagcgccaccagttcgttcacattgtcgctatttttcagcatttcgcgggatctgtattttttataggcgaatattgaaatttgcatggtctaacattgattatagtgttgtattcaccgaatatttattggttttactgtccattgctttgaaagcaatagaaataattgaggatcaagtaagtttaagataaattattacagttaaatgccgatgcaggcactcacgcacactaacgcacccaaaacagcgacacgcgaatttgcgaatttcgttttggcccgttgtttgtgtgttgttgctgttgttacaacgttgtttgtgctaaacattaattaattgtcgcaatgtctgtttcgctataaatatgcgaaacgtgccgttgttatttgcgcgaaactaaatggccaattgcgctttaccggtgttagtgtaggtgtatgtgttgtctgtgtgtgtttgtggttgctggcgcgggcgaatggcgggtaatccgcatacactcgcacttattttttgcaaagggtttatgcgacactcgctttgatcacgatattaaaagctcaaacaccactctaccattatacaaatatttatttatgtaaaataaatgcggttaaataatttaccttagaacttgccctaaaggatattaagtgcaattaaaagtagaacaaacattcattgctaagttactaaatgaatagcattttcttttgcaaacttgttcattataaactactccttcgaatatatatttacttagtatattttctgtttccacgactttgtctcacacataaacacgtaaaagcgcgaaacagacac

SEQ ID NO: 20801 - DNA, 2426 bp, DROSOPHILA
aacgtcggtccgcggcggaaacagtcgttagcagttccatttcgtagcgacattaattggtaaccattgggactcgaagtgcaacacacaaaagtggactgtgcagcgcgatttatggtcggcggctggattcgtttggagtgactcgactcccacaacaattgccactgatgaggtgaacgaactggtcagcatcccagcatccattttttagcccctccatctctggcaattaagagaaccctaactggagggcgagaactgctggcgaggaggagggagcaactcgactaaagatgccgtcgctgcgccagaaagtcaccacttacttccgccagttgagcttcatcgcggagcctcgcgagggtcgccggcgggccagcgagcacgaggatgatgatggtagcttcataactaaatatctggagggccgaatgcagcgtcagtttgttgagggtccggagatttacaatggccagaatcccacggacatgcccgttctcaagttggatacatacgaagctggaaactgctctataacagccgcctgcacaggtcctgacgaggggctcaccggcatcaagcgctccaaactgcacttgagcaccagcttcgcggatgacattgacttcatagatacgcagcaggagaacgatgattgctatggcgttaggaggagtacaccaccagttcaggtggccacacagaactcaacccgacttaccagcaaattcggacggccgccggcaggacctcgcagacagagcagtgcggagcagccctccggatctgcttctgcgtcgggaatgcgttcccgcaagaattccaaaagcagcatagccaatctggccgctgcgtctgctggcacggatgctggaaaagccaacagcgatcagaacaataggaatgtgttaaatgcaaagactgaggtctcgacggatggggatcccaactcagagcgggaacgtttgctccgcgaagctgtaagcaaccagggtggctctgatcccgcagctttgatcgctggcgtggagaactggcgcatggagtgcgacttcgcatatggtatctcggtgtccctctacgagaccaacatgctgactaaagaacccatgggcaatcccatcgccgactgctacggaatggtagtgcgcggagactcagctgccatggccatggcagatggtgtcaactggggtgatggcgctcgtctggccgcccgttcagctgttcacggttgtttggactatctggaccgggcggtcttcggacaggcgctggagtgccgagccaccacaacccaggaggtttttgtgagtttgctgcgtagtctttgggagggacacggttgtatcctggaagttggaggagccctatctactctcaccatagccgttgtgctgccgctggacggagcgccagggaaatatgtcgtgtgctcgtgtaatgttggcgattccctgggctatgtgtactccaagaagcacggagtacgggaactaacacaggcatcccacgacatcagttccatgagggacatgcgcgatgcgttgggtgcccttggaccggcggatggcaacaagccagagctgagcaatctaaccttctcgatgacctgcattgaaagtggagacatagtctttttaacgtcggatggaatcagcgataacttcgatccagttgtgggcaagtttgccgaagcctggactccggatgttaagcttcagacgtcgggacatgtcaagcccgccaacttggcacccaaacggcagaacaagagtgcatccgccatctatgcccgtctgcatccttcgactccgcccacgcgaccagctcgtcagtccaaggcggaaagtccgcctaataatgcgcctagtcgaccaaagtatatgcgctcccaaacgcttattgaaccacgccagggattggtatcagctccaccgccatcggtggtgccccaacgcattccgaagtccatttcaggactgccccttgttaccggtccccagcggcatgctcttaccctctaccgcttagaggatctgctcagctatggcatcaacggcacgttttcgccctgcgtatcggcacgcaggctctgccacttgcttatcgattttgtacggatgataacgtcagccaggaggaagaccctggagcaaagggaactcttctataaactctctacgggaccagatggcgccaagcgtgaggtgcaactgaaccgcatgcagcatcgcgcggccaggaagcgtgtggtggacagcagcgcctttgtagcattgcccgggaaattggatcatgccactgtgatggcctacacggtgggcggcggagaggagcacaataatggaaatgaaaacggcgatgggggagctatttcgcctgtactgcaatccaaggagttcaaggagacgaatttctga

SEQ ID NO: 20802 - protein, 709 aa, DROSOPHILA
MPSLRQKVTTYFRQLSFIAEPREGRRRASEHEDDDGSFITKYLEGRMQRQFVEGPEIYNGQNPTDMPVLKLDTYEAGNCSITAACTGPDEGLTGIKRSKLHLSTSFADDIDFIDTQQENDDCYGVRRSTPPVQVATQNSTRLTSKFGRPPAGPRRQSSAEQPSGSASASGMRSRKNSKSSIANLAAASAGTDAGKANSDQNNRNVLNAKTEVSTDGDPNSERERLLREAVSNQGGSDPAALIAGVENWRMECDFAYGISVSLYETNMLTKEPMGNPIADCYGMVVRGDSAAMAMADGVNWGDGARLAARSAVHGCLDYLDRAVFGQALECRATTTQEVFVSLLRSLWEGHGCILEVGGALSTLTIAVVLPLDGAPGKYVVCSCNVGDSLGYVYSKKHGVRELTQASHDISSMRDMRDALGALGPADGNKPELSNLTFSMTCIESGDIVFLTSDGISDNFDPVVGKFAEAWTPDVKLQTSGHVKPANLAPKRQNKSASAIYARLHPSTPPTRPARQSKAESPPNNAPSRPKYMRSQTLIEPRQGLVSAPPPSVVPQRIPKSISGLPLVTGPQRHALTLYRLEDLLSYGINGTFSPCVSARRLCHLLIDFVRMITSARRKTLEQRELFYKLSTGPDGAKREVQLNRMQHRAARKRVVDSSAFVALPGKLDHATVMAYTVGGGEEHNNGNENGDGGAISPVLQSKEFKETNF

SEQ ID NO: 20803 - DNA, 2925 bp, DROSOPHILA
tgtagcttccaccagtcaaattgggcgaccagttgtttacaaggttgttaatgagaaggttagcactgctcgacgagtgattgacttgggacactgttggggcctgagtctgcgtctgttggggctgtcgatgctgggcgtcttgctgctgtgcatgtggtaaagtcaaaggatttgtggcaaacagttcatacagtggagtcggctgcgaaggtgtcggcggagcggcctggtgttggtgctgcagctgatggtgattaatcgaggccatgttgatatgcgtgaagagtggggtgccggcttcgctgacctggttgtccgggcagtggtacactttgagaaagttgccgggtcccacaggcagcacggagtaggtctctggctggcctggctgaccggagtaggacagattgaagagatactcattgtacatgtggggctgctgctgctgaagatggggcgcaaatggggggccggctaggtgcggtggtggaggtggccacatcagcgggacaggtgcttgtccatgctgctgctggtggatcagatagttttgggtttgatgttgatgctgctgctgttgctgttgctgctgttggtgggccaggtagttgcccacttcgtcagtgtggggcaggacgcgaaagggtgcagactcagtgctgccccctccaatctcgtcgtcctgacgagtcgccatgtcctgcgatggggcctatgctttttgcgcaccagctccgctcgcctattggaatttcaagcgtgctccatgtattcaccgcagcgagtctgtcacggatgtgctgcaatcgcaggtgacaggtagttggttttctgtggccctagcccactttttcactccaaactctaaataattcgcagagcgtccgtgtgtaagagttttatatctttttattgcaaacgtcaaatgtagtgttgccagatgggtggaattccattttcctaactgccctcgaccaaccctggtagtaacctatcgaaagatttccctccaacgtattttccgaattgttgttaaactgttggattattaatcgaagtttcctcaaataaaaaaacaaatttcgccaacttttccattgccaccaatcagccgtttttgaagatacatatattgatgaacccgctgatcgtgcagccctggttaatatttgttgttttaaacgttgcagtcaaatgatttttaaacaattaaaaaaatgccttttgtccgaccgctggtgaccgtggtgcgggccgggcggcatagctattcagcaggattacagctacagcaacgtcttgcaaggtccaaccagatcctgaatccgccagcggagttccgaaactacctggtgcttcaggagcacgacccggtctacacagtcggactaaggacaaaggactatacggcgcaggatgaagaccgactccgccggctaggagcagacttccatcgcacagatcgcggtggcttgatcacatttcacggccccggccagttggtggcctatcccattctgcacctgggtcagttcgtgccgagcatccgctggtacgtggcgacgttggagcggatggttgtcgaggcctgccaccagatgggcatttccagtgccaaggcgaccaaggacaccggtatctgggtgggtgacaacaagatctgtgccatcggtatccacggctcgcgttacgtcaccacgcatggaatcggcctcaattgctgcacggatctgcagtggtttgagcacattgtgccctgcggaatcgaaggcaagggggtcacctcgctcagcaaagagctggacagacattttcctgtcgaggaggccagtggcgcactcctcaatagtttcgctaaagttttcgaatgccgccttcaggaacacgccaaaaaaccagcaagttctgctgaaatcggataatatggttatttggatacatatgatgtataaaggaccgccaagtttatttcaacatttataatttaaattatgcatcaatacatatttcctggccttctgttatctcaacttttacgaaatggaaatttgtaaactagatttatgtatttcataaaatattaaaataacattataactatatacatatatagactcattgtcaatcgtatttatctatttttttttttgtccaaatctgaatcaaaatcttcgaaatgtatgccatacaagaaaactcagcgacacacagccaacaaaaaatttggcccgaatcgaagttatatcttactataaattacacttcaatggagatcacataaatcgagctttattcaggtcacactttttggagcgcccatccgtaggaatctttccccgtgcattcatctccacacgagcctgttcccgcagctctgccttccgcattcgacgctctttgcgtgactccagagcattattaaagtaccgatccctgaagtcctgcgagggcgttggcacctgttttatgctgcacaataagggttctgttggactatactcgaaacacttttcataggtgagtagccgcctagctgtattcccagtcaattgctgctcagagttagctatcaggctcagatgctgatgctgtggcagcatcttcgggtcgtagtcctcgctgtgaaagggtatccagcagacaagacgtcctcccagttttaggtgcctcgcagagaactcgagaagatccccatagagactctgcaaggaatagtgcgacgttgatgggtaatgcaccatgctgtcacttctagtgttggcctttacgctagcctttttctccaccttttccgtggcctctcttattccatagggagcttaaattaccaaagaatgaacattttaagtttggtataaaaaagaataaacctacgatctgttattatgcagtcgaacgagatgcgggaatgccacaccgggt

SEQ ID NO: 20804 - DNA, 925 bp, DROSOPHILA
aaagatttccctccaacgtattttccgaattgttgttaaactgttggattattaatcgaagtttcctcaaataaaaaaacaaatttcgccaacttttccattgccaccaatcagccgtttttgaagatacatatattgatgaacccgctgatcgtgcagccctggttaatatttgttgttttaaacgttgcagtcaaatgatttttaaacaattaaaaaaatgccttttgtccgaccgctggtgaccgtggtgcgggccgggcggcatagctattcagcaggattacagctacagcaacgtcttgcaaggtccaaccagatcctgaatccgccagcggagttccgaaactacctggtgcttcaggagcacgacccggtctacacagtcggactaaggacaaaggactatacggcgcaggatgaagaccgactccgccggctaggagcagacttccatcgcacagatcgcggtggcttgatcacatttcacggccccggccagttggtggcctatcccattctgcacctgggtcagttcgtgccgagcatccgctggtacgtggcgacgttggagcggatggttgtcgaggcctgccaccagatgggcatttccagtgccaaggcgaccaaggacaccggtatctgggtgggtgacaacaagatctgtgccatcggtatccacggctcgcgttacgtcaccacgcatggaatcggcctcaattgctgcacggatctgcagtggtttgagcacattgtgccctgcggaatcgaaggcaagggggtcacctcgctcagcaaagagctggacagacattttcctgtcgaggaggccagtggcgcactcctcaatagtttcgctaaagttttcgaatgccgccttcaggaacacgccaaaaaaccagcaagttctgctgaaatcggataa

SEQ ID NO: 20805 - protein, 234 aa, DROSOPHILA
MPFVRPLVTVVRAGRHSYSAGLQLQQRLARSNQILNPPAEFRNYLVLQEHDPVYTVGLRTKDYTAQDEDRLRRLGADFHRTDRGGLITFHGPGQLVAYPILHLGQFVPSIRWYVATLERMVVEACHQMGISSAKATKDTGIWVGDNKICAIGIHGSRYVTTHGIGLNCCTDLQWFEHIVPCGIEGKGVTSLSKELDRHFPVEEASGALLNSFAKVFECRLQEHAKKPASSAEIG

SEQ ID NO: 20806 - DNA, 2724 bp, DROSOPHILA
ttgccgctagctaagcatgcctctgcgaaaacacagttctttagaggacatgtctccgtcgtccttctgaatcgtcacctacaaaaaaaccgcttgaacaatgacaaatttacctgttgacacctacaaatagacaattcgtctaattaatgggagcgctccggagactactgagcccatccaagaaatatgacggcttacagttcctcaattgtaacaggttatggcttaattattagtcgatggatctttagggttcataaagatgccagactgtctgccaaactccagaaatatttgcagttctacgaaaaaacagcgcatgttctttcgtggacagttcaacgaaaaatatatcactttcattttatgttaacgtgtggctaggaccagcttacctcaagatattttttaatgaatataataaatgcataggtaagtaatgtatatctcttgccatagaaaagttgagcaggcatggcttttaattttgctaagaagaatattaatgacaactgctttaatcgtcgtcctattacattgaagagtatgttaattaaaagaactcagcaagaatgatggccatgaatcccaattaaggcgccggctaaactccgtgctgcgggcatcatgcgaatgcctctcaactgaataggtttgactatttgtttaggtttgaaacgttgtaacttagttatatgcaatccgatttaagcgaaataaatttgtatgtatgaatagatcagtcatttgttaaatagcaaagtttctgatctcttaaatttgtgtttatattcttttttatttttttttttttttcaaaaacaacaaaaaatcttcattttgttggctcaattgaataggtttgaccactaaaactatttaataaagtatacatttattagtataaagaaaaatttcaaggcactggatagataataaaaggcactgttttagcattatttagtatttggtatggccacccttgtttttaattacctcaaacatacggtttggaatcataatattttttaatttcatttagtgaaattgttgcccaggcttttttaattgcttcaactagggtctcagtgtcactaaattgtcttcctttttcgtacattcccctggacaaaagtccccaaatgttttcaataatgttaatgtcaggggagtaaggcggccactcgagcaatttaacgttttggtctgtgatccactgttttataatccgagccgtatggatgggagcgttgtcatattggtacgtccattgaatatgaccataaatctcagaaaactctggaaaagccttttgaagcacagtcttatacacgtttgggttcattttcgaggtgacaaactggagctcgcaagttccataaaaagatatggctccccacaccattacaccacctgcacaagtgtgatgacggcttaaaaaacattcttcctttcttatatcatggaaataatagttatagccatccggtccatcgaggttgaacttcttttcatcggagaaaaccaccgtcttccactccttgttccacgtcatgtgttctcaggcaaattctgaagagaagagatcagaaactttgatatttaacaaatgactgatcattcactgtatctgttaaaaaaatcaatttccttttatcaaagtctttattcgccataagtaaaatatgatcagaaagaacgcgtagatcgccaacaacagttacagtaagcacacatctaacgtatactttggatgtatttaatggtaacgaaaacatgagtagactctatagtcgagtacctcgactatcagatacccgttactgagcctgtgaaaaaacgaattctcgttcgtttaacattatttttgtcataaccatagaaagtggcaagaaaaatcataaaattaaaaaacaaaaaaaatgtgagcctggacttcttgggtgatacgagtcgatatcgataaaaatttaaaagacaaataataaaataaaaataatattaattttttttttctaaattgtgggcgcggaaactttgtgggctgtgcaacatcaggatacaaacttgcactgcgtctacatatgtctctgatatttgcatctcaatgttcatatggacggaaagactatgacgaccggacagaccgacatggccagatcgactccgacattgaaactgatcaaaaatatatattacttatatggctggaaccgcttccttttacctgttacatatttttcaatgcatctagtatacccttttactttacgagtttaaacttggagacatatgtataagattattattaaaagcattattattaaaagcagtctatatcggattgcaagtaatgttcttatactgcaggcatattttaacatcatctgcgctaataaatacaacataattatacaattatagctatgggaatgtcgttagtaaagaaggtaagcatcaagtggatgctcattgccactgggcttgtgggaaaggcaattttaatacttaactccgttcgcataaacgtcgagatctccggcactattaaaactaaaataatgagattccatacacatagacgcagtgcaatttggttactgatttagcgcccacttcaacgcctacaaacccccgaaactgtcacggccacaattcggaaatttaattttatttttcccaatttctattgaaaaatttaaaattccaatagctgagtaa

SEQ ID NO: 20807 - DNA, 724 bp, DROSOPHILA
actgttgttggcgatctacgcgttctttctgatcatattttacttatggcgaataaagactttgataaaaggaaattgatttttttaacagatacagtgaatgatcagtcatttgttaaatatcaaagtttctgatctcttctcttcagaatttgcctgagaacacatgacgtggaacaaggagtggaagacggtggttttctccgatgaaaagaagttcaacctcgatggaccggatggctataactattatttccatgatataagaaaggaagaatgttttttaagccgtcatcacacttgtgcaggtggtgtaatggtgtggggagccatatctttttatggaacttgcgagctccagtttgtcacctcgaaaatgaacccaaacgtgtataagactgtgcttcaaaaggcttttccagagttttctgagatttatggtcatattcaatggacgtaccaatatgacaacgctcccatccatacggctcggattataaaacagtggatcacagaccaaaacgttaaattgctcgagtggccgccttactcccctgacattaacattattgaaaacatttggggacttttgtccaggggaatgtacgaaaaaggaagacaatttagtgacactgagaccctagttgaagcaattaaaaaagcctgggcaacaatttcactaaatgaaattaaaaaatattatgattccaaaccgtatgtttga

SEQ ID NO: 20808 - protein, 185 aa, DROSOPHILA
MTWNKEWKTVVFSDEKKFNLDGPDGYNYYFHDIRKEECFLSRHHTCAGGVMVWGAISFYGTCELQFVTSKMNPNVYKTVLQKAFPEFSEIYGHIQWTYQYDNAPIHTARIIKQWITDQNVKLLEWPPYSPDINIIENIWGLLSRGMYEKGRQFSDTETLVEAIKKAWATISLNEIKKYYDSKPYV

SEQ ID NO: 20809 - DNA, 2923 bp, DROSOPHILA
aatggatcagagtttcattttctctgtcaattgttactattctttctgaacatttgttgaacatgaagtgaacattaggttaatttattataaatttcttacctttactcaatttttctgtgtgcacctccagctgggacagctgctgtgatcccttggttgctccacgtgaaatcccacacatggcgagctgagttataggagtcactgtctgatctaggctacagctccagttgctggaccgtaaattggccacgaaagacggctggaatgtcaggtctctcctttaggaccggtcggtcgcgtgtttgttgccaagattggaacacaagctgactccgtcatcgggtgcattgagcacattgtttgtgcgtttcattgatttttcaaggggtgggggggggggtagaggtggtgcagctggctcattgatgaattaactgctttttaatgtgatcccgagcaattaacaattaatttgcactttgatgatgggacatcatcgtttcggaaataatgagtgcaggatgggtcagtcacatgcaaaaaggcgtgaataaaaccaaatgcaccttggaatgaaatcaaattgttattgaaaatgattttaaaagtgatttcagtgcattctcataactcataaaatatacacaatatctgatgatcagtatctactccttctatggtgaattcagaattgcgtatacgcatggttgacaaagtggttttataggggtaataatttttcagagatattttgtacccaatcccagtgtccgagaatcgctttcgattgtttccgttaacattaataattgtgtgcccgctgaattggtaattagcaacaagccaaatttagcagccggaacgacaataaacaaaacatgacgtattaatcagttagtgcaattgttaaaaaagcaataacaatcagggtgttttgattaggttcattaactatagtgtattttggttgcgtatttatcatttggttgattagctagtagaaattgtggtttggattgtattgttccttgatggaacagagtgcgggatactctggattacttcccgtccggcattcagaggcgggctttccggcattgtaaacaggaactccgatggcatagacactggcatagttgcaggcagtattgtagatgtagaggaaggggtactgcggattggtgaagcgcatcatggcacagcccacatgggtgttcctgtccagcacggtttccacaaagtgtccatacttttcgctaaggtaaagtgaaacaagtatgttagtgggctaggtcagtggatgattgtaagctccgatgacttacaggtctttggtcagcttaaaatcggtaatgtaactgctgtcgatgagtttgtgctctccaaaccacaagcccatcgactgctccaccagattggtcacgttcaagtcccagttcctccgacgatcgacaccgcagagattctgacccagattccggaagcggtagctgttgtggcagtcgtcgtgctccaggtaacaggttttcaggttcaacgtggccaggtactccagctcctcatcccacaccatggtggccatgcgggtggccggatagtagccgggcaaagatccagaggcaatgtagttcctgcgcttgttgtgctcattcacgataagtttgcgataaggcttcaggtccaccatagtggcatccggggagcagctttcatggaatttctattgaatgaaaacttgtttaaatttgttaagagatgatttatgaaagtatcttacaccatcgttattacacgctatgtgcaccgtgttgtcaggacataagtccggatcacaccaggacaggggctgagaactggccatacccaggatgatcaacagacaaccgaccgtttgaaatctaccgtactccatgttcactggatctcacttagggcacaaatgaaaatgtaagtcctgaccaccggcaaggcgatatttataacgaaattttgatttgcaggtgcgtttaatttcggctggtgtttgccaatcccgataccaatcccgatttcgtacccaatcccgatcccgaatccgatctcagtccgaaaacgaaaccgcagcttgagacaggtcaagcgacgttttatgaatcatttccattttcgggggccgttgtctttgttcttgtctctgtttcggatatcacatccaaagagcgttcacaccgaaaacttcaaagtgcacgacttctaggaaagctcgagcaataaacccctgcgatgtcgactgggaagagtctacactttcttggctccccagctcgctaacttaaatatagaatatttaagtagatcgttaatctgcgagtcaagttcaagacagagaaagctaagtctgggcatttagttaaggtttgagcatctattagactagtacacacaggtgctttattcagcgcagtctgctgatatttcaaaagtatcttaaaaagtatctcaaattggagcacccagctcaggattgatagcgtgggtgtctctgggagttcagtgactttgtcgctctgcagcttccagcggttgacattgacattgacccaattggtgagtttagataatcgcgtattattaaatagctatattcttgtttgatcaacgctgcacgagctaagctacgctttcaaagatcgccggacaggttctcaatcacaatggagaaatcaataacatctgcgcacaaatcaaataaaaatgtcatttgcatatgctaaggcacatcgttatgagttgttggccaataacaaacgaaagttctgtgtgccaaaccagtctccgaagtctccgaagactgggactggctttctttgtgactcgcattgtttattttggtcgatctccgttggcttacagcacaaccagtgggtttttaactcaa

SEQ ID NO: 20810 - DNA, 797 bp, DROSOPHILA
tgaacatggagtacggtagatttcaaacggtcggttgtctgttgatcatcctgggtatggccagttctcagcccctgtcctggtgtgatccggacttatgtcctgacaacacggtgcacatagcgtgtaataacgatggtaaattccatgaaagctgctccccggatgccactatggtggacctgaagccttatcgcaaacttatcgtgaatgagcacaacaagcgcaggaactacattgcctctggatctttgcccggctactatccggccacccgcatggccaccatggtgtgggatgaggagctggagtacctggccacgttgaacctgaaaacctgttacctggagcacgacgactgccacaacagctaccgcttccggaatctgggtcagaatctctgcggtgtcgatcgtcggaggaactgggacttgaacgtgaccaatctggtggagcagtcgatgggcttgtggtttggagagcacaaactcatcgacagcagttacattaccgattttaagctgaccaaagacctcgaaaagtatggacactttgtggaaaccgtgctggacaggaacacccatgtgggctgtgccatgatgcgcttcaccaatccgcagtaccccttcctctacatctacaatactgcctgcaactatgccagtgtctatgccatcggagttcctgtttacaatgccggaaagcccgcctctgaatgccggacgggaagtaatccagagtatcccgcactctgttccatcaaggaacaatacaatccaaaccacaatttctactag

SEQ ID NO: 20811 - protein, 263 aa, DROSOPHILA
MEYGRFQTVGCLLIILGMASSQPLSWCDPDLCPDNTVHIACNNDGKFHESCSPDATMVDLKPYRKLIVNEHNKRRNYIASGSLPGYYPATRMATMVWDEELEYLATLNLKTCYLEHDDCHNSYRFRNLGQNLCGVDRRRNWDLNVTNLVEQSMGLWFGEHKLIDSSYITDFKLTKDLEKYGHFVETVLDRNTHVGCAMMRFTNPQYPFLYIYNTACNYASVYAIGVPVYNAGKPASECRTGSNPEYPALCSIKEQYNPNHNFY

SEQ ID NO: 20812 - DNA, 10360 bp, DROSOPHILA
cattccgctcgatctaacactaatccccgtctagagctgttaaactgggcgaatgttaagtccgcgatacgaaaagctttcgagctttcatatcaggtgtacctaactatgggtaacttggtctggtctaatcagtttgtgcgctaaagtggaacgaaatgggtcacctgcagttggatttccattccatacctaagctccatggcagggagaactattggcagtggcgcatcctcctgaagacctttctggaggccaacgatctgtggaagcacaacgaaccgaaggaggtacctatcctaatcttacattcgaagtaagagttatttttaaccttatcaccataatatcatttccagagcccagaaaccaaattcctgattttggccagcgttacggccgataagattgagccatcctacgatgatcaaagctgttcgtacattttccaaaacatggagagtcgattcgggccttttagttaaaaattgaataaatatacatatatttatgttttgaccattgatctggattatttgttttcttctttaccgcctcctttaccaccacgtttaccacctccatcgccaccacgtcctgatcctccgtccttgccatcccttggatgtttcttgccttcgttagatttctcatctgcttggttttcacttccaggacttcctgatttgccggcttcattttttcctcctccatctcctccatctccaccacgtcccccaactccacctccgccaccaccaccaccaccaccaccgccacctcctcccctatttcctgatccccctttgccaccagacatttttagctattaagcttactgatacagaaaattggctacaaaaagtgaattatttataaatttttcaactgctgaagcaatgagttgtgatcaaattgggttatacagaaatatttaaccaataatatcaaaacagtagcattagtctaggaatagaatcgagcactttttattttttttcatctctaacaatgagattcatttatttaaagtgaatttggtgttggtgaactcaaacgtgccatcggaatgaagccacctgctttcaattccattacaatgcattgatatttgcttacgatatactattacgatttaaggcactatgcaaagcactacgtacagacgatttcaattggtatcctccagataaagaactcttaacaaacactacatatcaatacgctatatgtacaagctaaaaagtgagggagcgtttagctcctttgttccgataacggtgatatccgacgatattcgatataatgatatacatatgattcatgactagcacggctgcacgtcctccgccggcggcaattggttgggatcataatagtagagactgggcgaccacggcctctgtgctcccgccttcaattcgggatgagcaagtgccaccgcctggcagccacattcctgggtcgcatccttacccggaccctcgccgggaaactcctgacccaccgctacggcgcgcaccacaacctggtgcggattggtcacatccgcattggtaataactccggcctcgtgacgaaaactgtaaaatcggttcgtcaaatgcccatccaagtaaatctggaaagtagagaaacgtttgaaaaatgtttgccagtatatgcaggacgaacttcttcctcacctcatatcctgctacagcgcgacagtcctccaattgccattggacgtagagagcggtgttacccaatggccacacactcttaattttgacgggaaaactatcgccgggtccacctctgttggtcaagtctgtagccttaaggtgctatggaattaaaaataaggggttattattaaggaaatggattttatcaattgcagtggatgtcgaacctttggtttcgctttcttgttgccgagcacacaatccatggcatgcatatcaacgatgatggagtctataaagtatttctgcaaaaaataaatagtagatatataagataatgaaggaatctcgaagtttcttaccatttcgcagagtggatcacacattccggagcgcagggtattggcaaccgtcttgcactcctcgtcgcatatgagagcgcgacagtggcagcataggcatccttgttgttctgggggacactcatcatcgcattcctcgcacttttccaacgggcaatcttccgggcattcctcacaattcagcgcgcactcttcgcatacatcgtcctcgcaggagtacacatcgtcaccaccacacagaccacaatccttaagagcttttcgcaaaagctgctcgcagaggttcctcatatcgggtgacagaggtccttcgggcaatagcccagtacgtggaccccggggcgccgggctaggtgactccttttgcgcacagggatctaagttgtaggggaaggctgcccagtctgtttgctgtgtggtccaaggaggacaggacaccatgccagcaaatggacactcaatctgttctggtttctcctcttcttccggtgacgccacggttgtgggtctctcacagatttcccttagtactgtgctaggagttttttcttctacctcctcgccttccttattggcctcctccgcaagaatttcttgcagttccttgtcgatgaatgctttaagagattggcagagatccggctccgtggttgctttaccatcatccttactttcgaacttttttacttcctcgtcatcctcacaatcacgaaagaagtcatcatccaagccatcacccgaacaggttagtgcatttccaatgtcaaagaattgttccgggcactgacaaggttgcatgttgtcattttccttgggagattttggctcaggttctggtggaaagtccggatctagttcaaaagcatagatatcggtctcaggaatctgaggttctgccggcggcaggaagcacttgcagaggtattcctccagttgatgaaagcactcgactcgttggagctctctctttgacgggggtttttcgactggatcgccttccccattgccagcatgttgggccgtacagcactcatcgaaggttaggcacggtgggctagcttcatccgctggtgcaactgcatcatctttttctgatctcaggagtagtgttagttcccggaaaagttgttgggtcaggcaggggcgagatataccgcaatcgcaaccaggactggtcagtttctccatcagcatcaggatgcgttccttacgagaacagcaggccatagccctatttccacaaagatcctctggtgtctgatagccggtacccgcttgggcactttgcatcccctgaagctcgtcattcgaagagcactggcactgcttgctgacacacgtagccttttcgggttccttcggaggatctgcatcgtcgttgcacaggcaactacccccggaaagactcctgtgcgtatgaagactggtctggatgggatcggacagttcggagaagttatcagaagcatcacagtcacaaaattcctcctgacccttaacgctcactttcctagaacggaaagaggtactggggtcgccttgagagttctgacaatcggtgaactgggcaaacccggatggatggtgtattcttgtggaggggcatggcgcaatctggatctcatttgggcattcccgatcggccaggctcgacacaaaggccttggtgggttgatgctccgatgcgcataggcaggtgacctgacccacaatcgattgggatcgtgtggttgctgaggtctcatcgcctggcccaaaggagggttgattgcgcgggtttggcgccctgaaattacttgatttggatgtcatactgcgataattgggatggctctgaggaagtgaactcatagaaggatcctgattagtctgggtagcgttgcaggtacatgcaggacgttcgtcctctttggaagagcaacatgtactctccggatcctttaaagccgacaaccaagtgacgccactctgagttggcggattagatttactaggcagactggccaaactcttggatcgaccaaagctgccttttgatgctccgggtctatgcaagggagcgagagtgcttgaggaggggtccattgctctactgtaggatggtccggttaccaagttgctttgaccagcccagtatggtgggtgggcgccacaagtgcagggatcgaggagctccttggtacacgctgttatagcactcttgaatgaggaagccttctctggttccgtaaccgatgttttctgggagcagggcttcctcgaactggatttctcctgatgacccagtccacatggacttggatcggtgttgcatgcacaggtgtgagctttaaccgctggtggatcggcggacttggacctctttgcggtgcatgagcaggacgccccatcatctggattagccttcgattccgggttcttaggcgtgtggtgtttctgcagaaaggagaccgccgtctgcgatggcttgtcatgagggtctacacgatcagattgttgcgactgttgggattttgacggcttccagtggtctctcatgtgggatgcctcggtttgttgatggcgggagttggggtcgctgtcggaatgtcgctcatgctgcatgtacatcagagccgggcattctgtggatgaaatgtttgggataaaataaatatctaacaaggattttatacatcaattcaggtaaaataagaatctgttaatagccggccttctgtaacccttcaaaaattcttggctacttcaggtttcttgcaaacatcttgacttgcacgatattccgaaacattgagccttagccgcttacataaggtaaacgacataagtatgccttaaaaaatcaaatccgtaaacaggatttaaaatgtgggaaatttcaataaagagaagtgattacaattgacatataatagaagaaaactgatcagcaggaaagttagcacgcttacgatattgtggcggctaaggctcgaaaattcgagcactcttaaccgataccgaaccgattcctaaaaccgtttcaactcgattccccggctagaacacacataattcgattcgatttgattcggtgagcaaacacattttattcgattggatggctcgtgggtacgagcagttccttgatctcattgagttggatctcgcgaccccgcgtgatttccggacgggaccacatttcagcgtggtacaattctaagaacttggcctccgccttttcgcggcacggacaaaaatcgaagtaggaggtctggctgcagacctcccgatcctcgaacttagtgaagatggtgccgcgctgtacgcatcggcaaaccttgacattggtgtgctgctggtttggggcaaaggagcgttgcttccacggacacatgcagcagccacagttgccgggacaaaacacattgccttcctcgtccataataggactgggatcgaaacggcacggcgaacagttggagaactccttgttttgaggcagggcaaggtagtaccgcttgcttcccggcgatctttccggcggcggcggtcccatttcttcttccggctgcggtcctaacatctcctgctcgctagacaagagctcatcggattcatccgactcggtgatcgggtgttccggctctggagcatagattatcaagtgctccttcggggccgttggttctatctccaccaacggttcttcaattggcagtggctcaggcactggggtaagagtgagctctgattcgatatccggcaaggtcaggcaggagattgagatgacctcccgtgcccccgggtcgtgccagcggcaacatgtggccggagtgcaacggttacactgagatgttgaatccccacagcttcctatgtataccgaactggcggacccttcggctagctgttgcgatgcacatggacgaaagtgtttgctggcggatttacctgagctgggctttggagcccttggaccggaacgcatatactgctgcgagcggcactggcagatggactctttgcgatgcctggtgaccggttgtttcttttgctgacacttgaccatcttgccgctctgcggattgaactccagcggcatctggacggtgacgggctttccgtgcaacggacaaccagcgcgacccttcttggggtccaccaaccgagcggtcaactccagggtgacggcacatggctgattccaaccacctgacttgtcaaaattcttgagtagcatctgtgtggcattggccgcccgttccagggcatcccgtatcgcagccggatcatcgaacttgcaccggctggtggcactacggccctcctttggcgagtcctcacccggaccttgacagtcgtaaaataagtcctgttcgctgcgcgtctgctggaagttttcgcctacgaaaagcagtcgggtggagtccaatccgcgactcaatgtcatggagctctggttaacgaaatgactccgggagtagtcactccgagcgatgcttggatcgatgggctgattagagaattcctcgtccatcacgcttaaagagcttgaactgttttccccaaatcaagctctgaactcacattaaattttaaagtgtgtgttgcctgctcgattgtgtctaaaatactgataccaaatggagcacaatagtgacagtattgaaaacgtgacctcactggcctgctagtaactcctatgaattttcgattttcctacgctgttctatgtgtggtgtagccaaagcaaagcgaaaatttataaagatacccaacatacccagcaattaccagtgaaaaaaatgcatttcccaaacataatccaatttagtcaccaatgaattttgagaaaaaacaactaagtgagcaagacgtggctcttgataagtttaaaatttacgtgttttgattaggttcctggcaatcgggacacacttcatccttgttggaccactttacactcgatcttctgctcttcgacttgttctgatttccaggtgcattgcatccacaaaatgtgccaattgacttgggctggaagatgttgactttgacctggccgctttccggattcagttcgattggcagcctcagggtcactgggtcgccgattaacttgcactgcctgtccttggggcaaggacacttgtcgtccgtatgtagacgggcactgacctccagggtggccggatagaaaagtgtcatcaaaggacgagttggcacggaatcagtgcctccgtagcaccttagcaaccgctgggtggcagtggctgcccgctccaaaacggcccgaatctggacaggatcgtcaaatcgaggcgcttgcttgcagatcacttcatcaccaccgcccacttccagatctggagtctcctcgtcgtcactgcggcagtcataaaagatgtctaagtcctcaaactcgccaatcataatgctcaacgtttaaacaatttggattaatctgatgccgttacgaatctgccgataaaacagtctactctatacaaagacaataatctcagagaactattgatgttgaattataatgttcctggttagcttcctataattagatctaatctgaagatcttatacacggcaaccttcaaggagaccgaaataagggtcagtcacttggtaatttacatttatgtttggtgtatttacatagaaataaagctctatttcttagctctgaacaaggtggaattgctcctctccacgggaatgtagacagtgcagcagaactccgattccgccttgtggttatggaagagcagaagtcttgtgtggattcgctgctcgatttgttgcaaaagcgccgaagatgcaggcttaagggccaactttaggttatggacacagtccagagcagccacaaatccttcatagctctcctgcgtcttctgagtactcttttcaatccacatgtcttgcaaaaattcaagatgctcacggaaatcctctccgccctcccataagtgaagaagacgggtccggaatgcggcaacatcgaggtatccgtccacggcgccctgaatcaaatccacgaagcacctggttctcagaggcatcaggagcagtcgttgctccacacccacatcgacctgtgttccacactcaatcgtctctggttgaacttgcatctccttttcattgcactgtgtcgtgacctgaacctcctcctccagggttttcacctcgtccgtttgtacaaatgacacgctggccagagattcccaattaagattaacaacttcagcgtgaagggagtgcagggaaattccggatctggccgagtgaaccgagtgaactgacaacagagagtggaaactactgcaggagaggctcttttgaagagggaaacccagagttcgattgagcgtacgtggacggtaaatgtgacggaagaggaaacgctgtatttttcgctggtgactgtttggtcttggatgcttctccttcttattctttgctcgctttttgcttttctttttgagctcgggttcgtgctgctgatccacagaacaaacctcgttgaacatctgtctcatggaatagggcaccgcggtgatcttcttctcttgctcatctgttggtcgaattatctgcggattcgccctgctgtctgattcaccaaggtgtagttcagatttttgggcagatcccccagctaattcccgtactattgaccggcatgaggatgtcacgacactaacataactagatttcttgctgctaacgagatttctttcttgactttccagatattctgaatcgacttgactttctagacttcccggattttcttgaatgacctgattatcttgagtttcttgatttccctggcattctagactagtcacagttgatagtcctgtctcaggtattttttctgaggaggcatcctggaccgtagcccaactggagccttcgggttccgaaccagctggcttggcgggctctttgctttggagactcacctcggacggactctgtgagagaagggtatccgccagttgctttacactgcaggcaattgcttggaagtccttgtgcagtggtagaccaaaatcacgaccctgtaatgataaggtgctgtaaggtttcagtaaaattctaaatactaccagacctacctcgagatcgagtagggccacgcccagtccctggctggcagcctggaggctcggtacctcatccttcttggcccgcttcgcaggactatcatggagttcatcggccaggctgtagccctcgggcataacgcccagtttgcgttccaagagctggcattgttcgtccttggttcgcagctcgtcctccaggcagcgcgcccgctcctccgaatccctcatttggttctccatctggcggattttgttctccagcgtgcccacctcctctttcagctcgccatttgtgacctcgatgtgcaggtaatcctttttgatgttgaagatctgggtgcgcaaagcatccgtctcctgcctcaactgatcctcggtgttctgctgcaccttcttggcaaagataaggtcatccatcagtgcctgggttttgcgcctctcgttttctagagcctctgttaggggcatcttgtgttccgcctccttttccattttggccattagactctccaagctgcactgcagagtgcgattctcggtgagcaggtcgcgatgctccttggtcatgcggaccaggcaggacttcaatgacagttccccctcctccagctgctggatcttttcggtcgccgctcgggaatcctcccggaggcaatcttgcagttgggctatcttctgcttgagactggcctccttggcctgttgggcctcctcgcgctccttgtactgctgctccagatctacccagtgtgagtctgctgtttccatggcttcgtagtgccgggcatttagctctttcagttggctacgcagactcttgacctcttcctttaggtaaacgatctcccgttcctcgccggaatcggtaaatcccgcttgaccgaggtcaaactccgttgtttggatcttggcactgaaatctcgatcctggtgtatagaagaagtgtagcccgaggagaggcgggggctgcctcccggggaggattcctcgttgcccattttggctagtgataacaagcggaagattaggagtaatggaagcgatcttctcagatcctgaagctcctttctggcttgcttcctttcggcctgcagatgctccagttgggtttcagctgccgctagatcctctcgaaggattagtacctccgccctgcaatcctgatacttggcgcctagtgcttccttgccgaattccaactccacgttgcgc

SEQ ID NO: 20813 - DNA, 3770 bp, DROSOPHILA
gagcgggcgcgctgcctggaggacgagctgcgaaccaaggacgaacaatgccagctcttggaacgcaaactgggcgttatgcccgagggctacagcctggccgatgaactccatgatagtcctgcgaagcgggccaagaaggatgaggtaccgagcctccaggctgccagccagggactgggcgtggccctactcgatctcgagggtcgtgattttggtctaccactgcacaaggacttccaagcaattgcctgcagtgtaaagcaactggcggatacccttctctcacagagtccgtccgagaatgcccggctctgatgtacatgcagcatgagcgacattccgacagcgaccccaactcccgccatcaacaaaccgaggcatcccacatgagagaccactggaagccgtcaaaatcccaacagtcgcaacaatctgatcgtgtagaccctcatgacaagccatcgcagacggcggtctcctttctgcagaaacaccacacgcctaagaacccggaatcgaaggctaatccagatgatggggcgtcctgctcatgcaccgcaaagaggtccaagtccgccgatccaccagcggttaaagctcacacctgtgcatgcaacaccgatccaagtccatgtggactgggtcatcaggagaaatccagttcgaggaagccctgctcccagaaaacatcggttacggaaccagagaaggcttcctcattcaagagtgctataacagcgtgtaccaaggagctcctcgatccctgcacttgtggcgcccacccaccatactgggctggtcaaagcaacttggtaaccggaccatcctacagtagagcaatggacccctcctcaagcactctcgctcccttgcatagacccggagcatcaaaaggcagctttggtcgatccaagagtttggccagtctgcctagtaaatctaatccgccaactcagagtggcgtcacttggttgtcggctttaaaggatccggagagtacatgttgctcttccaaagaggacgaacgtcctgcatgtacctgcaacgctacccagactaatcaggatccttctatgagttcacttcctcagagccatcccaattatcgcagtatgacatccaaatcaagtaatttcagggcgccaaacccgcgcaatcaaccctcctttgggccaggcgatgagacctcagcaaccacacgatcccaatcgattgtgggtcaggtcacctgcctatgcgcatcggagcatcaacccaccaaggcctttgtgtcgagcctggccgatcgggaatgcccaaatgagatccagattgcgccatgcccctccacaagaatacaccatccatccgggtttgcccagttcaccgattgtcagaactctcaaggcgaccccagtacctctttccgttctaggaaagtgagcgttaagggtcaggaggaattttgtgactgtgatgcttctgataacttctccgaactgtccgatcccatccagaccagtcttcatacgcacaggagtctttccgggggtagttgcctgtgcaacgacgatgcagatcctccgaaggaacccgaaaaggctacgtgtgtcagcaagcagtgccagtgctcttcgaatgacgagcttcaggggatgcaaagtgcccaagcgggtaccggctatcagacaccagaggatctttgtggaaatagggctatggcctgctgttctcgtaaggaacgcatcctgatgctgatggagaaactgaccagtcctggttgcgattgcggtatatctcgcccctgcctgacccaacaacttttccgggaactaacactactcctgagatcagaaaaagatgatgcagttgcaccagcggatgaagctagcccaccgtgcctaaccttcgatgagtgctgtacggcccaacatgctggcaatggggaaggcgatccagtcgaaaaacccccgtcaaagagagagctccaacgagtcgagtgctttcatcaactggaggaatacctctgcaagtgcttcctgccgccggcagaacctcagattcctgagaccgatatctatgcttttgaactagatccggactttccaccagaacctgagccaaaatctcccaaggaaaatgacaacatgcaaccttgtcagtgcccggaacaattctttgacattggaaatgcactaacctgttcgggtgatggcttggatgatgacttctttcgtgattgtgaggatgacgaggaagtaaaaaagttcgaaagtaaggatgatggtaaagcaaccacggagccggatctctgccaatctcttaaagcattcatcgacaaggaactgcaagaaattcttgcggaggaggccaataaggaaggcgaggaggtagaagaaaaaactcctagcacagtactaagggaaatctgtgagagacccacaaccgtggcgtcaccggaagaagaggagaaaccagaacagattgagtgtccatttgctggcatggtgtcctgtcctccttggaccacacagcaaacagactgggcagccttcccctacaacttagatccctgtgcgcaaaaggagtcacctagcccggcgccccggggtccacgtactgggctattgcccgaaggacctctgtcacccgatatgaggaacctctgcgagcagcttttgcgaaaagctcttaaggattgtggtctgtgtggtggtgacgatgtgtactcctgcgaggacgatgtatgcgaagagtgcgcgctgaattgtgaggaatgcccggaagattgcccgttggaaaagtgcgaggaatgcgatgatgagtgtcccccagaacaacaaggatgcctatgctgccactgtcgcgctctcatatgcgacgaggagtgcaagacggttgccaataccctgcgctccggaatgtgtgatccactctgcgaaatgaaatactttatagactccatcatcgttgatatgcatgccatggattgtgtgctcggcaacaagaaagcgaaaccaaagcaccttaaggctacagacttgaccaacagaggtggacccggcgatagttttcccgtcaaaattaagagtgtgtggccattgggtaacaccgctctctacgtccaatggcaattggaggactgtcgcgctgtagcaggatatgagatttacttggatgggcatttgacgaaccgattttacagttttcgtcacgaggccggagttattaccaatgcggatgtgaccaatccgcaccaggttgtggtgcgcgccgtagcggtgggtcaggagtttcccggcgagggtccgggtaaggatgcgacccaggaatgtggctgccaggcggtggcacttgctcatcccgaattgaaggcgggagcacagaggccgtggtcgcccagtctctactattatgatcccaaccaattgccgccggcggaggacgtgcagccgtgctagtcatgaatcatatgtatatcattatatcgaatatcgtcggatatcaccgttatcggaacaaaggagctaaacgctccctcactttttagcttgtacatatagcgtattgatatgtagtgtttgttaagagttctttatctggaggataccaattgaaatcgtctgtacgtagtgctttgcatagtgccttaaatcgtaatagtatatcgtaagcaaatatcaatgcattgtaatggaattgaaagcaggtggcttcattccgatggcacgtttgagttcaccaacaccaaattcactttaaataaatgaatctcattgttagagatg

SEQ ID NO: 20814 - protein, 1017 aa, DROSOPHILA
MRDHWKPSKSQQSQQSDRVDPHDKPSQTAVSFLQKHHTPKNPESKANPDDGASCSCTAKRSKSADPPAVKAHTCACNTDPSPCGLGHQEKSSSRKPCSQKTSVTEPEKASSFKSAITACTKELLDPCTCGAHPPYWAGQSNLVTGPSYSRAMDPSSSTLAPLHRPGASKGSFGRSKSLASLPSKSNPPTQSGVTWLSALKDPESTCCSSKEDERPACTCNATQTNQDPSMSSLPQSHPNYRSMTSKSSNFRAPNPRNQPSFGPGDETSATTRSQSIVGQVTCLCASEHQPTKAFVSSLADRECPNEIQIAPCPSTRIHHPSGFAQFTDCQNSQGDPSTSFRSRKVSVKGQEEFCDCDASDNFSELSDPIQTSLHTHRSLSGGSCLCNDDADPPKEPEKATCVSKQCQCSSNDELQGMQSAQAGTGYQTPEDLCGNRAMACCSRKERILMLMEKLTSPGCDCGISRPCLTQQLFRELTLLLRSEKDDAVAPADEASPPCLTFDECCTAQHAGNGEGDPVEKPPSKRELQRVECFHQLEEYLCKCFLPPAEPQIPETDIYAFELDPDFPPEPEPKSPKENDNMQPCQCPEQFFDIGNALTCSGDGLDDDFFRDCEDDEEVKKFESKDDGKATTEPDLCQSLKAFIDKELQEILAEEANKEGEEVEEKTPSTVLREICERPTTVASPEEEEKPEQIECPFAGMVSCPPWTTQQTDWAAFPYNLDPCAQKESPSPAPRGPRTGLLPEGPLSPDMRNLCEQLLRKALKDCGLCGGDDVYSCEDDVCEECALNCEECPEDCPLEKCEECDDECPPEQQGCLCCHCRALICDEECKTVANTLRSGMCDPLCEMKYFIDSIIVDMHAMDCVLGNKKAKPKHLKATDLTNRGGPGDSFPVKIKSVWPLGNTALYVQWQLEDCRAVAGYEIYLDGHLTNRFYSFRHEAGVITNADVTNPHQVVVRAVAVGQEFPGEGPGKDATQECGCQAVALAHPELKAGAQRPWSPSLYYYDPNQLPPAEDVQPC

SEQ ID NO: 20815 - DNA, 5970 bp, DROSOPHILA
tggcaggtaatccatggactcgattttctcaaccttttccctctggctgaagtgcttgttgtaggtctccacaacgatcttaaaactggcatccacccgaaagtattccgcaagcgaatgccagttcgcggtaacatgattccgtagcctctggtgaaactcgggtaatttgttggagtgggcgtagagctcgaacatggcgcgcaacgaaacggacctggatgcatatagcaacgcagtatccgtgtcccgaaattcgaccaaccaaaatggtttctgtaataccgaaattaaaaaatataaatataactatatatgctgatgcttctatactacagaagtatttatatatgtgtcgcaagctctaaaaataatgtaatcaaagtatcctacactaaaaacatctaacaggtacgcggatcgtattcgtaatgtatgtataccaggtatcaggtatcctttcgaaaccttttaggttttgtagttcctgagatctcaacgatcgtatataatttatagctagtaatgctaaatttctacctgttgaaaacacttttgaaaatatagtttactattttcttcctcttacaaatacatataaaatttttttacgttaaaaatattaaacatattaataaaattccaagtttggatataacattaaaccacaggttttaaaagttataggggaggtggaatttgttaatcttgcgttttcaaaattctggtactaaaacactttaccctggtgtgttctgtaagccgccggacctgaagtccaaacattttgaccagcgaatcaaactcctgcacgcgaaagtcgacatgctcctgggcgaaccacaagataaacttcctccagttgaccatgtcgctattttaattaatgaattgtttatttatattctagagcgacttcattactcctcgtgttattgctgtgagctagcggagttgcactgcgattagctgaccatcggcaactatcggcctgaactatcgataacgcagccaggtgtagccctgcgtgccgtcgactcggccattttgcattaatattgcagccacacgtaggcgagccgaagatttatacaattttcagcagccccaggtctcaaaacgctccagacctgctatcaaaatcaacttgaagtgccgccgcaagtaagtaaagcgatcggaaatggcccgctatacgcaacgtccggaaaacgccctaaaaagggctaatggtgagtgctgaaaattttccatgcggtgtctgaagagaaactttcgtcttcgcgaatcgtgtgctctcttaactcgacgccgctctcttcgtcacagagttcattgaagtgggaaagccgcttagggcgctggacacgctgcaggaagttttccggaacaagcgatggaactatgcctactcggagacggtcatcgaaccgctcatgttcaagtacctgtacctctgcgtggaactcaagaagtcgcacatcgccaaggagggactattccagtaccggaacatgttccagctggtgaacgtgaactctctggaaaatgtaatccgcggctacctgaaaatggccgaagagcacacagaggctgcccaagcccagtcctcggcggccgttgctgttctggagctggatgacctggacaacattgccacgccagagagcatcctaatgagcgcagtgtgtggcgaggacgcacaggaccgctccgaccgcactattctgctcccgtgggtcaagttcctgtgggagtcctactgccagtgtctagagctgctgcgcgtaaacacgcattgcgaggcgctgtaccacgatatcgctcgcatggccttccagttctgccttaagtacaaccgcaagagcgagtttcgccgcttgtgcgacaagctgcgcaaacacttggaggacatttgcaagagcagcaaccagaccaccggtgtctcgatcaacaaggtggaaacgcagcagctctgcttggacaccaggttgtaccttcttgactcggccatccagatggagctgtggcaagaggcctacaaggcaatcgaggatatccatggcctgatggctctgtccaagaagacacccgtgcccaaaaccatggccaactactaccaaaaattagccatggtctttagcaaggccggcaaccagttgttccacgctgcagcgctgctgaagctcttccagctgacgcgcgagctgaagaagaacctgacgaaggacgacttgcagcgtatggctgcccacgttctcctggccactctttctattccgttgccttcggcccatccagagttcgacaggtttattgaggcggacaagagccccctggagaaggcgcagaagttggccgtgcttttgggcctgccccagccacctactcgcgtctcccttattcgtgaagtggtaagtatcacgcaatatagtaatgacttatgactaattcataaacacaggtgcgcttgaatgttcctcaactcgtatctgaggactttcgcaatctatacaactggttggaggtggatttcaacccactgaatctgtgcaagcgcattcagtctatcgtggacttcattgagaacgggcccgaaaacgctctgctcactccttacattcaatcgctgaaggacgtgactataatgcgtctgattcgtcagatctctcaggtttatgagagtattaagttccagcgtctcttgcagctggccagtttttgcaacatttttgaattggaaaaactgctggtcgagtccgtgcgtcacaatgacatgcagattcgtattgaccaccagaagaacagtatctatttcggcactgatctgaccgagagtcaacgcgagtaccgccccgacggacccgctttgcaatcgatgccctcggaacagatccgctctcagttggttaatatgtctactgttctgacacgggcagtttcaatcgtctacccgaaccgtgaacgtgaccagcgggccaagctccgcaaccagatggtaaaccattaccatgagatcaaggatcgcgagcaccagcgtattcttcagcgacagaagatcatcgaggacagaaaggagtacatcgagaagcagaataatgctcgtgaagaggaagaggcgcggcgtcaggaggaggaatcgcggaaggccaaactggccgaacagaagcgcctcgagcaggagcaagaagaaagagagcgcaagcgccatcagaacgaaatccaagccatccgggagaagagtctcaaggagaaggttcagcaaatctcgcagacggctcatggtaagaagatgctttccaagctggatgaggaaggcattaagaagttggacgccgagcagatcgccaagcgggaaagcgaggaacttcagcgcgaggccaaggaactgcagtcgaaactcaaatcgcaagagaagaaaatcgactacttcgaacgcgccaagcgcctggaggagataccgcttttcgaaaaatacttggccgaaaagcaggttaaggacaaggagttctgggaagcaaccgagaagacacgcatcgagaatgccattgccgaacggaaggatgccgtcgcccagcaggagcgtctcaagcgcatgtatccggaccgggatgaattccttgaggcccttaaaaaagaacgtgcctccctctacgtcgaaaagctcaaaaagtttgaggctgctctggaggcagagcgcaaaaagcgcttagccgaccgcattattcgacgccgcgaggagcgccgacaggccttccttcgcgagaaagaggaggagcgtcttcgcaaggaggaagagattcgcttggcacaggctgccgaagagcgcgccgcagcagaagcccgccgtttggagcgtgaggctgaggacgaaaagcgtcgtgcccaatacgaaaagcagcgtgccaaggaggaggaagctgagcgtaaaatcaaggaagatcgagaccgcctgtccagggagttggcctcggagcgcgaacgcactgaaaaggaccgtgacacatggcgtcctcgaggcggtgaccgtccaagcgcatctaacggcggatccagcgagtggcgtcgtgctgcacctgcggccagtgaacgcaacgaccgtggtggcgagcgtatcgagcgcggaggagaacggatcgagcgcggtggagaacgcctcgagcgtggtggagagcgcattgaacgaggcggtgaccgtgaccgcaaggacaacgagggagcggactcctcttggcgtgtgcgacgagagccagattcacagcgtgcagctgctcccaaagacagtggcgctccgcaatcgcgcgatgacaagtggcggcgtggcggagaacgtgaccgcgatttccgcattgatggggctcgtcgcgacagggatgatgggcctcggcgtgaccgtgacgatggtcctcgccgggatcgtgacgatgagcgcggtggattccgccgcgccgacggggcgcgtcgtaccgacgagcctcagcgggaaactggagggaactggcgcgacgctccacgccacgctgatcgggaaacccgtcgcccagctgagaggcgcgaccgagatgtgcgcgagactcgtggcgatcaacgcggctctgctcctaaggaggcagccagtggcggagtaggcggaaactggcgtactgctcctgcgacccgtgaggaaaaaccagcagctaagcgcgatcaagcccaggaaaagggtaagtaatctcagcagcaaacctaatttccattcttatcaatgcgttacatctttcagagaacaaagctggcgatgatggcgagtggaccagcgttaagcgtcgttaatttttattttcatcatcgtatatacccagcataatattcttaataagtttttatttcatccgacttgtactttattggtgtagagctcagtcggccggtatattatatctatctatccaaagcttgtgccagatagttaaaattgagatggttgtaggaccgatactaattaaagtactttcgaataaaataactatgttctaaaaaattgaaaagtgaaattgtcgaatgagaaccttgggaatcaaagaaatgaaaagtggttattattggtttaattcaaaaattctaattcttatttatcagatttcaggatgaaccaagcttcccttatacgtacagtgatttataaaccagtccctttaaatttatatttcgacagagctaaaactacattaaaatgtagtttgcaaactaaacaaatgcgggttcttctatagttttacaaagttcgttcttggaagcgtggctttttaacattaggttttttaattgcccataaataaaaaatgcattcaaaagtattgtaaattgtattatcacatacgcttgacttattttaaaaaagtgacatctttcttaggtaaaaccatattcgttgggaataaattcgagtaaatttagaaaagcttttatagcaagcaaaacaaaaatattctgcctctgaaaatttgcctcgataatatgagcccgcgccttcttcgcacactcaactagtattttcttgcgaacttggcactaatgccatggcctcgcggatcctccgcggtgcgcgcccctggtcacactgtctgtgccgctgccgcgaatctcggtccacgtgaacaaattttggacaatgtgctatacggtactcatgagataaagtgattgcgggttgctttggagtgcagtgacgttggcccatcttaaaccgcgggtgatcgtgatcttcgggcggaacagaaagacgcagtttgactgccgcaagaaaaagcccttttgggcaccggacttgtgtgcttgtgttagtgctgcagacgcggcgctcaacatgtgaggttaaagcagacggcggcaaaaatccgaacgaacaagcgttcggctggggaagccctttttcgagtgaaataggtgatccggaaccacaacggaagctcagaaggtaatattgctagg

SEQ ID NO: 20816 - DNA, 3764 bp, DROSOPHILA
cgataacgcagccaggtgtagccctgcgtgccgtcgactcggccattttgcattaatattgcagccacacgtaggcgagccgaagatttatacaattttcagcagccccaggtctcaaaacgctccagacctgctatcaaaatcaacttgaagtgccgccgcaagtaagtaaagcgatcggaaatggcccgctatacgcaacgtccggaaaacgccctaaaaagggctaatgagttcattgaagtgggaaagccgcttagggcgctggacacgctgcaggaagttttccggaacaagcgatggaactatgcctactcggagacggtcatcgaaccgctcatgttcaagtacctgtacctctgcgtggaactcaagaagtcgcacatcgccaaggagggactattccagtaccggaacatgttccagctggtgaacgtgaactctctggaaaatgtaatccgcggctacctgaaaatggccgaagagcacacagaggctgcccaagcccagtcctcggcggccgttgctgttctggagctggatgacctggacaacattgccacgccagagagcatcctaatgagcgcagtgtgtggcgaggacgcacaggaccgctccgaccgcactattctgctcccgtgggtcaagttcctgtgggagtcctactgccagtgtctagagctgctgcgcgtaaacacgcattgcgaggcgctgtaccacgatatcgctcgcatggccttccagttctgccttaagtacaaccgcaagagcgagtttcgccgcttgtgcgacaagctgcgcaaacacttggaggacatttgcaagagcagcaaccagaccaccggtgtctcgatcaacaaggtggaaacgcagcagctctgcttggacaccaggttgtaccttcttgactcggccatccagatggagctgtggcaagaggcctacaaggcaatcgaggatatccatggcctgatggctctgtccaagaagacacccgtgcccaaaaccatggccaactactaccaaaaattagccatggtctttagcaaggccggcaaccagttgttccacgctgcagcgctgctgaagctcttccagctgacgcgcgagctgaagaagaacctgacgaaggacgacttgcagcgtatggctgcccacgttctcctggccactctttctattccgttgccttcggcccatccagagttcgacaggtttattgaggcggacaagagccccctggagaaggcgcagaagttggccgtgcttttgggcctgccccagccacctactcgcgtctcccttattcgtgaagtggtgcgcttgaatgttcctcaactcgtatctgaggactttcgcaatctatacaactggttggaggtggatttcaacccactgaatctgtgcaagcgcattcagtctatcgtggacttcattgagaacgggcccgaaaacgctctgctcactccttacattcaatcgctgaaggacgtgactataatgcgtctgattcgtcagatctctcaggtttatgagagtattaagttccagcgtctcttgcagctggccagtttttgcaacatttttgaattggaaaaactgctggtcgagtccgtgcgtcacaatgacatgcagattcgtattgaccaccagaagaacagtatctatttcggcactgatctgaccgagagtcaacgcgagtaccgccccgacggacccgctttgcaatcgatgccctcggaacagatccgctctcagttggttaatatgtctactgttctgacacgggcagtttcaatcgtctacccgaaccgtgaacgtgaccagcgggccaagctccgcaaccagatggtaaaccattaccatgagatcaaggatcgcgagcaccagcgtattcttcagcgacagaagatcatcgaggacagaaaggagtacatcgagaagcagaataatgctcgtgaagaggaagaggcgcggcgtcaggaggaggaatcgcggaaggccaaactggccgaacagaagcgcctcgagcaggagcaagaagaaagagagcgcaagcgccatcagaacgaaatccaagccatccgggagaagagtctcaaggagaaggttcagcaaatctcgcagacggctcatggtaagaagatgctttccaagctggatgaggaaggcattaagaagttggacgccgagcagatcgccaagcgggaaagcgaggaacttcagcgcgaggccaaggaactgcagtcgaaactcaaatcgcaagagaagaaaatcgactacttcgaacgcgccaagcgcctggaggagataccgcttttcgaaaaatacttggccgaaaagcaggttaaggacaaggagttctgggaagcaaccgagaagacacgcatcgagaatgccattgccgaacggaaggatgccgtcgcccagcaggagcgtctcaagcgcatgtatccggaccgggatgaattccttgaggcccttaaaaaagaacgtgcctccctctacgtcgaaaagctcaaaaagtttgaggctgctctggaggcagagcgcaaaaagcgcttagccgaccgcattattcgacgccgcgaggagcgccgacaggccttccttcgcgagaaagaggaggagcgtcttcgcaaggaggaagagattcgcttggcacaggctgccgaagagcgcgccgcagcagaagcccgccgtttggagcgtgaggctgaggacgaaaagcgtcgtgcccaatacgaaaagcagcgtgccaaggaggaggaagctgagcgtaaaatcaaggaagatcgagaccgcctgtccagggagttggcctcggagcgcgaacgcactgaaaaggaccgtgacacatggcgtcctcgaggcggtgaccgtccaagcgcatctaacggcggatccagcgagtggcgtcgtgctgcacctgcggccagtgaacgcaacgaccgtggtggcgagcgtatcgagcgcggaggagaacggatcgagcgcggtggagaacgcctcgagcgtggtggagagcgcattgaacgaggcggtgaccgtgaccgcaaggacaacgagggagcggactcctcttggcgtgtgcgacgagagccagattcacagcgtgcagctgctcccaaagacagtggcgctccgcaatcgcgcgatgacaagtggcggcgtggcggagaacgtgaccgcgatttccgcattgatggggctcgtcgcgacagggatgatgggcctcggcgtgaccgtgacgatggtcctcgccgggatcgtgacgatgagcgcggtggattccgccgcgccgacggggcgcgtcgtaccgacgagcctcagcgggaaactggagggaactggcgcgacgctccacgccacgctgatcgggaaacccgtcgcccagctgagaggcgcgaccgagatgtgcgcgagactcgtggcgatcaacgcggctctgctcctaaggaggcagccagtggcggagtaggcggaaactggcgtactgctcctgcgacccgtgaggaaaaaccagcagctaagcgcgatcaagcccaggaaaaggagaacaaagctggcgatgatggcgagtggaccagcgttaagcgtcgttaatttttattttcatcatcgtatatacccagcataatattcttaataagtttttatttcatccgacttgtactttattggtgtagagctcagtcggccggtatattatatctatctatccaaagcttgtgccagatagttaaaattgagatggttgtagg

SEQ ID NO: 20817 - protein, 1140 aa, DROSOPHILA
MARYTQRPENALKRANEFIEVGKPLRALDTLQEVFRNKRWNYAYSETVIEPLMFKYLYLCVELKKSHIAKEGLFQYRNMFQLVNVNSLENVIRGYLKMAEEHTEAAQAQSSAAVAVLELDDLDNIATPESILMSAVCGEDAQDRSDRTILLPWVKFLWESYCQCLELLRVNTHCEALYHDIARMAFQFCLKYNRKSEFRRLCDKLRKHLEDICKSSNQTTGVSINKVETQQLCLDTRLYLLDSAIQMELWQEAYKAIEDIHGLMALSKKTPVPKTMANYYQKLAMVFSKAGNQLFHAAALLKLFQLTRELKKNLTKDDLQRMAAHVLLATLSIPLPSAHPEFDRFIEADKSPLEKAQKLAVLLGLPQPPTRVSLIREVVRLNVPQLVSEDFRNLYNWLEVDFNPLNLCKRIQSIVDFIENGPENALLTPYIQSLKDVTIMRLIRQISQVYESIKFQRLLQLASFCNIFELEKLLVESVRHNDMQIRIDHQKNSIYFGTDLTESQREYRPDGPALQSMPSEQIRSQLVNMSTVLTRAVSIVYPNRERDQRAKLRNQMVNHYHEIKDREHQRILQRQKIIEDRKEYIEKQNNAREEEEARRQEEESRKAKLAEQKRLEQEQEERERKRHQNEIQAIREKSLKEKVQQISQTAHGKKMLSKLDEEGIKKLDAEQIAKRESEELQREAKELQSKLKSQEKKIDYFERAKRLEEIPLFEKYLAEKQVKDKEFWEATEKTRIENAIAERKDAVAQQERLKRMYPDRDEFLEALKKERASLYVEKLKKFEAALEAERKKRLADRIIRRREERRQAFLREKEEERLRKEEEIRLAQAAEERAAAEARRLEREAEDEKRRAQYEKQRAKEEEAERKIKEDRDRLSRELASERERTEKDRDTWRPRGGDRPSASNGGSSEWRRAAPAASERNDRGGERIERGGERIERGGERLERGGERIERGGDRDRKDNEGADSSWRVRREPDSQRAAAPKDSGAPQSRDDKWRRGGERDRDFRIDGARRDRDDGPRRDRDDGPRRDRDDERGGFRRADGARRTDEPQRETGGNWRDAPRHADRETRRPAERRDRDVRETRGDQRGSAPKEAASGGVGGNWRTAPATREEKPAAKRDQAQEKENKAGDDGEWTSVKRR

SEQ ID NO: 20818 - DNA, 5210 bp, DROSOPHILA
cagtatgccatgggcactgcgacattgggtcgccttcagcaatttgaagcgctcgtcgtcggaggtgtcccagacttgcagcatcctccccatcctccaatcggcaaactccacgctgcactcccttctatccatgcccaccgtgacccggtgtctttcggtgaattggttatccgagaaacgcatcagcaggcaggttttgcctacgccgctgtcacccaggatgataatcttaaacggattgtcgtattggctcatcgttaattcggtttggtttaatatgtataacgattcgactgaagtgacaattttagcttggcttgttctgggtttttgttttttctgggacagaatgtttcaacacaatgtttcaaagtagtctacttttaaataggtccatcaattgcgattggaaaattattttttaattgatatagtagttacaagttatggagaaaaccccgtatgtaaatattcgttttctggaaattgaattttttggtaaaaaataatcagtattttctcaatagcaataaaaatatttgtccaaatgtggaatgtcatacctcattgaattcgtaacgaaattccctatcgacctgtattcaaagttagaaactcaaattttttgccatttttcgcaaatttagatgatgatcgaaaattcgaaaatttgttaaatttttttttttttggaatcataaaaatagtgatagggatagttagctatgttatttggcagtacaaaacagtcttcattttagcggtgatatattttttggccaagttatgaagaaagccccgcatgtaaatatccgttttttgggaaatttaattttttggtaaaaaataataagtattttcttaataagaataaaaataatcgcccaaatgtggaatgggatacctcgttgaattcgtaacgaaattccctatcgaccagtattcaaagttggaaattctaattttttacaaatcggagtcgaaatttgtggtctttctagtagatgcactgcggctctatggacccggttatattgcaaacggcggccagcagattatggtattgtcggttatgccatgatatgttgtcttcgcccagttccaggattcgacgaaaggctatttcaaagcccggaaggttctgaagatcggttctcataaacattcgtaaagcgtttagctcttcttccgtggtgacctctttcataagaacggtaactagctgtgccagttcatcggtattgcttccatatctaaaagtgcagaggtgatattattggacggtttaagcttttacaaactcgtacaatttaatgattgccttgatgttgtccaccaggtatttcttggctatgttgtagcccaaaggattctgcgccacggcactgaagatcagcaggacatcatccttgggcatatatcgaccggcaaatgccaggttgagcagcttgtccagcgcccagttttctcgactgcaggccatggcactcagaaggatccgtcgctcttcgctcacatttgaccgcgtgtagagtcttctcagcagcgtccaatcagcttccgttccaaactgtatggctgtgcaatagatggtttcgcttagatccaccggaatgcgattggtctccagggtgaggccagcgaattccttgagtgcgaagtccgcacaggattccagatcagttcggcaggacaactgcaggacgatcaccatcagttcggtaatgtttgcattttcagctgcggagccatctctcttaaagagctcatcaaacttggtctgcagtaggtctctcataaagccctaagacaaaggattaatgctacattaacagttgttcctgagtttagtctatcatgctgagctttctaaaaaccaattcttttaaaagctgagcttaaaaaagctgaccaaatcgtaataccctcgctgtcgatgggctccacctacatcacaaattttagtcaccctgtattcgcaaagctttttggtgtcgaaaatggcttgcaataaagcttccatatcctttcacatactatgaagaacttaccttgaatgtagagattatggtggtttgccgcagggtgcgatggagccactccagatacgtgtccgccgcctgccacacgatgaactcgtcctcgtttcgcaggtgtccgagaaagttcagggccagatcgtaggtgacaaccccggcaccggccaggttgaggacatcgctgatcagctgcgcccgtgtaaagcggtcaatgctgctggcatttgtgccggaaagagcatttccaatcagctgccagttgcgctcgtcataggtaatgcgacagggcgtggccagtcggagattgaagaccacccacttgtctggttgggccacctcgttaaggataagcggactggcggtctgtctgccctggcaggtcagccattcgctgggcagcgtcgatacaaagctatcgatgccggctgttgcgaaggtcagtggcacccaccagcattgttggcgtttctgcataagcttgcctggattgcgcagaaagcgctcttgggttacggtcacctcgttggtatcatagttgcgcaccacacgaatgagcggataacccggttgcattgtccacgagtccatcagctggctcactttgatgtcctgacgcaagctcatctggttgtccgattcctcctgcaatgtgtgccacaggaatgcctgattggaggaggatcccttgtgcgagcgctgcaggtacaggcgcaacgcgtttaaaaaggcctggagttttatgggtgcacgaagatataactacctaacacaataattattgaaataaatgaacctgggtcccaatgagggagtgcagcatgcggaatagaagggctgacttctgattcgcctgggtatctgaggacttcgaggcgtaagcaagactcatgggataagcactgctcttggagtcctcaactagtacagccaatgcctgtcgcaccatggatagctcatggaaccgccaggcgggctccacattgtccacggcaaatccggacacatagtcggataggccattgtgcagccagtaaagggcggcattctccaagtcggagagccagtggtgggcgaactcttgggccacgtgactggccacctgctgcttggccctagtcgtcgagcgctgcgcgctgtagaggaatgctgcctccgggtagctcaccaatcctaaatgctcgtgactcttgtaacgaaaatgggttatctatgttgcagtggtcttcaatactccacccttacctgataggccgtgtcgggcagaaccagttgatcaatcttcatcgcaggatacggctttccaaagaggctaataaagaagacaataatctgcggtgttatgctaatggcgtagtctccctgatccgcgatcttcggtcgcagccaggtggtcagcgcggggcctttaggaatctccgcggacgttcgattggtgaaccggttgatggagaaggccaatttctgtactgacatcgctggggtctgctgaaaggtagtccatacgtagtcatccttttcatggctgccaaaggaaattaagtaatgcagatatagtacatgattatatatacaaactcggaggtcttgagtactcgcatgttgctcacggcattggtacccctgggatgcgccaaattaagaatgaagggagcgaggaacgtgcgattctcgaaacagggaaagactgtgttggccagattaggagccagttgcgtgaccgctatccactgcggatgatgtttggaatccatgtagccgcccacaaagtagccactggcgcgggacaactggccactaaactggacaaccagcgtatactcctcgcccagccagagcatactattgaacacgatgccaagttggtggacgctgctagcttgccacattttgcgcaccgtcacccgaccaccggtgttcctccggactagcaacacgttttcccccacttgtaggccattattactgaggataatcgtgcgagtttctcgccacacgcgcagccggatgataacctcgccgctgaagtttccactcagtttcaatggttccacctcggtcagcagactgagattgtagtgcagaggacgaaggttagacgcagttgccccagtaccacctataggcaggcataggtgcaaaacaatcaagtaccagggcagctttatcatttctgacgggctgatttagaatgatcagaattcgatggtcagaattcgacacacttgatcgctttgaacggcatgacgactgctctcccgaaatacactcggaaacgaatattattttaaattaaatacaaatggcttgattggcttgatgtacatacatatataaaaaaatgacaaaaattgtaaaaaattgagatgcaggatcgttgtaaaatgtaacggtcttggggtggaatacggaaagttgtcagttgattgtcgtttttgaccagtaatcaaagtagctgaaatatatttttaaaatgtaccgtattataaatagttaacttcgcttaaggatgaacaattttagctttatttaaagctttaccataaagatatttaaagctttcgtagcgccacctgtctgccacaaatgaagacccactgcacccttgcaaccagctgagtggtaagttgtagggtggatttcgattacgggactgcgcctgcgcaggggtgcctttctcttgtcttgctcatcggctctctcgtgtactgttattctcccgcctgcgaggttaacacgtttgcaaatgtcaaagccatgacttcagcgtaagttcctcgtccgttttagtttcagtgtgttctcagcatttggagcacttcgtttaaccaatacggtgcgcacacaaacacgccaaaaacgccaattaaacagatatacgataataaacaatattatttaaaacctaaccgaatttgtgtaaaaatcgtggatattaagggcgtttacggtaaatgtaaacgatttaatttcaatacattcttccgaatttgtcttcgataattagagacttaaattaaatttcccccgaaaattctgcggcccataaacgcgcgcgtgttcgcctgatttgccaatgtgttcgtgcgtgtttcttttatgtgtgtgtgtcactgtatgttccctatgtgggttgttgtgcgagtgtgtggctgagagagtacttattat

SEQ ID NO: 20819 - DNA, 2736 bp, DROSOPHILA
atgataaagctgccctggtacttgattgttttgcacctatgcctgcctataggtggtactggggcaactgcgtctaaccttcgtcctctgcactacaatctcagtctgctgaccgaggtggaaccattgaaactgagtggaaacttcagcggcgaggttatcatccggctgcgcgtgtggcgagaaactcgcacgattatcctcagtaataatggcctacaagtgggggaaaacgtgttgctagtccggaggaacaccggtggtcgggtgacggtgcgcaaaatgtggcaagctagcagcgtccaccaacttggcatcgtgttcaatagtatgctctggctgggcgaggagtatacgctggttgtccagtttagtggccagttgtcccgcgccagtggctactttgtgggcggctacatggattccaaacatcatccgcagtggatagcggtcacgcaactggctcctaatctggccaacacagtctttccctgtttcgagaatcgcacgttcctcgctcccttcattcttaatttggcgcatcccaggggtaccaatgccgtgagcaacatgcgagtactcaagacctccgaccatgaaaaggatgactacgtatggactacctttcagcagaccccagcgatgtcagtacagaaattggccttctccatcaaccggttcaccaatcgaacgtccgcggagattcctaaaggccccgcgctgaccacctggctgcgaccgaagatcgcggatcagggagactacgccattagcataacaccgcagattattgtcttctttattagcctctttggaaagccgtatcctgcgatgaagattgatcaactggttctgcccgacacggcctatcagagtcacgagcatttaggattggtgagctacccggaggcagcattcctctacagcgcgcagcgctcgacgactagggccaagcagcaggtggccagtcacgtggcccaagagttcgcccaccactggctctccgacttggagaatgccgccctttactggctgcacaatggcctatccgactatgtgtccggatttgccgtggacaatgtggagcccgcctggcggttccatgagctatccatggtgcgacaggcattggctgtactagttgaggactccaagagcagtgcttatcccatgagtcttgcttacgcctcgaagtcctcagatacccaggcgaatcagaagtcagcccttctattccgcatgctgcactccctcattgggacccaggcctttttaaacgcgttgcgcctgtacctgcagcgctcgcacaagggatcctcctccaatcaggcattcctgtggcacacattgcaggaggaatcggacaaccagatgagcttgcgtcaggacatcaaagtgagccagctgatggactcgtggacaatgcaaccgggttatccgctcattcgtgtggtgcgcaactatgataccaacgaggtgaccgtaacccaagagcgctttctgcgcaatccaggcaagcttatgcagaaacgccaacaatgctggtgggtgccactgaccttcgcaacagccggcatcgatagctttgtatcgacgctgcccagcgaatggctgacctgccagggcagacagaccgccagtccgcttatccttaacgaggtggcccaaccagacaagtgggtggtcttcaatctccgactggccacgccctgtcgcattacctatgacgagcgcaactggcagctgattggaaatgctctttccggcacaaatgccagcagcattgaccgctttacacgggcgcagctgatcagcgatgtcctcaacctggccggtgccggggttgtcacctacgatctggccctgaactttctcggacacctgcgaaacgaggacgagttcatcgtgtggcaggcggcggacacgtatctggagtggctccatcgcaccctgcggcaaaccaccataatctctacattcaagggctttatgagagacctactgcagaccaagtttgatgagctctttaagagagatggctccgcagctgaaaatgcaaacattaccgaactgatggtgatcgtcctgcagttgtcctgccgaactgatctggaatcctgtgcggacttcgcactcaaggaattcgctggcctcaccctggagaccaatcgcattccggtggatctaagcgaaaccatctattgcacagccatacagtttggaacggaagctgattggacgctgctgagaagactctacacgcggtcaaatgtgagcgaagagcgacggatccttctgagtgccatggcctgcagtcgagaaaactgggcgctggacaagctgctcaacctggcatttgccggtcgatatatgcccaaggatgatgtcctgctgatcttcagtgccgtggcgcagaatcctttgggctacaacatagccaagaaatacctggtggacaacatcaaggcaatcattaaattatatggaagcaataccgatgaactggcacagctagttaccgttcttatgaaagaggtcaccacggaagaagagctaaacgctttacgaatgtttatgagaaccgatcttcagaaccttccgggctttgaaatagcctttcgtcgaatcctggaactgggcgaagacaacatatcatggcataaccgacaataccataatctgctggccgccgtttgcaatataaccgggtccatagagccgcagtgcatctactag

SEQ ID NO: 20820 - protein, 911 aa, DROSOPHILA
MIKLPWYLIVLHLCLPIGGTGATASNLRPLHYNLSLLTEVEPLKLSGNFSGEVIIRLRVWRETRTIILSNNGLQVGENVLLVRRNTGGRVTVRKMWQASSVHQLGIVFNSMLWLGEEYTLVVQFSGQLSRASGYFVGGYMDSKHHPQWIAVTQLAPNLANTVFPCFENRTFLAPFILNLAHPRGTNAVSNMRVLKTSDHEKDDYVWTTFQQTPAMSVQKLAFSINRFTNRTSAEIPKGPALTTWLRPKIADQGDYAISITPQIIVFFISLFGKPYPAMKIDQLVLPDTAYQSHEHLGLVSYPEAAFLYSAQRSTTRAKQQVASHVAQEFAHHWLSDLENAALYWLHNGLSDYVSGFAVDNVEPAWRFHELSMVRQALAVLVEDSKSSAYPMSLAYASKSSDTQANQKSALLFRMLHSLIGTQAFLNALRLYLQRSHKGSSSNQAFLWHTLQEESDNQMSLRQDIKVSQLMDSWTMQPGYPLIRVVRNYDTNEVTVTQERFLRNPGKLMQKRQQCWWVPLTFATAGIDSFVSTLPSEWLTCQGRQTASPLILNEVAQPDKWVVFNLRLATPCRITYDERNWQLIGNALSGTNASSIDRFTRAQLISDVLNLAGAGVVTYDLALNFLGHLRNEDEFIVWQAADTYLEWLHRTLRQTTIISTFKGFMRDLLQTKFDELFKRDGSAAENANITELMVIVLQLSCRTDLESCADFALKEFAGLTLETNRIPVDLSETIYCTAIQFGTEADWTLLRRLYTRSNVSEERRILLSAMACSRENWALDKLLNLAFAGRYMPKDDVLLIFSAVAQNPLGYNIAKKYLVDNIKAIIKLYGSNTDELAQLVTVLMKEVTTEEELNALRMFMRTDLQNLPGFEIAFRRILELGEDNISWHNRQYHNLLAAVCNITGSIEPQCIY

SEQ ID NO: 20821 - DNA, 3758 bp, DROSOPHILA
gtagtagaattcgcctaagctttcgcttcagtttagatgctagatttagttctcgtttggttttgtcacttcgtttggtttgactttacagagatgagagattggtttccgattcgtcttacaatttgttagcaaataatttaaataacctaatttgcttttattaagtttttttgttttgtttttttttttttttgtttggtttgcctctttaaatcttcttcatcatcatcatcaacttcttcttcattcttcttcttgaatggggaaatgcgcgcaactggcaactgcttcgtgtctactgctttatggtcaactgcttgccaaaaaagacaggcgcgcatgcgcactttaatacttctgcttagcttttacatttgctcttttgatataacgttgcacaaaattttgatatatatatattttttttttatatatataattctataatctttcaactttataattagcttccattttggggggggggtgttgttgttatgcatttttgcatttaataccaataagtactcgttaacgcttgctgcaatgctgctgctccgctcttgttgttgtagtggctgctgttgctgttactgttgttgttgctgtgttgttgtggtgttggtgatggtggtggtgtctctgctcttgctccttactatccttgatcaatttcgccttctatactatatacgatctttcaattagttgtgttctatgtctgtatatgcccagtgtttatcttctttgagccgaacttgagactattcctatgttccgaactgtatgtgctgactccctcccaccgttcgctgcttaactgtcgactaccaactgactatgctgctcctcctcctcctcctcctcctcctcctcctcctcctccttctcctccgatcccctggaccaaccggatccctagaggacccatcgatccgactgactaacttgactgttacatatgtagctgcagctgtagctggtgctaactgacttagaattatccattgattgaattcgcatttgcattggccgctgctgctgccgcggctgacagtgatttctggccctcctccgccggcgagggcgttgcatcccgccgcggcggcatccgttcgttgacggcatccaggcccttggcctccgcgaacgaggtaatcttgtgattgggcgagaagccctgcatggcgttcttgagcgactgcttgccgccggagagggcgccgaggggcagggcgcccgtgggcgtcagtcccttcagctgcagcaccgactcggactcctcgcgcagcacggagaagacgcgcgccatcttgccaatggcacggatcttgttgcgtatcacctccttgcgcagcgccgcctcgtcgtcggagagtggctcctcgctctcctcggtcatgagctcgtcgtcggagcagatgttcagcacgttcaccaacatctcggtgaccttctcgcccacgaagggtagcgaccaggtgaacacgtccatgaagttgggcagccagtacgggtgcggcgagcagttgaattgccggatgttcatcacgttgttctcgtacttcagcaccgccgccttgttgttgtacacgtcgagatagttgggcgccgagaagatggtgatcagcgaggggaagccggtggtctggcttttgcggtacatgcggtagccggcgtcctgcgcctcgtgcgcccggatgatcgacagcaggttgttgttctgcaggaagtcgcagcaggcggcgtagctgtagaagtacgagcaaccgcgcacggagttgtgcgtgtagaagtccgagttcttctcgttgccgaagtcctccagcggatcggaccacagcaggtcgcacatggggccaaaggcgggaggctccttgaagcggtcgagccgtcggatgtcctccagctcgtgtatctccggcgacagaccgccgtgcacgcagaggaactgctggttcatgagcgccgccagcggcaggcagtcgaatgcgtccatgcaggcgtcgtacacgcgctccgagtacttgatcttgcactcctgcttgaaggtgaagtactcggttaagtgccggcactcgtggttgccgcgcagcaggaacagcgtctgcggataggtgatctttagcgaccacaaatacagtacgcactcgatgctgaagtagccccgatcgacgtagtcgcccaggaacagatacttggtggtcgccggcgagcccccaatctcgaatagcttcatcagatcgtagaactggccatggatatcgccgcacaccgtcaccggcgcctcgatgtcgatcatcgtcttttccgtgcgcaatagcgtggcgccctcttggataatgcgcagggcggcgctctcctcgatcctgccctccaggatgaagtgctgcttgaggacatcgtgctgcggctttccggtccgcgcgtcgaacacatccgcgcaggtgagtttacggctcggcggaaatgccacgctgtcgatcacacgctcctttgtcgatattgtgctgcgcttggttgggctggatggaccgctcgaggttccagtgccgccctgaccctgctgctgtgtgcccgccgagcctgccgctccgcctgatcccgatcccgccgctgtccccgtcgtcgccgcggcattcttgttgtcgtgtgtgttgttgacattggccttttgattctgctgctgctgctgctgggctgcggactgcgactggctgctgctgctgttgctctgcgccgccggcgaagacatggttgcccgatcctccgactgccccgcctgcgtcctcaactgctgactgctgctgattctggagcttctgctggctgctggttgctgaccttcccacccgtaagagttgatcacgtgtcactgctccagacgcgccagctcctgctccaccgccaaatgctgctgctgctgttgctccttgtccttgtctatgtcctgattcgtccgtggtattcccctctctcactgcttgctattccacgcgctctgcaatgaaaaatgtggacgcccagttagcatttgtatttatattcatgctggcgcacagtacatggctgctattaaaaataaaagagtcccgaccaccaaatgtgctaaatagtatacatctatactattttcttttcataacaagcatatgaatcatatatagaataatacaaacattatgggtagctaacagaggaacctcaaaattatgcctttcagatgagcgagattaaaagattttatccaaatatttgtgtaaagccaactataagcaacatctattataaagtgctattatcttgaccgccactgtggtgctcgcacacacacacacacacacacacacattgcaattttgcaggtgtgtgggtggccatttacagttaaacaattgcaacgaaatttcagcggtttattagtcagaaataaggaaatgaggcaactgcaacagtaaatcaagaaccgaattagattcgaaaattatactatttgttcaaatttcatatatgtatgtatgtatatatgtatatgtataagttctatagtacctgctgaaattacaattgaaaagactaaagattgagaacaaagtggcacattatatgcgaagggtattaattgaaaacgtcagaaatacattatgtatgttatttatacgcattttaaatgtcagtggctgtaatgaaacatgcttaaaagggcattgcaaattctgaaggttaaaccaagtgacggaaatcgtatatacata

SEQ ID NO: 20822 - DNA, 1758 bp, DROSOPHILA
atgtcttcgccggcggcgcagagcaacagcagcagcagccagtcgcagtccgcagcccagcagcagcagcagcagaatcaaaaggccaatgtcaacaacacacacgacaacaagaatgccgcggcgacgacggggacagcggcgggatcgggatcaggcggagcggcaggctcggcgggcacacagcagcagggtcagggcggcactggaacctcgagcggtccatccagcccaaccaagcgcagcacaatatcgacaaaggagcgtgtgatcgacagcgtggcatttccgccgagccgtaaactcacctgcgcggatgtgttcgacgcgcggaccggaaagccgcagcacgatgtcctcaagcagcacttcatcctggagggcaggatcgaggagagcgccgccctgcgcattatccaagagggcgccacgctattgcgcacggaaaagacgatgatcgacatcgaggcgccggtgacggtgtgcggcgatatccatggccagttctacgatctgatgaagctattcgagattgggggctcgccggcgaccaccaagtatctgttcctgggcgactacgtcgatcggggctacttcagcatcgagtgcgtactgtatttgtggtcgctaaagatcacctatccgcagacgctgttcctgctgcgcggcaaccacgagtgccggcacttaaccgagtacttcaccttcaagcaggagtgcaagatcaagtactcggagcgcgtgtacgacgcctgcatggacgcattcgactgcctgccgctggcggcgctcatgaaccagcagttcctctgcgtgcacggcggtctgtcgccggagatacacgagctggaggacatccgacggctcgaccgcttcaaggagcctcccgcctttggccccatgtgcgacctgctgtggtccgatccgctggaggacttcggcaacgagaagaactcggacttctacacgcacaactccgtgcgcggttgctcgtacttctacagctacgccgcctgctgcgacttcctgcagaacaacaacctgctgtcgatcatccgggcgcacgaggcgcaggacgccggctaccgcatgtaccgcaaaagccagaccaccggcttcccctcgctgatcaccatcttctcggcgcccaactatctcgacgtgtacaacaacaaggcggcggtgctgaagtacgagaacaacgtgatgaacatccggcaattcaactgctcgccgcacccgtactggctgcccaacttcatggacgtgttcacctggtcgctacccttcgtgggcgagaaggtcaccgagatgttggtgaacgtgctgaacatctgctccgacgacgagctcatgaccgaggagagcgaggagccactctccgacgacgaggcggcgctgcgcaaggaggtgatacgcaacaagatccgtgccattggcaagatggcgcgcgtcttctccgtgctgcgcgaggagtccgagtcggtgctgcagctgaagggactgacgcccacgggcgccctgcccctcggcgccctctccggcggcaagcagtcgctcaagaacgccatgcagggcttctcgcccaatcacaagattacctcgttcgcggaggccaagggcctggatgccgtcaacgaacggatgccgccgcggcgggatgcaacgccctcgccggcggaggagggccagaaatcactgtcagccgcggcagcagcagcggccaatgcaaatgcgaattcaatcaatggataattc

SEQ ID NO: 20823 - protein, 584 aa, DROSOPHILA
MSSPAAQSNSSSSQSQSAAQQQQQQNQKANVNNTHDNKNAAATTGTAAGSGSGGAAGSAGTQQQGQGGTGTSSGPSSPTKRSTISTKERVIDSVAFPPSRKLTCADVFDARTGKPQHDVLKQHFILEGRIEESAALRIIQEGATLLRTEKTMIDIEAPVTVCGDIHGQFYDLMKLFEIGGSPATTKYLFLGDYVDRGYFSIECVLYLWSLKITYPQTLFLLRGNHECRHLTEYFTFKQECKIKYSERVYDACMDAFDCLPLAALMNQQFLCVHGGLSPEIHELEDIRRLDRFKEPPAFGPMCDLLWSDPLEDFGNEKNSDFYTHNSVRGCSYFYSYAACCDFLQNNNLLSIIRAHEAQDAGYRMYRKSQTTGFPSLITIFSAPNYLDVYNNKAAVLKYENNVMNIRQFNCSPHPYWLPNFMDVFTWSLPFVGEKVTEMLVNVLNICSDDELMTEESEEPLSDDEAALRKEVIRNKIRAIGKMARVFSVLREESESVLQLKGLTPTGALPLGALSGGKQSLKNAMQGFSPNHKITSFAEAKGLDAVNERMPPRRDATPSPAEEGQKSLSAAAAAAANANANSING

SEQ ID NO: 20824 - DNA, 2371 bp, DROSOPHILA
gtcacttgcgtcatgagcagggctgcagtgcaagaataacaaagccagggctacactttgaccaagctatgaaggaagacccctgttatcaacaatcgaattttatacaaaagttcttattaggatttttaagtacgaaataatcactatttcttcgatagcaacaaaaagagatgtccaaaaggggaatgtcatacctcgttgaattcgtattaaaattccctatcgacctgtattcaaagttggaaactctaattttttgccatttttcgcaaatttagatgatgatcgaaaatgcgaaaatttgttaaaaaatttatttttgggaatcataaaaatagtgttagggatggttagctatacctaatggaagtacaaaacagtcttttagctgtgccaccttttttggccaagttatggggtgaaatcccgttgcattatatcacatttagacgtcatatttattttgttcttttgttaataaacaatcagtatttcttcgatgggaatacaaatacttgtgcaaaagtggaatatcatcatacatcgttgaattcgtaattttttgttgtaatttattgatgtacatttttcgccaatttcccgtttcacattacaaatagtttattttttcattaggcaagaagtttacggagcttgtagacattatagaaatgttaaaatattatattaatgataataatgtcaaatgattggtattggtgtcattggccttctgccgatctgcgccagctcgattaattggttaatccagtgactctgcagcgtcctcctcttcctgccaagatgtcaagctgaacgggttgcaatgtacacgacgatatgtatatatgtccattgccaacgagctaaatatgtcatatacattccttccacttttggcggaaacctcttcaaagcagattgactgacgatgggcatagttgaacccctgcgccatgctcacctggcgatggttcggatcatcacttttgttgcccaccagcaggacggttaccttatccggacacaggcgccgtatctccttcatccagccatcgatgttttggaaacttttggacgacgttatgtcgtagacgagcagtatgccatgggcactgcgacattgggtcgccttcagcaatttgaagcgctcgtcgtcggaggtgtcccagacttgcagcatcctccccatcctccaatcggcaaactccacgctgcactcccttctatccatgcccaccgtgacccggtgtctttcggtgaattggttatccgagaaacgcatcagcaggcaggttttgcctacgccgctgtcacccaggatgataatcttaaacggattgtcgtattggctcatcgttaattcggtttggtttaatatgtataacgattcgactgaagtgacaattttagcttggcttgttctgggtttttgttttttctgggacagaatgtttcaacacaatgtttcaaagtagtctacttttaaataggtccatcaattgcgattggaaaattattttttaattgatatagtagttacaagttatggagaaaaccccgtatgtaaatattcgttttctggaaattgaattttttggtaaaaaataatcagtattttctcaatagcaataaaaatatttgtccaaatgtggaatgtcatacctcattgaattcgtaacgaaattccctatcgacctgtattcaaagttagaaactcaaattttttgccatttttcgcaaatttagatgatgatcgaaaattcgaaaatttgttaaatttttttttttttggaatcataaaaatagtgatagggatagttagctatgttatttggcagtacaaaacagtcttcattttagcggtgatatattttttggccaagttatgaagaaagccccgcatgtaaatatccgttttttgggaaatttaattttttggtaaaaaataataagtattttcttaataagaataaaaataatcgcccaaatgtggaatgggatacctcgttgaattcgtaacgaaattccctatcgaccagtattcaaagttggaaattctaattttttacaaatcggagtcgaaatttgtggtctttctagtagatgcactgcggctctatggacccggttatattgcaaacggcggccagcagattatggtattgtcggttatgccatgatatgttgtcttcgcccagttccaggattcgacgaaaggctatttcaaagcccggaaggttctgaagatcggttctcataaacattcgtaaagcgtttagctcttcttccgtggtgacctctttcataagaacggtaactagctgtgccagttcatcggtattgcttccatatctaaaagtgcaga

SEQ ID NO: 20825 - DNA, 371 bp, DROSOPHILA
ccgaattaacgatgagccaatacgacaatccgtttaagattatcatcctgggtgacagcggcgtaggcaaaacctgcctgctgatgcgtttctcggataaccaattcaccgaaagacaccgggtcacggtgggcatggatagaagggagtgcagcgtggagtttgccgattggaggatggggaggatgctgcaagtctgggacacctccgacgacgagcgcttcaaattgctgaaggcgacccaatgtcgcagtgcccatggcatactgctcgtctacgacataacgtcgtccaaaagtttccaaaacatcgatggctggatgaaggagatacggcgcctgtgtccggataaggtaaccgtcctgctggtg

SEQ ID NO: 20826 - protein, 120 aa, DROSOPHILA
MSQYDNPFKIIILGDSGVGKTCLLMRFSDNQFTERHRVTVGMDRRECSVEFADWRMGRMLQVWDTSDDERFKLLKATQCRSAHGILLVYDITSSKSFQNIDGWMKEIRRLCPDKVTVLLV

SEQ ID NO: 20827 - DNA, 7855 bp, DROSOPHILA
agccagtggcggagtaggcggaaactggcgtactgctcctgcgacccgtgaggaaaaaccagcagctaagcgcgatcaagcccaggaaaagggtaagtaatctcagcagcaaacctaatttccattcttatcaatgcgttacatctttcagagaacaaagctggcgatgatggcgagtggaccagcgttaagcgtcgttaatttttattttcatcatcgtatatacccagcataatattcttaataagtttttatttcatccgacttgtactttattggtgtagagctcagtcggccggtatattatatctatctatccaaagcttgtgccagatagttaaaattgagatggttgtaggaccgatactaattaaagtactttcgaataaaataactatgttctaaaaaattgaaaagtgaaattgtcgaatgagaaccttgggaatcaaagaaatgaaaagtggttattattggtttaattcaaaaattctaattcttatttatcagatttcaggatgaaccaagcttcccttatacgtacagtgatttataaaccagtccctttaaatttatatttcgacagagctaaaactacattaaaatgtagtttgcaaactaaacaaatgcgggttcttctatagttttacaaagttcgttcttggaagcgtggctttttaacattaggttttttaattgcccataaataaaaaatgcattcaaaagtattgtaaattgtattatcacatacgcttgacttattttaaaaaagtgacatctttcttaggtaaaaccatattcgttgggaataaattcgagtaaatttagaaaagcttttatagcaagcaaaacaaaaatattctgcctctgaaaatttgcctcgataatatgagcccgcgccttcttcgcacactcaactagtattttcttgcgaacttggcactaatgccatggcctcgcggatcctccgcggtgcgcgcccctggtcacactgtctgtgccgctgccgcgaatctcggtccacgtgaacaaattttggacaatgtgctatacggtactcatgagataaagtgattgcgggttgctttggagtgcagtgacgttggcccatcttaaaccgcgggtgatcgtgatcttcgggcggaacagaaagacgcagtttgactgccgcaagaaaaagcccttttgggcaccggacttgtgtgcttgtgttagtgctgcagacgcggcgctcaacatgtgaggttaaagcagacggcggcaaaaatccgaacgaacaagcgttcggctggggaagccctttttcgagtgaaataggtgatccggaaccacaacggaagctcagaaggtaatattgctaggcgcgtgccacagattggacatcgcgaatgcgatagcgaatccgctgagctttggggagaaaggctttcgaaaccaaagtgccaaggtgataggcaagacctgcgaaacgtattcattcaactcgattgcttttcgccaaggagtgcagtatcaaaagcacatggcgtggcggcatttacacgcacacgcgcccatcgtggctcacatacacatacacgtggttggggcaaacatgtgctgttgctgctactgctgcttcttctttccgccatcgtcgttgtgtgggcatgtttgttattgttgtcgttggctaaaactattgtgttttgtgttccaggtccatgtgtaggtgatgcagaggcgctgaagattgattaaaatcatttacacccgtcaatcgtatagtagagggtatgtgactgcttcaattttcgaaatgttaattttaccatttaggaaatcttggtatctagtgtcaaaaaacacctttcgtgcaggctttcaatattgcggccacagtatttacatcaatatattgtagatggaacttaaatttaaaactattcaactaaactataatagttttaagcaacaactatcaggaaaatataaacataattttgaatatatcgacaacctttcccagcccaaagaaaaaatctttgtaatgcaaaacatgaagttaaattgtgcaattcatgacatagttttagagaaatcttgtttaaatgattaagttaagtcatttatgacacgtgttaaggctttctaaagctacatttttattccggtttcggtatttatttacattgtaatttaattttaatgtcaatgcctatgtttaatttttaccctgatgatgtgtctctggcggagctcgacgttgtgcaagtgttgcatgcttgttatgcattttgttgaggattcttttgcggtccatagtcagcttagcgagttgttcctccaccttatccatcatttcggtttgcagatgtatacatgattggacactaacgcctctgatcgcaagttggccgatgtgaaaagacaactgagcattggtaccagttaggacaaagaagcctgttatgccaaaaatcctaataggcggtttgggatttctagctagctcagaaggcttgaagcatttgactttaacttcattctccaggttattgaaaactggtcgtggcaacagcaaatctgcaccgtgatcaggttccttttccatcggaattggggattttgaacagagtaggtttcgtgtcggcaggacagagtggaagtgcgacttaatttgttcgcaaaatttggacatcaatggcacgctggagtttggagttttattggcccctttattggtgttccttggaaccagtgcaataaatttattgtccttatcatatccggatgaagtggtattttggaattgttccgcgtcaaaagccttcttttttatttccgacaagaaggttttcttgtgactagttaatcgaattttttgcagagcatcacacagctgaattttcttttcggattcgtggattgactgttccaaagacggagttttttccttctcattctttccatctaaagtcgtctgggacatacctatatcttttttctttgagtatgtttcctttgagctagttgaattagtcgaacgagagattgggggaatcggtataacttctattatcctgggccaattcttctgacttgcttcctttgtggcccttagccgggactctgcagctttgcgttgacgccttgtgatcactttttttggcatttcgttttttttttttattattatttggttaacgggaagtgattttgtaaacttgatttttcaatatgttacaatcatatgacgattgtggattgatatcgaaaaggcaactatgattggtttcgtttttaggagttccctatttaatccgagtttatttgtttacagttacttaacttttgacgcaaaatggattcacgaatgctaaatgtgttccaaggagatacctttgaggcaaattataccaaatacgagtctgagccgatattctggtcatctaatgatgagtgagtgattgtcatcagaaaaatgtactaaaaactaatgcaaaccctttcagactgcaactgacagatacactgagcggcatcctacccatcgcgcccacagacgaatcactgctcaaccataaccgggaggaagatctgcaaaacagaaagaatctggtaggttttggctcgaggggcatacgagcgaatcacatttcagtattaattcgattaactctttaaatagctgatttacaacgactttctgaaacaggagctcagcaaccatgatgccaatgagctaaatgcccaggtctatcggtccatcgccgacagcgggggcgagattgcctatgagcagcagcgccagatcagcgccattgtggagtacgacaaagaagatattaaaatcgacggccttacggaggaggaggacatacaaagccagtccacatttcgcacccgcacagacagctcttcgattggtgactatgaatcgcactctagcgactatgatgatgaatttgacattgtcaacgaagaaaaaagtccaaggctgcaggttgtccataacaatatcggcaacttgcagagctcctgtgagcgcaagggacggacgctcagtactaacactattatctccgaagtagacgcattggggctaagtattgatgttaataactttgacctagctgattttattaccaaagacgattttgctgagaatttaaacgcctgtcgcaaaaaggaatctctgcaagcacaggcgcaaattaaatctaatactttagcagatgttcccatacttcttaatccaccggttgccacaattgtggcaaaacccggggtcccatcctctaaacctggcgattctgattatgactctgactcgattatcgacgttgaaactgtcgatgtactcgatatgaatatggccaatatctggtcaatagataagccggcaaaaatgggccaaactcccgatgaattacgctatgtggacaatgtaaaggccgatccctcttggagtccgagatccgcaaaaaagaccacacctactatcaaagaggtaagtcctatgacgacatactagttaagaaattctttataacagtaactgtcatactcaaaacagaataagccggaacaactggggaaccatcagctcgcggtcccagcatcaaacaaaccgaagcataagaatatttgcctggtgcctaataaaaaacagtgcgattttcttaaacgtaaggttggtagtccctccttgtccaagctaactaaggcgacaacaaaaaaagcgactgagtctatgagcaacaagcagccgtcagtaaaaaatactcaatgcacgggtctcggattgggtggaaaaaacctttcgcttctgaagcaggagagggacgccgcattatcggtgtgtgctgcaaaacctatagcacctccaaccctttcgacaacaaccccgactttgacaccgccagcaaagcgaaagctaaatctagaggaatataaacagcgtcgttgtggcggtgtgggggctgtgtatcctaaaccaactccgcccaagcaggcgaaaatagaggttgccgccaaacgcattgctcctaccccggtttcaaaaccaacaccttcaccaaaaaaagcggaaatagtcaatattgtaaacagccttaaatgtcctcgcacagaacaatcttctttgcccatggatcccattaccatggccaagaacaaggtgctgcgtatgctagagatgaaacgtgcccaacagctaaaaataatcgattcccgcgtatcagccaaggtgccacgcgtaaccaagctgccgccacttaaggatattgtaaaggacacctactgcatggaaactgaggatcctggcacagagatagcgccactcagcaacaaactccacccggactatgaggagattataatagtttcagctagttgcaatacagacataacaatacctcccaatcaattaagcaaggcctcccctcgctctctcttaaagtcatcagttttgctgtacaacatctcaaacggccaggatgccaataagaacatgagcaactccctaatagccagcatccaaagcgaggtcgccaggcaaacgagtaacactactctctcgacgatacagtccaacgcaacaaaagttatgtcttccgctgataagaattgtcagcatggcgaggacatggtcatcatgcacttacccaaggatcgggtgcgaaaaactcttgtgagcattgcaacccaaactgatctgcaacccgaatttcccctattgacgctgcccccaaagcgacagtctcgagagcgtacgcgtcgaaattatcgcaggcgacggacacaaggctcgggctcaaatatgtccacttcttcgagtgacttttcctccgactgcagcagcttggtgtcacacagatctcgctcacaatacgattcgattgatcagctgcgtaacttagatgtagcagccacgtgtgggggcagtattggaaacggcggttattcttctcgtagcactcaacgccatcgcagctcggtgagttcttcatcttactcagagaatggacagtacaggcgcaggcagcgccgcacgagttacaacaagcgtagatctagaaaccaaaagcggggcagtacttcctcgtcatgctcgggctccgaaaaaagcgatcgcgaacgtagccgcagcccacacagaaaattgcgccactcgcggtcccggtcgcgctcaaaatctgatacacgctaccctaacaacaactcctcctccaataacaacaatcggcgaggattttttgatcgtaacgtgtcgcaaccggccgttgaagagcggcgaatcgtctacgtcggtcgcattgagcaagaaaccaccaaggaaattctgcgtcgtaaatttctgccctatggaagcattaaacaaataacaatacactacaaggaaaatgggtaggaaaagaaaggccgcaaaactatttaaaaaagacatttaacgcattttattttagaatgaagtatgggttcgttacgtacgaaagagcgcaggacgcattcacggccattgacacgagtcatagagactcgcaaataagcatgtatgacataagttttggaggaagacgtgccttctgtcgttcatcttacgctgacttgggtgagtttttttttactttttacataattttatgtacgattttatctaatttgtcttttatagataatgctggcattaataattacaactcgtatgtgtttcccaaggaagcaccagcaccgaatgtagtcgaggactctttcgaagctttgttgcttcaggtaaaagcaaagttaaacgcgggcaagtcaccggtaggttcatctacgctggaggcaccatcagcttccggtactgtacttcagggccacagtcagatgtgacattttggcagaaaccggcttaatttcgtatttttaatttttaatttttttgagaatttgaagtatgttacaagcattctaccactatccttgcacaagtgtagaccaatttccgaagtctctatctataaacctgagaagcctgattacaattcttaatttatcttaaaatagttgacagagctatacaatgcaagcaataaaaacattgcaatgtacattaggataattgtaattaccgtgaaggaaacctaacaacaagaattgaaaagaaaatgaaattgtgataaccgcgtaatgcatacaaagtcatttaaagcacgtaagttaaaagaagatcaatagaaataaacacactcataaaagctttgtaataatctatttatgtaacaaccaaaccaatgggacttaaaacaaccagccgccacaacaataataacaactcaaattcattaaaactataaaatgtgtataagaacgttgtattttgagagagagcaaggaacgcgcatgcagcatgcgtcggccacgaattaaactgttgataactaaactttgatattagtttgtaaagagcatattttgtacgtacttttaatttactccgtaatttttgaatagcaattacatcaaatacagaagctccactaaagctattataaatacatcaaaatatagttttgaaattattagttaggcttctttctcttttcaaattttattccgtaatttctaacaagcactgactgacaagcctgtgtatcactgttacgatttatttggactaagctaaaattataaatttaaaataatataattagtttttgaaaacaatttgccaaacaagattttgaaaatgaatagtttaaaaactatggccgaaacgttgtgtttttaggaacagccatctcttgttttttatattcttttgtacttttggataatttaataaatcatttttagttcgaaaacaaaccgaaataaaatcaaacatttttta

SEQ ID NO: 20828 - DNA, 3570 bp, DROSOPHILA
ctgccgcgaatctcggtccacgtgaacaaattttggacaatgtgctatacggtactcatgagataaagtgattgcgggttgctttggagtgcagtgacgttggcccatcttaaaccgcgggtgatcgtgatcttcgggcggaacagaaagacgcagtttgactgccgcaagaaaaagcccttttgggcaccggacttgtgtgcttgtgttagtgctgcagacgcggcgctcaacatgtgaggttaaagcagacggcggcaaaaatccgaacgaacaagcgttcggctggggaagccctttttcgagtgaaataggtgatccggaaccacaacggaagctcagaagttacttaacttttgacgcaaaatggattcacgaatgctaaatgtgttccaaggagatacctttgaggcaaattataccaaatacgagtctgagccgatattctggtcatctaatgatgaactgcaactgacagatacactgagcggcatcctacccatcgcgcccacagacgaatcactgctcaaccataaccgggaggaagatctgcaaaacagaaagaatctgctgatttacaacgactttctgaaacaggagctcagcaaccatgatgccaatgagctaaatgcccaggtctatcggtccatcgccgacagcgggggcgagattgcctatgagcagcagcgccagatcagcgccattgtggagtacgacaaagaagatattaaaatcgacggccttacggaggaggaggacatacaaagccagtccacatttcgcacccgcacagacagctcttcgattggtgactatgaatcgcactctagcgactatgatgatgaatttgacattgtcaacgaagaaaaaagtccaaggctgcaggttgtccataacaatatcggcaacttgcagagctcctgtgagcgcaagggacggacgctcagtactaacactattatctccgaagtagacgcattggggctaagtattgatgttaataactttgacctagctgattttattaccaaagacgattttgctgagaatttaaacgcctgtcgcaaaaaggaatctctgcaagcacaggcgcaaattaaatctaatactttagcagatgttcccatacttcttaatccaccggttgccacaattgtggcaaaacccggggtcccatcctctaaacctggcgattctgattatgactctgactcgattatcgacgttgaaactgtcgatgtactcgatatgaatatggccaatatctggtcaatagataagccggcaaaaatgggccaaactcccgatgaattacgctatgtggacaatgtaaaggccgatccctcttggagtccgagatccgcaaaaaagaccacacctactatcaaagagaataagccggaacaactggggaaccatcagctcgcggtcccagcatcaaacaaaccgaagcataagaatatttgcctggtgcctaataaaaaacagtgcgattttcttaaacgtaaggttggtagtccctccttgtccaagctaactaaggcgacaacaaaaaaagcgactgagtctatgagcaacaagcagccgtcagtaaaaaatactcaatgcacgggtctcggattgggtggaaaaaacctttcgcttctgaagcaggagagggacgccgcattatcggtgtgtgctgcaaaacctatagcacctccaaccctttcgacaacaaccccgactttgacaccgccagcaaagcgaaagctaaatctagaggaatataaacagcgtcgttgtggcggtgtgggggctgtgtatcctaaaccaactccgcccaagcaggcgaaaatagaggttgccgccaaacgcattgctcctaccccggtttcaaaaccaacaccttcaccaaaaaaagcggaaatagtcaatattgtaaacagccttaaatgtcctcgcacagaacaatcttctttgcccatggatcccattaccatggccaagaacaaggtgctgcgtatgctagagatgaaacgtgcccaacagctaaaaataatcgattcccgcgtatcagccaaggtgccacgcgtaaccaagctgccgccacttaaggatattgtaaaggacacctactgcatggaaactgaggatcctggcacagagatagcgccactcagcaacaaactccacccggactatgaggagattataatagtttcagctagttgcaatacagacataacaatacctcccaatcaattaagcaaggcctcccctcgctctctcttaaagtcatcagttttgctgtacaacatctcaaacggccaggatgccaataagaacatgagcaactccctaatagccagcatccaaagcgaggtcgccaggcaaacgagtaacactactctctcgacgatacagtccaacgcaacaaaagttatgtcttccgctgataagaattgtcagcatggcgaggacatggtcatcatgcacttacccaaggatcgggtgcgaaaaactcttgtgagcattgcaacccaaactgatctgcaacccgaatttcccctattgacgctgcccccaaagcgacagtctcgagagcgtacgcgtcgaaattatcgcaggcgacggacacaaggctcgggctcaaatatgtccacttcttcgagtgacttttcctccgactgcagcagcttggtgtcacacagatctcgctcacaatacgattcgattgatcagctgcgtaacttagatgtagcagccacgtgtgggggcagtattggaaacggcggttattcttctcgtagcactcaacgccatcgcagctcggtgagttcttcatcttactcagagaatggacagtacaggcgcaggcagcgccgcacgagttacaacaagcgtagatctagaaaccaaaagcggggcagtacttcctcgtcatgctcgggctccgaaaaaagcgatcgcgaacgtagccgcagcccacacagaaaattgcgccactcgcggtcccggtcgcgctcaaaatctgatacacgctaccctaacaacaactcctcctccaataacaacaatcggcgaggattttttgatcgtaacgtgtcgcaaccggccgttgaagagcggcgaatcgtctacgtcggtcgcattgagcaagaaaccaccaaggaaattctgcgtcgtaaatttctgccctatggaagcattaaacaaataacaatacactacaaggaaaatggaatgaagtatgggttcgttacgtacgaaagagcgcaggacgcattcacggccattgacacgagtcatagagactcgcaaataagcatgtatgacataagttttggaggaagacgtgccttctgtcgttcatcttacgctgacttggataatgctggcattaataattacaactcgtatgtgtttcccaaggaagcaccagcaccgaatgtagtcgaggactctttcgaagctttgttgcttcaggtaaaagcaaagttaaacgcgggcaagtcaccggtaggttcatctacgctggaggcaccatcagcttccggtactgtacttcagggccacagtcagatgtga

SEQ ID NO: 20829 - protein, 1063 aa, DROSOPHILA
MLNVFQGDTFEANYTKYESEPIFWSSNDELQLTDTLSGILPIAPTDESLLNHNREEDLQNRKNLLIYNDFLKQELSNHDANELNAQVYRSIADSGGEIAYEQQRQISAIVEYDKEDIKIDGLTEEEDIQSQSTFRTRTDSSSIGDYESHSSDYDDEFDIVNEEKSPRLQVVHNNIGNLQSSCERKGRTLSTNTIISEVDALGLSIDVNNFDLADFITKDDFAENLNACRKKESLQAQAQIKSNTLADVPILLNPPVATIVAKPGVPSSKPGDSDYDSDSIIDVETVDVLDMNMANIWSIDKPAKMGQTPDELRYVDNVKADPSWSPRSAKKTTPTIKENKPEQLGNHQLAVPASNKPKHKNICLVPNKKQCDFLKRKVGSPSLSKLTKATTKKATESMSNKQPSVKNTQCTGLGLGGKNLSLLKQERDAALSVCAAKPIAPPTLSTTTPTLTPPAKRKLNLEEYKQRRCGGVGAVYPKPTPPKQAKIEVAAKRIAPTPVSKPTPSPKKAEIVNIVNSLKCPRTEQSSLPMDPITMAKNKVLRMLEMKRAQQLKIIDSRVSAKVPRVTKLPPLKDIVKDTYCMETEDPGTEIAPLSNKLHPDYEEIIIVSASCNTDITIPPNQLSKASPRSLLKSSVLLYNISNGQDANKNMSNSLIASIQSEVARQTSNTTLSTIQSNATKVMSSADKNCQHGEDMVIMHLPKDRVRKTLVSIATQTDLQPEFPLLTLPPKRQSRERTRRNYRRRRTQGSGSNMSTSSSDFSSDCSSLVSHRSRSQYDSIDQLRNLDVAATCGGSIGNGGYSSRSTQRHRSSVSSSSYSENGQYRRRQRRTSYNKRRSRNQKRGSTSSSCSGSEKSDRERSRSPHRKLRHSRSRSRSKSDTRYPNNNSSSNNNNRRGFFDRNVSQPAVEERRIVYVGRIEQETTKEILRRKFLPYGSIKQITIHYKENGMKYGFVTYERAQDAFTAIDTSHRDSQISMYDISFGGRRAFCRSSYADLDNAGINNYNSYVFPKEAPAPNVVEDSFEALLLQVKAKLNAGKSPVGSSTLEAPSASGTVLQGHSQM

SEQ ID NO: 20830 - DNA, 3427 bp, DROSOPHILA
agcgcgcgcacacgcgcacacacacagactcacggagagaaaactctcgtagttggtgctgttgctggctcttcttcttcttgcgcgagtgtttcctcggtctctccgctttgcgctctcgcctcgtccgttttctccgctctttcgttggtacacacaaaaatttttacgtcgtcagcttcgcacccatttggcttgattgaaaaaattctccagcgatcgtttggccgcgattttttcaaccaacccgactttatttcacgtatatgcacgaaacttaaattttaaaaaaatttcgacaccatttggttgcgattttttcgtaattttcgagcgtagtttctggaaaattttccgatgaaaaaagcaagatggcacacgtagctgcgcctgtgtgtgtatgtgggctggcagacgtgattcgggtgggaccctgacacgtcgtgtggaaagtgctaacgcgtttctgcatggaaagtgccgccagcatgactcatcacggtatgtttttagtattttttgggatttttgagggtgattacgtgttgctacagtggccactgccttatgtcatatctaatttaatccatttctttaaaaactgtttaaaatatatcaataatttgtcaaaaagttagtaaaattaattttaaattatgcttcgaactttaattttagcactcttttacttatcaaatttactcgatatttaaacaattaagtaaaaataatttttttgtccaatatttacacatttcatagtagtattataaattgatgtattgataatatgcagttcatatgtccaaaaacttccatcaagctgttaaatacaaaaatgtgtaaacagatttccagaacgttccagcaagtgtctactgttccccaaaaaagctgcgattttaagtatttatttggtactttccccaaaattataggtttttggtagaacttgggcatacttgttagccaatatgacttgaaaatattgtcataaatacattgttaaataatttaataagtcgtacacttacaatgtacaaaatattttagtttgtagggggactggggatgcaataggaaatggacaacctaaatttatacgacgttcttaaagtggctccggatgcaactgatgaggaaataaaaaaggtatgtaacagttccaattcgatatgttggtaaatagtttgtattcaccttttcaccaatagaactaccgaaaattggcaaaagagttccatccagacaagaatcccgatgcgggcgacaagtttaaagaaatatccttcgcctacgaagtgctgtccgatcccgagaagcggcgcatctacgaccgatatggattgaagggcctgcaagagggcgccgagggattctctgatgcctccgaattcttcgcccagtggttccccttcgatcgagtctcgtccgaaggtcggggcaggcgcaatggcaaagtcgtggtaaaagtggagctgaccctggaggagatctacgtcggcggcatgaagaagaaggtggagtacaatcgccagaagctgtgctccaagtgtaacggcgatggcggtcccaaggaagcgcacgagagctgcgagacctgcggcggagctggacgagcggccgcatttaccttcatgggtctcagccccttcgatacggtatgtaagaattgattgtagttgtagtgaatgcacaccgcggaccacacatccgtggagatcccatataccacacttcggagcagattatttaaattatttttttttgcagacctgtccgacttgcgatggcaggggcttcaccataagggacgacaagaagtgcagtccctgccagggcagtggtttcgtagagcagaagatgaagcgggacctggttgtggagcgaggagcaccgcacatgctaaaagttcccttcgcaaatgagggccaccaaatgcgaggcggcgaatttggggatctgattgtagtcatctcccagatggaacatccaatctttcagcgccgccatgccaatctgtacatgcgagacctggagatcaacatcacggaggccttgtgcggctactcgcattgtttcaagcacttggatggacgaaacgtctgtctgcgcacgtaccctggtgaagtgttgcagcacaaccagatcaagatggtgcgaggcagtggtatgcctgtttttaacaaggccaccgacagtggagatctctacatgaagtttaaggttaagtttccggacaacgactttgccacggcaccgcagttggccatgctggaggacttactccctcccagacagccgatagtgatcccaaagaacgccgaggaagtgcaaatgacggactataagccgcagccacgacagcaggaagacgaggacggacagtcgtctcactttgagggcgtacagtgccagacggcttagtgcatgtggttgtggctcctgcaggcgcggtatctctgcctcgatttgtggctcatcctgggcactttcagcgtagatgaagtctgcttcctggtgccgctgttcgtcctgatatgcatagtattatttttcatacaggaatgtttgctgtgaaaagcgcgtgatctaaattcgtagtgttattattcgagactaaagcttagctgatctgtcactaatacattagccacgctaaattaactattaactacttatttattggtacctattttttgggctgaacttgccccaattatccctacaaaactataaacgaatacacaataatagttctctcatagaaatcttaaaaaccggataaatttaaatcgatttacgtatttttatttaatttttaatattgttgctgagaattgagtattcaaagattcgaaagatccgttttaatcgctttcattggattcatcagcggatgtcgtttcgtctgattgaccaccatctgtcttggtcaaattcataggcgaccctttgggctttggcatgacttgtgatgaattcaatgatttaaatgacaagggttctaaatttggctccgtcttggctccctcttgcggcagctcatcgctgttgcctgccaagtcctccgtctggtcatccctgggctttcgtaaatccagtgccgaggtcgaatgagcactatccaccatctcgatgatctcctccgtttccatgggatgatggtcgtctagcttctccggcggcatcacaatcatttcacccgtgcgcattcccttcgaatcggccaattgttcggcgcttaccttcatcatagtcagatactgattgtacttggcgtagttgcgcctaccggtctcatcgttcatcagcacctgggcctggttatgggatctatcgcggagggccttcaaacggatgtgcttggtgatgtcccagcgccagttggagcgataggcgcacagagagcattcaaagggcttcc

SEQ ID NO: 20831 - DNA, 1253 bp, DROSOPHILA
cattgttaaataatttaataagtcgtacacttacaatgtacaaaatattttagtttgtagggggactggggatgcaataggaaatggacaacctaaatttatacgacgttcttaaagtggctccggatgcaactgatgaggaaataaaaaagaactaccgaaaattggcaaaagagttccatccagacaagaatcccgatgcgggcgacaagtttaaagaaatatccttcgcctacgaagtgctgtccgatcccgagaagcggcgcatctacgaccgatatggattgaagggcctgcaagagggcgccgagggattctctgatgcctccgaattcttcgcccagtggttccccttcgatcgagtctcgtccgaaggtcggggcaggcgcaatggcaaagtcgtggtaaaagtggagctgaccctggaggagatctacgtcggcggcatgaagaagaaggtggagtacaatcgccagaagctgtgctccaagtgtaacggcgatggcggtcccaaggaagcgcacgagagctgcgagacctgcggcggagctggacgagcggccgcatttaccttcatgggtctcagccccttcgatacgacctgtccgacttgcgatggcaggggcttcaccataagggacgacaagaagtgcagtccctgccagggcagtggtttcgtagagcagaagatgaagcgggacctggttgtggagcgaggagcaccgcacatgctaaaagttcccttcgcaaatgagggccaccaaatgcgaggcggcgaatttggggatctgattgtagtcatctcccagatggaacatccaatctttcagcgccgccatgccaatctgtacatgcgagacctggagatcaacatcacggaggccttgtgcggctactcgcattgtttcaagcacttggatggacgaaacgtctgtctgcgcacgtaccctggtgaagtgttgcagcacaaccagatcaagatggtgcgaggcagtggtatgcctgtttttaacaaggccaccgacagtggagatctctacatgaagtttaaggttaagtttccggacaacgactttgccacggcaccgcagttggccatgctggaggacttactccctcccagacagccgatagtgatcccaaagaacgccgaggaagtgcaaatgacggactataagccgcagccacgacagcaggaagacgaggacggacagtcgtctcactttgagggcgtacagtgccagacggcttag

SEQ ID NO: 20832 - protein, 389 aa, DROSOPHILA
MDNLNLYDVLKVAPDATDEEIKKNYRKLAKEFHPDKNPDAGDKFKEISFAYEVLSDPEKRRIYDRYGLKGLQEGAEGFSDASEFFAQWFPFDRVSSEGRGRRNGKVVVKVELTLEEIYVGGMKKKVEYNRQKLCSKCNGDGGPKEAHESCETCGGAGRAAAFTFMGLSPFDTTCPTCDGRGFTIRDDKKCSPCQGSGFVEQKMKRDLVVERGAPHMLKVPFANEGHQMRGGEFGDLIVVISQMEHPIFQRRHANLYMRDLEINITEALCGYSHCFKHLDGRNVCLRTYPGEVLQHNQIKMVRGSGMPVFNKATDSGDLYMKFKVKFPDNDFATAPQLAMLEDLLPPRQPIVIPKNAEEVQMTDYKPQPRQQEDEDGQSSHFEGVQCQTA

SEQ ID NO: 20833 - DNA, 8991 bp, DROSOPHILA
gcataaaagcccgtcgagtatttaagcacactcacacaatgcaaactactatagaacatatagtgtcgtgcattcgtttaggtgcgagccacacactttgtgccccacacgccatctaaatttggggcagccgagtgcctgcggttgcagagtgtgaaatattttgctgccccacacttagtgtgtgtgtgtgtgtgccatatcttgtctggggtctggatctttcacatactcatacatttcctaaataaacagcaggtccctgtgcctttccagcgaatttccacatttcctggctgcgaaatgcggtggttccccttttcgattcatttgcctgcattatgttgcggcacttgatttaatggcgccagtcatgacccttttaatcgccgaccaaccaagcaggaaagatttgaattccattctcgtcggttaatcaccaagtaaacactagacaaccaggagttgagtgctctgaccaacgttataattgacggataagccggaagtaaattgctcggcctcagcaaagaacgaaattaacattttctaggaaaaacaatccaaaagcgaactcattttgcatttcaaaatcaatgttgagagtataaagagtgacagctttcaacacaatcaattagttatacagtacacatcagctaagtgaaaaaaaaaatcatatttattggcaatcaaacaagttatgtgtagactagcaatgtaagtgaattttttagaggtttgcaccttacttaatttgtcataatgaaatttaacttttattgaattggtacattccttggatatgtgtattcactgttgtcagcaaataatttgctttctcagctcgtagcttgattttgggtaatgactaatggcaaatcatactgttatgtatctctgctcaatcgaatttattctgtccagtgtgcagatgctttattaattcctcctgtatctttgatgcttcagaggtcgtacgaatctcgaaattatatctctagtggttgtgcgcattggcctgagcacctgcaactgcagctgcagctgctggctgctgaccgccaccgcccagggcgcccaaggattgctgcagggagcgcaggatgccaatgggaatctaaggaggggaagtacaatattattaatcggaagtatccttcttaactgaaaactaaactataaagtactcaaccgctttaattgttatgttatgttattagtgagaaaccgatttacacttaaacatgtttttcaactaaagatagcttgtttgtgctgtagaatttacctggaaaccaggataatctgcgtatatccttagcgatttcatacttacatcgagggccaggcccacgggtcattgggcctggggcgccaggaagcgattgttcacggcctggggtcgctggacggacttgtacttgtgggcctggaccaccttggcctcgctccttgcctgcgaatggaggaaggttcgtgagttgggggaattacttgcaaaggacgagaacaggacgtgcagcaggtgaacgacggggggtgataaatgaaaattgtattaaaatatatttcacggaaatcataatgctgggtagcagctgacccctcccccaccatcgcccgcagtgtccgcaaatgttttcaaataaaattactgccacaaagcgaaagtttcggcatccagctccaccaaaaagccaaacaatttgtttgcatttaagagtgccaaagtgtgtgtgcctgtgtgtgcctgtgtgcgcctgtgtgtgtgtgtgggtatctgtgtgccggtgtatctgtatccgtatctgtttctgtatctgtgtatctatgtccgcaccgcatttggttttacctcaacggtcgactgcggctcgtccttttgggcttcctcatccggaatttgctgctcctcctgctgctgctgctgctgctgctgctgcatcacgtatacgacacgttgtcgctgtcgttgtcgctttgcatgtgcacgttgtcgcttgacaattatcagcgaggtgggcgtggccgatgggcggggcagcaggtggttatccaccgcatcggcatctgcggccgctttaacatgactttcaatgatttcgctgcggtccggctaaaacatcaatggcgggtggattttgttggattggattgattgcttgctgttgatgttgttgcctggccaacacgagggcgttgatcaatatttaaccgcaggccctagttaaacactagtcggcgatttatagccaggaatttcgcaattgaaaagcaccgttcagcagcgaattccctctttaactttactaacatcgcttacgagcgaaatgatgcagctttcattttgtgggaaatccttcaagcacttttcgactcgaaaggatgcgcaaaaaaactttcgagcaaaacacttttaatactttcggaagtgctgtaaacatcttgctgaaatttcgataaccatacctctaaacttgttgttaaacttatctcgggaatgaaacgaaagctggtcggttcaccataacttttcctgatatattgatgggtggattggaaaacaagaggaactctaacaaaatgctagcttgcagtcacattataattagtatataatacacctttactaccctaatgacgaacaattattttacaaaaggtatacttatttagctcgactaggcacggtcctaattttatgaaagatacgttttggaatgttatggatatgagtaataaagattggaactctttataatccgtaatatatatataaaagttaaaagaaatattcgctaagccttttgactacttacatcttggttgatcagcgagtacttcttgggcggcttgaccttttggatgtggctggtgacgacggggccggtggtgggtgagacgggcacaggatcagcaggatatgccggctggactgagtgctgcgaggaggagatcacagtgcgaccaggactgtgcgcctcggctccgatataaccatgttcaccggcgctgccgcccagaagcgcactggctcccaccgagggattggcctgggcggcggcgtatcccacgccggctgtgcgtcctgcggaggaggaggaggagtgggttatctggcatataaatcgaatcaattaggtgcaggacccaccatccagattgccgcccagaccggcggctgcccgggagccccaaggtgttccggccgaggcgctgagtccgccgtgggcagagttgcccgtaaggagtccgccgagtcccgcatctgcgtgatatcctgcgaagttcacgcccaccttgccatcgcggaaagtaaacagctgcgggttgaaaatgcgagagctttagcacaaagttatggccacgttgcgtatacttaatgctattcaaagttgcccacgaccttcgcgtttcgccccacggccacatttcggcccaagatgttttgtccgcccagccttttcactaatagttagttgcaaagttgtggcccaacttttactggcccggaagagcgggcaaacaccctttgtgccctttgtgcttaaccgagtttgcaaacatttcgtgtgtttctctgtgttaatcaatttaagcggaatttctcagcggttcaaatcggtgaaggtcgcaagttctgcagcgcagatacatatttagacagttccgaaacgttgataaacatttgcacagctcgtttgcccgtcatcgcagagcaacaagaactaggctgtacagaactacagataagctgtcattacacttagctacaaaacaccgattcactgataacgaaaatttgagcgagtgctggataatagtaatgagcacagcgagcggactccaacgaagttatcaataattgtgacagttaacaggtagcaaacaaatgtgtgctgcgtagttaacttagtgctatggagaactatgaactccctatctctagtttatatacaaaatatactactctacaaatatatttatcaattcagattgtgaattttatcatcagcaatgaataccaaggtgtaactacaactgcaaaacataatgtgttatttttcaagtatgctggcatattggcttagcagtctgatataccccacttttgatagtgtgccagaagtgtgacaatagtgaatggccctggccaatagagagagccagtgggagtgggagtgggagagccttccacacctgccgccgataagagtttttccaggcagacacaacgacaatatttaacctccgacggcagctcatttgagtttcacacgccgactggaggaggaggcgtaggtggtggccagccagcagacagcagcgaatcatcatcaaacgagtccgaaaggagcgtgaggagcagtgagggcagacacatgtcgccatgttgacaagggcgtgggagtgggaatggttgccagcgatgttcgggatgtttccgatgcggctggtgtggctggtggtgctgctctgtttgctacctgggcaggtgctgctcggcaacgccgcctcggtcacctggggtcatgtcaacaaatacgccagcgtgctgcacaccgaagatgtttacctgacgccgggtagccccggccgagatgtggcctacggcttgcaggtgagacttacagctagccacttggctggcaaattgcttaatctccttgggaatctccggcagaaagccagcgataactaccggattacgggtgtgcatgtcgaagatctaggcgccgatgaagcggaggcggtgctcacgtctggcggcattggccagcagtttgtggtcctccgctgccggcgacttcgggactccgaggggcagccggagcgagcggctcatctcgaggtgtccatctatggagtggacctgtaggctgtctgacccattgttgtaaatatcaattagtgtacggagctttcagctgtgcaagccaaggaaagcacataggaaaatgggttgtatctttgagatacaaaaagcacatatataagcttaaattagtatatattttaagtaaacaaatttcaaatatttcacgcatagaataaattcctttatgtttatagatagcactatttgaagtacaaacgaaacatctgtagccctgaacttcccacgcccacctctatatttatattcaatgctatctggagtgaaatcgacatcttcagattgtgtttattacccaagacacacggtcgctatagtaatgataggtttttatctgccccgtggactgaaaactttgtaactgtgcactgaacaacgtaataacatttaaagttaaaagttgccaggggttgtgaagtttggatgtcgcttaaaggctgtcgggtttttataatcttatggaaatgtgtagtaagtttgtaactgtgtgaaaacctgtaagctgcgggcattatttgcctttttttttgcctttcagtgcatttcagccttaataagttcatttttccattgcagccagatgcacgagcttgaatttatttaattaaaatgtaataagtctaacaagtcggacatcataataaactttcgctcaaaacaaaacatgaattgtaaaacatgagttgtaaaatttctgctgttagcgaatgtgtgttgtgaaatatgtgggtaaatcaaaccaataattgatatgttttattgttccgtatacaacaaatgtaaattaatcgtatgtgtgtgcatgcatatcttttgtttgctttcaaatcattttgtgaaacactctaaactcttatttgcagaccatccatccatcggacaaaaaatcgcaatgggcagtaaaaaacaccgcaattgtgttcggctaattcaagttgacagtaattgagttccagcggttggtagattaaagattgcccaaaattcataagctcgggtcatgaaccgcataaagataaagtaggcagtgaaaggatttcttcgtggaatctgcgaaatggtatgaatggccagtaatttgcatgaattccatggaaaggccgcctcgaattgtatccttcgctggctggccggaaaaaaacccttctcaggactttttacgtgtgctcttaatttcgattcccacgacccgcgcagaaaataaacaacacttttctggggttttccactttccacttagctggcaaatgcaaatttcatgcatgcgttgattaaaatctaaattcttgtagctctcgggccgcaaatagaaataaactttttggccagaaaaaaaaatctcaaacaaagagaagtggagaagaaagaaatattattttcagccatgaggtgtgaaaattcctttggtcagaaaaaataaacactgaaaaacgagcaacattttagcaaaactaaatcaagtgagtttagcacaggcatttaaacacgaatcctatatgttttcgattacacctgttcaatgggctcacaaactaatgaaatagaaaccattgaacatgatattatcgccttaagcctttaattaccatgaaataccgacgctatttaacaaccctcgtgtgcaacactgcgtatgagtaatgagtggtgaaaaatgcaattattttgatattagttaccacgggccgctaacaaagttcaaggtggccactaaaacgggaatcacttggtcagcagtagtcgtggttattaaaatgttgcttagtagttggtcgcgactcgtgaggccgatattaatgataagcgagtggtgttgagtcgagtttttgagtacaccgtgtaattggcggtattccaggcagttaagaaaacccagcgagcgttttcgccttggcccgcaattagaggcggaatcgcgcactaaaaattcttaattgccggacgacggacattgtgcaacgttttaggcaatgtggcaaagttcgcgccaaaaccgaaagttgcactttaaccttttcccttccaattgcgacagcggaatcgcaaaacaaaattgaaaacggcattgattttcgcactgtggccctgatggacagcgattttgattctcattctgtctctgatgcggactcacatttcgagtcgaatctcgttaaaagctagaaaatgggacgcaggcattctcaatacgcggaaaaatcacattttcagtgcttcactttcgcaaatcaagcttgtgacaatagtcaacagagaaaatggtttcgttttcgagaaattactgagaattaaacataaatatatctagagaccactaaaatttatccgtatcttcttatagttcgtaatggaaaacaatctagggtgattgcattaaaaagatccctgaaatatgtgcaattcatcgattgaactattaattgagttaatgaattcacagtctgagtaatggaatatttgtgagtaaactggttgcatattcaggaacttgatcacccgataaccgactggctgccagttgattaccttaacttcgaaccgcacttggccaacaatggactgcagttcgctattggtttcggtggcatgtggcaggtggcatgtggcatgccacctcgaacggtgagaggcttaattaatttcgggactcacctgtgccggcaccaagctagccgtctgcagcagacagagtgctccgagtaagacgaacatactgcgcacctggaagacaaaatccgaaatcggaatcagttctactctactccgatttgtatgcgagtcgcgtcgacgggaattcttcctcgcatttcagcagggagcggtcaagcataattgtgcggctttcacatgctaactcaactgagttgattaattaacaatgctcggcttctgcctttacctttcctagacgcttttcgttgttattgttttaaattatttcacttcgcgagtctgagtctgagtttgagtctgagctgtacgttgttgacgcgacgcgattccgctgtgaactgagtggtcgagtggcttgagccgggcttaaacttgaattctgccgcggggagtgggaaatttctggtgcttgtaatgcctggctaaactggaaatgtgtcgcaatcgagtatggtgggtctatttatataggagctgggcgcagggttctggctgctgcctcctcccatgcatactatatgccattatctttggaactcagggaactctggacgctgcaatgatgatgatgcaagattttcggatactttgtttcgacgacctattagcacttggccagcacctgttcaaacaactcggcgagaatttggcaacaactcagacatgacgggctattttgtggtcagttgtctgagctgtgaattgggcatcagaagagaggaacagaacggcctgaaacttctgagtgatctttaacatttattcacctgtattaccttacacagctaatgagttggcgaaattcttacaaaatgcataaattagaaagcgaatactaatataaagaagctgaacagaatttctcaagtattcgattatggaataaagttcactgccacgcacaatcaattaaccctcggagataatgaaaatgaaatcaacttccgattttccatgcgttacaaaaaaacaatcagcggctggaaaactactgcattactcatgggccgcattaaagtgcatccgatttggccaatatttgcgaaccggtttttggccggccacgcccctttcgccccccctgttgtttgccttttgaagcggtgtgcaattgaccgaattcgggccataaattcgatcttctgttttattttgctttacgcctcaatgaagctgcaggcaaatatggggtttgccaattgcagccgaacaaattaatgaaagccgaatggttgggaatttggctttggccaaagattccattatagatgtgtgtgttctcttctggggtttcttcagttcgcctcgctgtccatccatttccaatagaaccctccccccttcgttccagcgatttcttcattaggtattcaaatgacaaacagagccgtccgtttaatgtgattcggcccctggct

SEQ ID NO: 20834 - DNA, 873 bp, DROSOPHILA
gcattacaagcaccagaaatttcccactccccgcggcagaattcaagtttaagcccggctcaagccactcgaccactcagttcacagcggaatcgcgtcgcgtcaacaacgtacagctcagactcaaactcagactcagactcgcgaagtgaaataatttaaaacaataacaacgaaaagcgtctaggaaagatgttcgtcttactcggagcactctgtctgctgcagacggctagcttggtgccggcacagctgtttactttccgcgatggcaaggtgggcgtgaacttcgcaggatatcacgcagatgcgggactcggcggactccttacgggcaactctgcccacggcggactcagcgcctcggccggaacaccttggggctcccgggcagccgccggtctgggcggcaatctggatggacgcacagccggcgtgggatacgccgccgcccaggccaatccctcggtgggagccagtgcgcttctgggcggcagcgccggtgaacatggttatatcggagccgaggcgcacagtcctggtcgcactgtgatctcctcctcgcagcactcagtccagccggcatatcctgctgatcctgtgcccgtctcacccaccaccggccccgtcgtcaccagccacatccaaaaggtcaagccgcccaagaagtactcgctgatcaaccaagatgcaaggagcgaggccaaggtggtccaggcccacaagtacaagtccgtccagcgaccccaggccattcccattggcatcctgcgctccctgcagcaatccttgggcgccctgggcggtggcggtcagcagccagcagctgcagctgcagttgcaggtgctcaggccaatgcgcacaaccactag

SEQ ID NO: 20835 - protein, 226 aa, DROSOPHILA
MFVLLGALCLLQTASLVPAQLFTFRDGKVGVNFAGYHADAGLGGLLTGNSAHGGLSASAGTPWGSRAAAGLGGNLDGRTAGVGYAAAQANPSVGASALLGGSAGEHGYIGAEAHSPGRTVISSSQHSVQPAYPADPVPVSPTTGPVVTSHIQKVKPPKKYSLINQDARSEAKVVQAHKYKSVQRPQAIPIGILRSLQQSLGALGGGGQQPAAAAAVAGAQANAHNH

SEQ ID NO: 20836 - DNA, 10855 bp, DROSOPHILA
actcgaatactcattccgttaagtgttaagatgcttgagctaagttcctgatcggtcgcatattgtatctatgtatattctgctttacatatatagtgtgcatcttcttgtgccgccttttttttatactcgtattctttggatcgctgagcttgcagttttgggatgggaaaagctgaagatggggattggaaagccgaattttgggatcatgaagtttccgtcctcttgtaacactttgtactcgtttatatgcatttactttcacttggtgtaaaaatattattatcaacatcatttcttatatcatttatacctttttctctatccaaactcagcggcgaatttgtgtttaaaaaaatgttctcatcaggcttatgtttttatcgttatctatgttttctgtcgcattcatatctgggttatatttatatatatttataataattatgcttcctatacaactatacatatttcttttcttattattgtgtacaaatacaaaatcgacttgccagccgtccaatgccagagaaacataaaatacacttagacatattggcacacatttcgaaatgaacattcgaaattttataatttcgtttctgaggattaagtaaatcgcttaaaatgcacatactttttgactagacaaaaatttaaaaataataatcgcagttgcagcttgaaggtacattaaaatgaaattttaaactatttttaaaaaaatcagtaaaaagaatatgggtctcgtaacatcgtcttatcgtttcatttatttaaatttgattttgcgaaccctttattgagaactattatgcattataatacatattatcaagtataagttctttgaaatctgcaaaaaacaaaagatttcaaaaaaaaaaaacaaactatgaattaaactactgcatttcgctggcgcggttcaggatgtcctccacttggagcccacaaagtgcactttaatccgaacgtccctgttcccgtttcccgattagtagtaggctgggaaggggtggtagttcgacggattggaggcgtgatggttggcggatggcagaacgggcggtggcctaacgcccggatggtaattactcgacgccacctgatggtaggctccaaagctcctggccatgtggcgattttgggccgctgccgccgccgattcgcccaggaggcgtgattgatccgccgtgcccagcaatcgattgttttgctccattagcagatgggccgtgggatccaccagcaggcgatgctgatcggccgcattggaggcggccagtatacgatgctgctccaccgtcgacagcaatcgatggtgctccaaactctcgcgactctggtgctgcatctgcgaggagaggaatgagcgattgttgcccaccgccatgttggccgtattcggtgtcagatccagcgaggccatgcgcagcatatcgtgatgcgtgggatggttgtagggtagttgcggtggcgacgacaccacatagttggccgtgcggctcagatccaccgatgtggtctggtcgtgctcctgttcgcccagctgctcgctgagcatgttgtgcatggcggccgccgactgctggtgctgttgcatagcatggtgctggccatgaccgtgctcctgttggtgcacaaccgaagcggcaccggcaccaccacctccaccgccgcccaccacagcaccgcccgcctgctgagcctgctggctctgctgctcgcgatcggagagtatgtcgtagatgtggtgatggtaacgactgctcggcaactggaagttatgatggtaattgctgctcgccgcattcgatctggagctcatgtccagtccctggagatcggatagatcgttggcggcactggccgccgctgccgcagccgctgctgcgctggccgccgcattgccaccgttgccggcgccaccctggcggtactccgccggcgagtccaggtcctggctgttgtactttaggttgctggccatgctctcgtacttggagtacatcaggtcgatctgcgattgcgggaacttcatgcgcatgtcctggccagcgctgttgtgaaaaaaaaaacacataatatgaaataatttatgaataaaaactattcattctaataataaagtgtggaaaaaaaggacgagcattttcacctgttctgtggcattatgctgttctcctcgtcgctggacatctggttgtgccgcgagatgttttgccgctggcgctcctgatgctcttgctcctggaccgctcgcttgtggcgcatcatgtcgccgttgaaattgtagcgcggtatgctcggcgatgaggcgggcgagatgagctcgtgttccggataggtgctgcccacgctggaggcgttcctcctctgcggctggagggcgggcagtggcgatgaggcagacatgctgttggcgccgccaccaccggcaccaccgcctcctcctccgccgccaccgcttgagctgcccgccggagtgctgttcgatccgggaccaccgcctccattgccagcgccaaacataccgccgtaatctcgacccggtgatatcggcggtggcgatggcggtgtgcggtggtgcgacgaggagaatccatctgagtccgggtgctgcggacgtggcgtactgcccgcatccacatccacatcgttctgattctggttactctgcggattcgtcggcgtcgaggcgctgggcgatatattgcaggcaccctggaacatcggcagcggtggtatctgcatcggaaagctgcccagattcttcatcatctttagctcgttctccaggttgtccatgccgccaccgatgccacttccattcgcaccgcccgaagatcccccgctgcttcctcctccgccgccaccaccgcctcctcctcccgcaccgccggcactgcccgctccaaagcgctgcgactcgggatccacgtgggcactcatgggactgtcgctgtttatgtggttgtcggtgggtacctgtgggaaatgtacgagtgttatatatcaaaagtgcttctaagataagtttgtttaaacgggtcgcgcagttaattaatagagctaactatcctcatcaatatcttgccgattttcgcaaatccattttttttagcaagttttcgaattttcaattttatcaaaatttggtaaaaaattgcaaaaaaaaattgtattttcaattttgaatacagatcgataggaaattttgttacaaattcaacgaggtgtttttgtatagacttttttcaattggcacatggcatatgggcactcaccttgaggtcgctgctttcgctgtcaatcatattgccaacggagttgagggccgcctccacgagcatgcttgccgacgaggagccaccgccgacgcccacgcccaccacgccgccgcccactccgcccacgcgcgcattggcattgttgtagaaggagctcatgaaagactgcgagtgggccagggagttcatctgcatctgaggctcatcgccgccggcgacggacccgccgccggtcgcaggacccgttggtgtttgtccaccgctgccaccgccggcgctcccgctgcccgctccgccgccgtagtgcgacaaggcagctgctgcggcagcggcggctgctgcattgttgttcgactcgacaacgtccaggaaggagctgttctcgtcctcctcgcggctgtgggcgctgtgctggtgctgctggtgcgtctgatgcggctggtgggcgtgggcatgggcatgggcgtgagcatgggcgtggctggcactggcactgctcattaggcgggcgaggaagtcacggttctggcctagcagtttgctatgctcatcgacggcggtcggcggcacagcgaatcccagatccggacctggaccggaaccaccggccagctggccacaggcaccaccaccaccggggccaccgctgtcgcccggaccaccgcctccaccgcccgctccctcgccgccgacatcgctggagtcctgcacctcttggatccacttcttgctgcccttgctgacgaccagattctggccgagagcggcgttcatggcggccgcatggcggtagtcctgctggcctgcgccctggctggcgggatgctggtgcgggtgtgcgtgcgagtgggcgtggtgcgggtgggcgtgcgcatggacgtgcgagtggtgcgcttggtgggcgtgaacgtgcggatggtgttgcacagccgaaccgccgccaccgccaccaccgccgccaccatcgtcgtcgtcctcgtcgtcgtcctcctcctcgtccatgcccacgcccacaccgacgcccatgtggcccatcatgtggccaagtttggcgggatcctcgccagctccggccatcgccgaaaccgccgccgcagccgccaccacctgttgcacctgctgctgggcactcaatcgctgggcggtggtggtgaggaaggactcgaccaggctcagctgggcattctgcttgcgacgcacctgctccagccgtgcgttttccacctcctcgtcgtcgggatcgccgtgcagctgctgctgctgctgctgttgttgctgctgttgctgctgctgctggtgaggcagggcatgggcgtgcagctggtgcggatggtactgcggatgctgctgctgcggatcgtgatgcagctgctggtgctgctggtggaggtggtgctgttgctgctgatgctgctgggcgtgttgctgctgcagctgttggtgctgcagttgctgggcgtgctgctgttggtgctgttgctggtgctgcgactgttgctgctgctgttgctgttgctgctgctgctgatggagatgtagttgctgctgggccggcacgaccggctccttcttgcgcttccgcttgcgagcgcccgaggaggcgacggccgaaacggaagcggaaagggaggccgtggccgatggcaccttgtcgccgaatatgctggagatcttcgagctgagcagcgagagattgggctcgttgcgacacaggtccttgatcgacttgccgctcttcttgatcgcctcgaataggttgtcatcgctaaactccgcgtcgctctgcagcgatccgctgagcatggagctctggtcctcgaggctcttgcgccgccgtcgcggtgcttgctctgtgaacgaggagggggagacgacggccgcattagggcgtggctgcgcctgcgccgatgccgctgacgccggcgtagccgtcgccgtctgcttacccagaaaatcgaccttcatgccgccggaataggcatcaaaggtgtaggccacgctccgctcgatcttgggcatctgctcctgtgtgtagttgtgcaccttcttgtagtggaactgcaggcactgcttggtggtgaacgccgcattgcactccggctcggcgcatctaaaacggatatatcatatgattagtatagccacaacatcgggatgagaatgcattgtaggtgcacccacttgaacggcctgacgcccgagtgggtcagcatatggatcttgagattgctgcgattctggaagagtttctggcaccgcggacagctcaccaccgtcgagttgcggctgtgcacctccttcgagtggcgctgcagtgccgctcgcgatcctagaagttttgaacataatttacactgaaaatctcgtaaaacttcagccatatctaaaatgaaattgtatgaagaaaatgaaatttcggattgtggtgattttgaaagaacaacttagtgataatccataaccagaaaccaacccaacaacgaacgaaccaacgaacgtacaacgaacataaaacaaaagccgaatcacataaggcacgaatcacaagactatcggtacttttgtaggatctggttgggttgggctatagcaatcataaaatcggatttgggccatactctaataaaaaaaaaaacaaatggcaaataaaaacgaaattccaaccaaggcaaatcattcactaaaagcgttaacacaatgcaggctacgatctggattggtactcaatatgcactatgactgaaggactgatatattggaataattgtaaatatatatattttttttatgctaaaaacctttatctcgaactgatgaatgcaaattttagagagagttggattaaacagcaagaagcttctttgattttatgtattgaattcttataaactttagtattagtattggcaactatttttttgcaattccgacttgttttcctttatcattaactatccattataattttgtataatttttgaatatctaatcaaacaagttcagtcacttcagtgcgaatctaggatgtgaatgcaatatacgatatttcaattatgatttatagcatttacataacataaaagaaccaaccgataaaggttaagtaaatagatataataaaccaatttagcagatgtacaaccaaaaaagttagcaaccaaagaaatgagcgatcgcagatgcttttagtgttacacatatcgcagtgttgctgtggtggtgactttgaggtgttgtatctttgttagtacatctagttttatagctaagcgactttatacgatattagttcatttaacattattgtgtggttctatagtttttgtgggtgtgttcatatgggcaaatcaaggtcacggttaccacttaaaatttatataaatttttactaaaataaataaaattctaattctaattataaaagaactaaaagtactattaaacaaaatacgacttttaaaggtttacttcagaattacatattttaaaacaaaagaaatggtgctttactttttaataattatatactccggttggataatgtaaacaaaatgtagaaatcattgtggaaactgtgaactcgattcgctgttgttggtaccatcaaatacaagtgggttgatttatgcaaagcagttgtacggcattcgccggtatacatacgacatacgctatttatgctatatatgctatacaatcgatacgacatactatatactagacacgagcttacgacatacgatatggcagtcagttggcctacgatgcggctacgttatattgggttacgttacgcatacgcatgggtgtacgatcacagttacggtctagataatttgggatcctgcaatcgttccgctggcaacttaccgctgtgcatgcgcttaatgtgcgccttcagtttctgcggctggcagaatttgcgaccgcaaaaatcgcacaccggtcgcgatcgatttggatttgaggcgcatccgtaggtgcgatgcatctccaggtagttgaggcgcaggaagaacttgctgcagaattggcactggtatgcccccttgccgtcgtgcttctccgccgcatgcttcatgatgttatccttgcccagcaccggttcgccgcacaccttgcaatggtacttgcggatggtcaggctcatcgagggatcgtggaagacggagcagtgggtgcgataatacagtgggtgctcgaacttcagattgcagccgccgcaatctgtgtggatagaaacaaaactttggttagtccatgtctctagaagatggagaaagcattgggtagcaagtaaaaagcgaatcgcgaattcttcagaaggattcaaaggatatacgtttatttcttgagatacatactcgtcttttccgtgtgctttttgcgccacatggtgttgcagtcgtcgctccagtagagcagctccattccattccgcagatcgcggcagctgacgaagtacgcctgtcgatcgatggacaccaagttgacgttacgctcctcgtagctgggagccggtcgcacgaatcgcagccaattggaggcgttgggattgtcgcagcacagcaaatacgatttgtccgccccggcctcgcacatctcgaagatccacttcatgtcgctgccctcgcgcacctcgccggtctgcaccggctgtccgatcagtgggcccagtttggtgaatgctctcacctctgtgcgcgcgaacacgccggtcacattgggctccacgttgtgcagctcgaattccgccggaacggaggcctcggcgaaggtgatcagcggcttggtctccagctccgacagctgcgacgactcgtccatgtccatatccatgtcctccatatcctccatgtcgtcgtcctcgtgccgctgtcgtccgctggcccgcttcgcctgccgctgtgcatcggccttcagcttggccagggcctccagattccgacgctctatccactcgcccagatccacagcatcggtcacattgccgcaggcgttccgcagcgggcacagcttgtgatcgtgggcaatggagcactcgcggcaggattgatgcgaccggaaggcaatgtcgtgctcgtcctcctcctcgacgaaattctgctccattttcatttcgcgggccagcgcctcctcgtccagctcctcgtcatcgtcgtcgtcctcgtcgtttccgcccaatccggcacctggttcgtcgtcgtgctcatcgtaggaattgggtggcatcatagccgccgccgccgctttggccgcctgagatttcttcgagccctgcgacttggagcgcacatggaagttgcccgcctggccattgctggcagtgatgccatcgacggcatcggcgggcggcagaactggcagtaggtgggggtgtggcggctggtcttcgtcctcgtcctcctcttcgctaccattggccgctgcagcgactgctgctgctgcggctgctgctgccgccgctgcagcggctgcttttttgaggcacagggcattcggcagggactccttgctgttcgcctccagttcgctcttgatcttctcggcgatgcgacagtcgaggacctcgggcagggcggaggaggcggctgccgccgcagccgctgcggcgctggccttaagtgccgctgtcgccgccttggcctcctgcttcttggacttggcgtagctgaatccggctcctgctccgccggatcccgatcctttggtcttgcccgcaaatccgttcagcgtctccgaggtgaattgcacacgcttcttgtagcgcttgcgttgtggcggggtgggcgtgaccatgggaatagaggccgccgaggcggagtcaccatttccgtttccgctcgtgttcccgctgccattgccattgatcgaggattcggctggggtggcaaagtccttggcgctgagatttggctccagcttgaagttgccatcgaaaccttttgtgggcgtgttcgcgggggagggcgggggcaggctaaaatagaaagggatgggaaaaaaagtttataagtggtcacatattagtttcttcaatacctatttaaagtgtatgagttctaatgcttaagctcttttaaaactagtttcgaaagcaaaacggaacgctaattgagcaacttaacatatgtattaacatatacatattttatccaagaaataactctattaagtggattagttttgaaaagcgtacggtggacggattaaagatttagctcgatagttggcggaccatccgaaagtgggtcgttgggacttatttatttctggtgtatggtcttgttcctccctctgccaggagcagaacttatcctccttctctcctcctctttgcccatctttcgcttctctacaattcgcactgttcttacacgttgttgtcgcctttgcgtttaattaattttgcttacgctttgccggctgtttcgcgtccctttggggggtcaaaagttgggtggaagacggaatcggcggaatcgccataaagaaagtctggaccactgtcaggacaaaagaatatggtggcagagtccagacagcccaggaatgtcattatagttgggacttatttgtgtaaattaatggtgcagtagtgctccaacaaaaaagttatatatagatgcgacctatatctataacatttgcccagagtgggaggtatacatatatagatgtatgttagttataaatatatatatatttttcaagcacacttttttatgtacttgccagcaactagtagttgctgggtaatctacggaaatcttttttttccttttctggttacctgcatgggggcaatgcaattacatggacgatagccagcaacttttgagtttcgctcgttttgaattcatgcggaggaaattcatcagcggtcgcattgaactctagttgatgctgcacatgccacatggtttccttgccatacgatttcagtcaccacaccgataccccccctgctgctcctaatcatctcccctgacgtttcgacgcacccgcctttcagtttctctctctctctgtcgttgtacgtccctgtgttatcgttcattaaatcctccaccttagaaccataacaacaatatcgaaaacagcggcaacagcaaacgataccgttctatccagccatcccctgccatctccatctctgcaatcgtagccttccccccggtatccacttaccctgctccactttgtctcaaccttccattgccaccactgccacttccacagccactgccaccccgccacccccatcgcgtttctttgaccgcagagagagcgagcatgctcctggttccagttccatcatctgacgatgggggttcggcacttggatccctgggctggggttcctattctggtgaatgcgagtgtctctaccattaatgtgctgctcgaaggcccagcggggggaggtgattcgttgggcggtgggtggttgctgtgtgggtggtgctgggtggtgaggggtgtgtgtgtggcggcttggctcaatggggatttggggagttttgggattctgtttcgtgtgcggtgctcgttggcgc

SEQ ID NO: 20837 - DNA, 6273 bp, DROSOPHILA
atgacattcctgggctgtctggactctgccaccatattcttttgtcctgacagtggtccagactttctttatggcgattccgccgattccgtcttccacccaacttttgaccccccaaagggacgcgaaacagccggcaaagccctgcccccgccctcccccgcgaacacgcccacaaaaggtttcgatggcaacttcaagctggagccaaatctcagcgccaaggactttgccaccccagccgaatcctcgatcaatggcaatggcagcgggaacacgagcggaaacggaaatggtgactccgcctcggcggcctctattcccatggtcacgcccaccccgccacaacgcaagcgctacaagaagcgtgtgcaattcacctcggagacgctgaacggatttgcgggcaagaccaaaggatcgggatccggcggagcaggagccggattcagctacgccaagtccaagaagcaggaggccaaggcggcgacagcggcacttaaggccagcgccgcagcggctgcggcggcagccgcctcctccgccctgcccgaggtcctcgactgtcgcatcgccgagaagatcaagagcgaactggaggcgaacagcaaggagtccctgccgaatgccctgtgcctcaaaaaagcagccgctgcagcggcggcagcagcagccgcagcagcagcagtcgctgcagcggccaatggtagcgaagaggaggacgaggacgaagaccagccgccacacccccacctactgccagttctgccgcccgccgatgccgtcgatggcatcactgccagcaatggccaggcgggcaacttccatgtgcgctccaagtcgcagggctcgaagaaatctcaggcggccaaagcggcggcggcggctatgatgccacccaattcctacgatgagcacgacgacgaaccaggtgccggattgggcggaaacgacgaggacgacgacgatgacgaggagctggacgaggaggcgctggcccgcgaaatgaaaatggagcagaatttcgtcgaggaggaggacgagcacgacattgccttccggtcgcatcaatcctgccgcgagtgctccattgcccacgatcacaagctgtgcccgctgcggaacgcctgcggcaatgtgaccgatgctgtggatctgggcgagtggatagagcgtcggaatctggaggccctggccaagctgaaggccgatgcacagcggcaggcgaagcgggccagcggacgacagcggcacgaggacgacgacatggaggatatggaggacatggatatggacatggacgagtcgtcgcagctgtcggagctggagaccaagccgctgatcaccttcgccgaggcctccgttccggcggaattcgagctgcacaacgtggagcccaatgtgaccggcgtgttcgcgcgcacagaggtgagagcattcaccaaactgggcccactgatcggacagccggtgcagaccggcgaggtgcgcgagggcagcgacatgaagtggatcttcgagatgtgcgaggccggggcggacaaatcgtatttgctgtgctgcgacaatcccaacgcctccaattggctgcgattcgtgcgaccggctcccagctacgaggagcgtaacgtcaacttggtgtccatcgatcgacaggcgtacttcgtcagctgccgcgatctgcggaatggaatggagctgctctactggagcgacgactgcaacaccatgtggcgcaaaaagcacacggaaaagacgaattgcggcggctgcaatctgaagttcgagcacccactgtattatcgcacccactgctccgtcttccacgatccctcgatgagcctgaccatccgcaagtaccattgcaaggtgtgcggcgaaccggtgctgggcaaggataacatcatgaagcatgcggcggagaagcacgacggcaagggggcataccagtgccaattctgcagcaagttcttcctgcgcctcaactacctggagatgcatcgcacctacggatgcgcctcaaatccaaatcgatcgcgaccggtgtgcgatttttgcggtcgcaaattctgccagccgcagaaactgaaggcgcacattaagcgcatgcacagcggatcgcgagcggcactgcagcgccactcgaaggaggtgcacagccgcaactcgacggtggtgagctgtccgcggtgccagaaactcttccagaatcgcagcaatctcaagatccatatgctgacccactcgggcgtcaggccgttcaaatgcgccgagccggagtgcaatgcggcgttcaccaccaagcagtgcctgcagttccactacaagaaggtgcacaactacacacaggagcagatgcccaagatcgagcggagcgtggcctacacctttgatgcctattccggcggcatgaaggtcgattttctgggtaagcagacggcgacggctacgccggcgtcagcggcatcggcgcaggcgcagccacgccctaatgcggccgtcgtctccccctcctcgttcacagagcaagcaccgcgacggcggcgcaagagcctcgaggaccagagctccatgctcagcggatcgctgcagagcgacgcggagtttagcgatgacaacctattcgaggcgatcaagaagagcggcaagtcgatcaaggacctgtgtcgcaacgagcccaatctctcgctgctcagctcgaagatctccagcatattcggcgacaaggtgccatcggccacggcctccctttccgcttccgtttcggccgtcgcctcctcgggcgctcgcaagcggaagcgcaagaaggagccggtcgtgccggcccagcagcaactacatctccatcagcagcagcagcaacagcaacagcagcagcaacagtcgcagcaccagcaacagcaccaacagcagcacgcccagcaactgcagcaccaacagctgcagcagcaacacgcccagcagcatcagcagcaacagcaccacctccaccagcagcaccagcagctgcatcacgatccgcagcagcagcatccgcagtaccatccgcaccagctgcacgcccatgccctgcctcaccagcagcagcagcaacagcagcaacaacagcagcagcagcagcagctgcacggcgatcccgacgacgaggaggtggaaaacgcacggctggagcaggtgcgtcgcaagcagaatgcccagctgagcctggtcgagtccttcctcaccaccaccgcccagcgattgagtgcccagcagcaggtgcaacaggtggtggcggctgcggcggcggtttcggcgatggccggagctggcgaggatcccgccaaacttggccacatgatgggccacatgggcgtcggtgtgggcgtgggcatggacgaggaggaggacgacgacgaggacgacgacgatggtggcggcggtggtggcggtggcggcggttcggctgtgcaacaccatccgcacgttcacgcccaccaagcgcaccactcgcacgtccatgcgcacgcccacccgcaccacgcccactcgcacgcacacccgcaccagcatcccgccagccagggcgcaggccagcaggactaccgccatgcggccgccatgaacgccgctctcggccagaatctggtcgtcagcaagggcagcaagaagtggatccaagaggtgcaggactccagcgatgtcggcggcgagggagcgggcggtggaggcggtggtccgggcgacagcggtggccccggtggtggtggtgcctgtggccagctggccggtggttccggtccaggtccggatctgggattcgctgtgccgccgaccgccgtcgatgagcatagcaaactgctaggccagaaccgtgacttcctcgcccgcctaatgagcagtgccagtgccagccacgcccatgctcacgcccatgcccatgcccacgcccaccagccgcatcagacgcaccagcagcaccagcacagcgcccacagccgcgaggaggacgagaacagctccttcctggacgttgtcgagtcgaacaacaatgcagcagccgccgctgccgcagcagctgccttgtcgcactacggcggcggagcgggcagcgggagcgccggcggtggcagcggtggacaaacaccaacgggtcctgcgaccggcggcgggtccgtcgccggcggcgatgagcctcagatgcagatgaactccctggcccactcgcagtctttcatgagctccttctacaacaatgccaatgcgcgcgtgggcggagtgggcggcggcgtggtgggcgtgggcgtcggcggtggctcctcgtcggcaagcatgctcgtggaggcggccctcaactccgttggcaatatgattgacagcgaaagcagcgacctcaaggtacccaccgacaaccacataaacagcgacagtcccatgagtgcccacgtggatcccgagtcgcagcgctttggagcgggcagtgccggcggtgcgggaggaggaggcggtggtggcggcggaggaggaagcagcgggggatcttcgggcggtgcgaatggaagtggcatcggtggcggcatggacaacctggagaacgagctaaagatgatgaagaatctgggcagctttccgatgcagataccaccgctgccgatgttccagggtgcctgcaatatatcgcccagcgcctcgacgccgacgaatccgcagagtaaccagaatcagaacgatgtggatgtggatgcgggcagtacgccacgtccgcagcacccggactcagatggattctcctcgtcgcaccaccgcacaccgccatcgccaccgccgatatcaccgggtcgagattacggcggtatgtttggcgctggcaatggaggcggtggtcccggatcgaacagcactccggcgggcagctcaagcggtggcggcggaggaggaggcggtggtgccggtggtggcggcgccaacagcatgtctgcctcatcgccactgcccgccctccagccgcagaggaggaacgcctccagcgtgggcagcacctatccggaacacgagctcatctcgcccgcctcatcgccgagcataccgcgctacaatttcaacggcgacatgatgcgccacaagcgagcggtccaggagcaagagcatcaggagcgccagcggcaaaacatctcgcggcacaaccagatgtccagcgacgaggagaacagcataatgccacagaacagcgctggccaggacatgcgcatgaagttcccgcaatcgcagatcgacctgatgtactccaagtacgagagcatggccagcaacctaaagtacaacagccaggacctggactcgccggcggagtaccgccagggtggcgccggcaacggtggcaatgcggcggccagcgcagcagcggctgcggcagcggcggccagtgccgccaacgatctatccgatctccagggactggacatgagctccagatcgaatgcggcgagcagcaattaccatcataacttccagttgccgagcagtcgttaccatcaccacatctacgacatactctccgatcgcgagcagcagagccagcaggctcagcaggcgggcggtgctgtggtgggcggcggtggaggtggtggtgccggtgccgcttcggttgtgcaccaacaggagcacggtcatggccagcaccatgctatgcaacagcaccagcagtcggcggccgccatgcacaacatgctcagcgagcagctgggcgaacaggagcacgaccagaccacatcggtggatctgagccgcacggccaactatgtggtgtcgtcgccaccgcaactaccctacaaccatcccacgcatcacgatatgctgcgcatggcctcgctggatctgacaccgaatacggccaacatggcggtgggcaacaatcgctcattcctctcctcgcagatgcagcaccagagtcgcgagagtttggagcaccatcgattgctgtcgacggtggagcagcatcgtatactggccgcctccaatgcggccgatcagcatcgcctgctggtggatcccacggcccatctgctaatggagcaaaacaatcgattgctgggcacggcggatcaatcacgcctcctgggcgaatcggcggcggcagcggcccaaaatcgccacatggccaggagctttggagcctaccatcaggtggcgtcgagtaattaccatccgggcgttaggccaccgcccgttctgccatccgccaaccatcacgcctccaatccgtcgaactaccaccccttcccagcctactactaa

SEQ ID NO: 20838 - protein, 2090 aa, DROSOPHILA
MTFLGCLDSATIFFCPDSGPDFLYGDSADSVFHPTFDPPKGRETAGKALPPPSPANTPTKGFDGNFKLEPNLSAKDFATPAESSINGNGSGNTSGNGNGDSASAASIPMVTPTPPQRKRYKKRVQFTSETLNGFAGKTKGSGSGGAGAGFSYAKSKKQEAKAATAALKASAAAAAAAAASSALPEVLDCRIAEKIKSELEANSKESLPNALCLKKAAAAAAAAAAAAAAVAAAANGSEEEDEDEDQPPHPHLLPVLPPADAVDGITASNGQAGNFHVRSKSQGSKKSQAAKAAAAAMMPPNSYDEHDDEPGAGLGGNDEDDDDDEELDEEALAREMKMEQNFVEEEDEHDIAFRSHQSCRECSIAHDHKLCPLRNACGNVTDAVDLGEWIERRNLEALAKLKADAQRQAKRASGRQRHEDDDMEDMEDMDMDMDESSQLSELETKPLITFAEASVPAEFELHNVEPNVTGVFARTEVRAFTKLGPLIGQPVQTGEVREGSDMKWIFEMCEAGADKSYLLCCDNPNASNWLRFVRPAPSYEERNVNLVSIDRQAYFVSCRDLRNGMELLYWSDDCNTMWRKKHTEKTNCGGCNLKFEHPLYYRTHCSVFHDPSMSLTIRKYHCKVCGEPVLGKDNIMKHAAEKHDGKGAYQCQFCSKFFLRLNYLEMHRTYGCASNPNRSRPVCDFCGRKFCQPQKLKAHIKRMHSGSRAALQRHSKEVHSRNSTVVSCPRCQKLFQNRSNLKIHMLTHSGVRPFKCAEPECNAAFTTKQCLQFHYKKVHNYTQEQMPKIERSVAYTFDAYSGGMKVDFLGKQTATATPASAASAQAQPRPNAAVVSPSSFTEQAPRRRRKSLEDQSSMLSGSLQSDAEFSDDNLFEAIKKSGKSIKDLCRNEPNLSLLSSKISSIFGDKVPSATASLSASVSAVASSGARKRKRKKEPVVPAQQQLHLHQQQQQQQQQQQQSQHQQQHQQQHAQQLQHQQLQQQHAQQHQQQQHHLHQQHQQLHHDPQQQHPQYHPHQLHAHALPHQQQQQQQQQQQQQQQLHGDPDDEEVENARLEQVRRKQNAQLSLVESFLTTTAQRLSAQQQVQQVVAAAAAVSAMAGAGEDPAKLGHMMGHMGVGVGVGMDEEEDDDEDDDDGGGGGGGGGGSAVQHHPHVHAHQAHHSHVHAHAHPHHAHSHAHPHQHPASQGAGQQDYRHAAAMNAALGQNLVVSKGSKKWIQEVQDSSDVGGEGAGGGGGGPGDSGGPGGGGACGQLAGGSGPGPDLGFAVPPTAVDEHSKLLGQNRDFLARLMSSASASHAHAHAHAHAHAHQPHQTHQQHQHSAHSREEDENSSFLDVVESNNNAAAAAAAAAALSHYGGGAGSGSAGGGSGGQTPTGPATGGGSVAGGDEPQMQMNSLAHSQSFMSSFYNNANARVGGVGGGVVGVGVGGGSSSASMLVEAALNSVGNMIDSESSDLKVPTDNHINSDSPMSAHVDPESQRFGAGSAGGAGGGGGGGGGGGSSGGSSGGANGSGIGGGMDNLENELKMMKNLGSFPMQIPPLPMFQGACNISPSASTPTNPQSNQNQNDVDVDAGSTPRPQHPDSDGFSSSHHRTPPSPPPISPGRDYGGMFGAGNGGGGPGSNSTPAGSSSGGGGGGGGGAGGGGANSMSASSPLPALQPQRRNASSVGSTYPEHELISPASSPSIPRYNFNGDMMRHKRAVQEQEHQERQRQNISRHNQMSSDEENSIMPQNSAGQDMRMKFPQSQIDLMYSKYESMASNLKYNSQDLDSPAEYRQGGAGNGGNAAASAAAAAAAAASAANDLSDLQGLDMSSRSNAASSNYHHNFQLPSSRYHHHIYDILSDREQQSQQAQQAGGAVVGGGGGGGAGAASVVHQQEHGHGQHHAMQQHQQSAAAMHNMLSEQLGEQEHDQTTSVDLSRTANYVVSSPPQLPYNHPTHHDMLRMASLDLTPNTANMAVGNNRSFLSSQMQHQSRESLEHHRLLSTVEQHRILAASNAADQHRLLVDPTAHLLMEQNNRLLGTADQSRLLGESAAAAAQNRHMARSFGAYHQVASSNYHPGVRPPPVLPSANHHASNPSNYHPFPAYY

SEQ ID NO: 20839 - DNA, 2982 bp, DROSOPHILA
atttagaatgcgagggccgaaatcaaatgccaacgaaaagggtccgagcagatgaaatataatttaattaaattcaattcaatgccgtttgaatgtgctgccttgtcccttcatcgtcatcacgcatgattacttctactttggcaaatggcagctagtcgttggcaaaaaatcactcgatgttcttttcatcagctgctttttccacattaattacgcgcgagcttattattttttttttttgcctaattgaaaatttcattgaaaacaaatcaattaatttgctgcagcaacgtaggtgggaagaattcaattccaggaagtgccattgctccactgtgataaccttttcataatgctcaatcgattgggaagtgctgatatgctgatatgcgtttattgactcgccagcggtcataatatttgcaaaatcccgaaaaaaatccattttttttaattgagtgccattgagcaggcaatgtttgcatcaatgaaataactgatatcactttttcatcgacgtatgcaaatctcacgtgaagagattaaatatttcactgccttgcctacaagtatgcaagcttttcgcgttacacggcgtcaaaaaatccaaacctcgttaataatttatagacctcctttcggctgtattcaattcatgttggtttgtaaacaattccctgctgttatggcgattaaaaattaataggagtatcaatcagcaactgctggttgtattgttcaaaactaatggcttctgttattaaattcatctatctatccattaaaaaaactaaacttttatatcatttcgattttacacataacatttattctacattctaatatttttttggaattttcttgtggctggacataaatatccttagtctaggcttacagcaaagtcacatacatatatcacaagggtcaaaatgcacatacactgacagaaattacaacattcacgcacaactactagctaaaatgcggcccaagattacgccatctcctcgcgcatccgttgcccactgggatgggcactcagcgtggggttttgcctgccgggcggcagcgccgttccagctgccacggatttttgcgacacttccgccggcgcctggcgatacccgccggtcaggcgacccaccaggttgttaacagcacgcagcgtcgaaattggaatctgcaaaggatgcggatgagcgacggtgatgcgtggacagcagctgaactcacctcgaaaatgctgtcgatcagcggacgcaagctgaacatgggatacgtgctctcggccgtgtgagccggttggctatcgccgagggacaaaatggccgcgttgctgccgggtgcagctgctccatttgtcggactcactcccgccgccaagctgctgagcaaaaatgccgcgttctgctgcaggctgctcatggctcccatggaggaggaggcggaggcggaggcggaggcggaggcggaggaggagggtcgctgctggtactggccgtactcctggctggggtacagcaccatgttctgcacgggcatgggctgcagcagcgtctgcaatcaaagaaatacgttgataaagataccaataaaatgtggcttaaatgcaaatatcagtgtatcttgaagtcttttttgtaaatcaaaatgaaactgcacacatttttggatgagtatttaccagcttaatagccccagatcaggtttcgctacttacatcattcagcagcaccagctcgtggcgctggccacgcgcatatccagagacgcgggtgaactcggtgaccaggtgggacatgaccacgagtaggacgaaccagacgaagcggtccatggcggtgatgattatctggaagaagaggcgtggtaaaggttattttaaggatatctagctgagtcatctccgtctccagcccacatcattgttgaaactcatgctggcgacacattgatcttggcaatccgcacttgaacggcacttgtttggtgcgccgcggacgaaaacgttgtgattgcaaagtcaagttgcacgaatgtgcagcgactagattttcattctggccagcagccatggcagtcgagtatcaagtttggaaaccgcagtcaagatccgagacagaatctgctgcctgttgctcgctggctagctggctggctggctggaggttctgagatgtggattagaccaaggccaggcaaccagtttgcgttttcagctggatgcatcgagtttttccacttggcagtgagtgaattttcccgcttcgagcatttcgaaagccgttcgtccgtccaaggcgaaaggttaaatccaaatcaaaatccaaatccaaatccaagcacagcgaactgcggacccgcatttagttacgaaaatagagccaagcacatccatcaatggctgtgtttgctttcgagttgtctggctcgacagtaattcgtaaaacggcaatcaaaaatggcaacataaaggcagccagtgcagagcaggtcaaaagcaagtccaccgggccatgacactccatgactttggctccgggttgcgaggggaactgagcagttaaccctgcaattgttgttgtctaattgttgctcgaatggcatttaagcgaaacagagattctgcggcagccctgacacaaatgcagccgcctaattaaacaaacaattaaacaaatctcagccgtgacccttgctggccaaaagattctgttcgctttgtacttgaacacatcaataatgcggcgaaaacaagggctttcgtgtttgctggactcgaacatgacaaaaaaaaaaaaaaaaaaatagagtttctatttttgcgggcgaaaaagaatatttcattccgttggcataatcatgcgcatatcaattggaaccgatatttgtcatacatttatttatttactctttaaatgcgtacaaatttatgccgaaagtgcagcgattgaaatgtattgaaaattgcttaca

SEQ ID NO: 20840 - DNA, 697 bp, DROSOPHILA
ttcaagtgcggattgccaagatcaatgtgtcgccagcatgagtttcaacaatgatataatcatcaccgccatggaccgcttcgtctggttcgtcctactcgtggtcatgtcccacctggtcaccgagttcacccgcgtctctggatatgcgcgtggccagcgccacgagctggtgctgctgaatgatacgctgctgcagcccatgcccgtgcagaacatggtgctgtaccccagccaggagtacggccagtaccagcagcgaccctcctcctccgcctccgcctccgcctccgcctccgcctcctcctccatgggagccatgagcagcctgcagcagaacgcggcatttttgctcagcagcttggcggcgggagtgagtccgacaaatggagcagctgcacccggcagcaacgcggccattttgtccctcggcgatagccaaccggctcacacggccgagagcacgtatcccatgttcagcttgcgtccgctgatcgacagcattttcgagattccaatttcgacgctgcgtgctgttaacaacctggtgggtcgcctgaccggcgggtatcgccaggcgccggcggaagtgtcgcaaaaatccgtggcagctggaacggcgctgccgcccggcaggcaaaaccccacgctgagtgcccatcccagtgggcaacggatgcgcgaggagatggcgtaa

SEQ ID NO: 20841 - protein, 208 aa, DROSOPHILA
MDRFVWFVLLVVMSHLVTEFTRVSGYARGQRHELVLLNDTLLQPMPVQNMVLYPSQEYGQYQQRPSSSASASASASASSSMGAMSSLQQNAAFLLSSLAAGVSPTNGAAAPGSNAAILSLGDSQPAHTAESTYPMFSLRPLIDSIFEIPISTLRAVNNLVGRLTGGYRQAPAEVSQKSVAAGTALPPGRQNPTLSAHPSGQRMREEMA

SEQ ID NO: 20842 - DNA, 2889 bp, DROSOPHILA
tcgcttttgaatacaaaaagttgatcagtggacggcactctaagatgatgtgaccatgtccgtatgtcttttcttgaaatatggtaggtgggcgtgtctaaaatgtttttggcaatggttaatagccaaactatataaatattaaaatatttcttaaaagtgatagcgtgaccggtttggtctgcatgcgagtgatggagtgtatttaaaaagtaattttgtgtcactaagcatatattagatttgtgatatgttgcacactaaatcttcactagctgccgatctgtccgttcgtctatctgtccgcatgagcgcagagatcttggaaacgatgagagctagacaactgaggcatgtagcctacttctttcgctcttacaccttattacacattacatccttcgtttttttattgctttgaatctgattaccaatgaaatctaaacatagatattgaatttagtatcaagtgttttctaaccttccttcctctcatctagtcttcgaatccgactccaaagtaaataactggaggacctacacggcaacaacatcagaaacccacttgatcccatttaagcaagagcgagcttagggaggctggctggaacccataatcgacttcaattgaatacattaatgtagcaccatgggcgccaatacatcgagcagatccgacgcgagtctgctcgccgatgacgatggtaagtacagaaaggaggtctattgacccttgacaataaatataatattttttacaatgcctactacgcgccgagcaacataacttttattttttatttatttttattcaaactgaatagtttaaacaagtgctgtcaaaataaaattgcccacaaattaagtaaattttctgagaatgtgcgctaaaatcgtccaatagtttttcacaatgggatcgaaaaacgcagtgggcttagggcttaaacatctaacgctaagtttggggagcacatacacccggggcgaaccggaggcaatggagtttgtagacgatctgtgcctggcgaggatattaggactcctggaactgcccgatcagattgctatgatgcagagctacgagcgctgtcgtcctctgctgggaagtatatggcgtcaccgactgaccaggatctctctaaacctgctcgagataccccttctcggcgatgacttcaggttcctcttggctagcgcctgccagcagctgcatgagctgaggatcagcttcttaggcagggagcacttccaggcgctcatcatgcattgttttcccaatttgtggcttttgcaagtcgatgttctacccccgtttttcctgtgcccacggcaaagacttcagttgattcagattatcccgaaattccatcccgaggaccactcgctcgcaatgggccacatgctgtgcgtaaaatgccaaagcctaattccgagttagaagccatcgggtgtgtgcaaataaaagttcatatatatatttgttacgaatatttatgcactgtggacgaataggcaacacacactattgccttaatactcatatacactttccctatcttacgttccagtcaattttgaccatttccaaatactccgcgccataggcaagggcagtttcggaaaggtaggagcagtttttggtaattttaaagaaaaaacctcgccttcacaagatatttttgcaggtgtgcattgtccaaaagcgggataccggcatcctgtacgcgatgaaatatgtaagtcggtccgcctgcgaaatgcgcggagctcttggtggcgtcatcaaggaggtggaactgctatcgtcgttggagcacccgtttctcgtcaatttgtggttctcttttcagggtaagtcttcacaggcacaattctcgagcatatgaacacgatcgagtatccatccaagcgttccaaaggaatgcgaggattccaacattgttggatgtagttactcgtagagtaaaagggtatactagattcgttgaaaaataagtaacaggcaaaagaaagagtttccggctatataaagtatatatattcttgatcagaatcaatggccgagtcggcctggccccgtccgtccgtatgtacgtcgagatcccaggaactatataagccagaagattgagattaagcatatatgtagatcctagatcttacataaacgcatcgcaaaccgcccaaaactgccgagcccactcttcaaaaatgttttgaaatttttttatttttgtattagtattgtgcacttccatcgatttgccatcaaccgcccaaaactaccccatatattgcaaaaaatattgaaatttctcgttcacacttcgaactgagtaacgggtatctgatagtcggggaactcgactatagcattctctcttgttttcttacactatagattcttgaaaatttcttattgacatatttattggaattgtaagagcttcagattatagcgaagcgtatgcgctcaaaacagtaatgtttcacctgtaaacgaaaataaaccgttatactctgtgtaacgggtatagaaacgccaacattgttgtgttcctttgaaaccccaaggaggaaataacaaaataattgttctttagggagccagctgtgttctacatcgtgcccccaacgtacatatttccatattcaagtcaagaacaaatttatgaaagtaggtagatggtgctaccttcgccaaggctgctccagcttagcggctcctagcttttatttaaagcaccgctctcgcctgattctgctatctgtcttttactgattgtcaatcaatcaaaatgcaaattaacttacagcatttcttttgaagcccggccacagagcactcataccccccaatccttctgcttcttacagatgaggagg

SEQ ID NO: 20843 - DNA, 693 bp, DROSOPHILA
atggagtttgtagacgatctgtgcctggcgaggatattaggactcctggaactgcccgatcagattgctatgatgcagagctacgagcgctgtcgtcctctgctgggaagtatatggcgtcaccgactgaccaggatctctctaaacctgctcgagataccccttctcggcgatgacttcaggttcctcttggctagcgcctgccagcagctgcatgagctgaggatcagcttcttaggcagggagcacttccaggcgctcatcatgcattgttttcccaatttgtggcttttgcaagtcgatgttctacccccgtttttcctgtgcccacggcaaagacttcagttgattcagattatcccgaaattccatcccgaggaccactcgctcgcaatgggccacatgctgtgcgtaaaatgccaaagcctaattccgatcaattttgaccatttccaaatactccgcgccataggcaagggcagtttcggaaaggtgtgcattgtccaaaagcgggataccggcatcctgtacgcgatgaaatatgtaagtcggtccgcctgcgaaatgcgcggagctcttggtggcgtcatcaaggaggtggaactgctatcgtcgttggagcacccgtttctcgtcaatttgtggttctcttttcagggtaagtcttcacaggcacaattctcgagcatatga

SEQ ID NO: 20844 - protein, 230 aa, DROSOPHILA
MEFVDDLCLARILGLLELPDQIAMMQSYERCRPLLGSIWRHRLTRISLNLLEIPLLGDDFRFLLASACQQLHELRISFLGREHFQALIMHCFPNLWLLQVDVLPPFFLCPRQRLQLIQIIPKFHPEDHSLAMGHMLCVKCQSLIPINFDHFQILRAIGKGSFGKVCIVQKRDTGILYAMKYVSRSACEMRGALGGVIKEVELLSSLEHPFLVNLWFSFQGKSSQAQFSSI

SEQ ID NO: 20845 - DNA, 5005 bp, DROSOPHILA
ggatcaatatatcttaaggtagaggagagttacaggtgttgatttgcttttcataggcaagttgagtgcattttgcgctgcggctctgctgctgctctgctgcggcggctgcgttgagttgttgtcgttgagtttttgtttgaattagtctttgtgatttggtgggtatacgatttatagtagttgcattattattattattagttaataggtattatcgtgtctcttgaatatactctgttagcttttgctgctctctgcatttattctttatcaacatttaaggtacgttgcacattttgtccgcttttcgggggataaacataaactgtacgttatgttgcgcttctagcgtccatttttgaattactcataaatattattatatttataattttacttattaattaattttcaagtctatttgcgtatcacgtttaaaacaatgttcagttgtgaagtatccgttgttagacatataaagttcttcttcctctaatcgggcttttccttcgcttaagtcctctttccatttggttttccttgtatttcagccaggcatccattgagtgttgtactggttgcagtttgtcgattggctggctgtctctataaagattgcgcattgaagttgacaggggagttttggagtttgggggagatgttctatgtagcggggaattttgcatctttttcgctgtgttgatttgttctcattgtcgttcgttgttgatgttcttttttgtcggtcggttgtgtgaggacagtagtttgtgtgttttttacttgtattttgtttgctttcagttttcttttcttgaaacagtttttctcttctcacctaatagcttctcaaattggtttaattgttttatgatacacacttgagatcacaaacattactcttgttttttttttttgtttttgtttaaaaaagttcaaatttccagttgaaatgttttcgctttttttgtaaaagttttttcattttccattttttgttttatgtttttgttaatttttttttgttggttttatgttcatatcgatttttttttgcaactcattgacgggttcggggtccaccgggtgttcttgccattcatgtcggtcctccagatccatcttcagatccagctctagatccagatcctgttcctgctttcctactccagacactgatcctccagcaccagtgtggttacgactgcacattgagcagcaactttaggttgtgcgtgtcgaagtcatcgaggagattccgcttcgagcggcctgtctgcatcggcacctggaacttgggcatcgacggcatcatcatgggaagcttaccctccgacctggacaacgtccagtgctgcggtggcttgggcagcgccgttggagctggtgcatcaaagcacttgctgcccgcgaaatgcgtcagtgcggtgggtatgagtgggtgctgctgcatctggtgctggggcgatatctttccgcccaacgaagggctcttcctctgcttgcgagccgatcctccgacgattcccggcgagaaacctccacccaaaatggtggctggtgactgccgaacctgcatagctccctggggcgaacgtcctcctccgttccttcggttgttgttggcaaagaagaagcctccaccgcctacagaggatccctgctgctgctgcggcgactggcgctgctgctgcgactgctgatacttgttcttggatccggtcgactgggactgcagttgccgttgcctctggttcgggggcgtggcaagagcggatagacccaggccaaaaccgagactcgtgggcgaggagctcaggaattgggcgttatttgtactgctggcaatactgttggaatgtgcagttaccaagggcgttgctggtgcggatgcggatacggatgtgggggagacgggtgcggatgtgggcgagggggtggatgagttggatgcggaggtcgctgatgctgctcccttttttaatcgtatggacttggtggccgatgcggttgtcattctgatgttgtttctaacgctattgtgcgagtatgtcatagtaatttcgtcgctttccgatctctggatcgatatctctctctctccgatctcctcttctctttctcttattaaaatttctgctgttttccctttttgtttttggttaattcgctaaattaatgcttaacgttaaatatcacacgcacttaaatcaattctttataaatcgaaaccaaacgccttctgattctgattctgattctgcttctgctgctattgctattgagatgttgatctagctgcgccgctctattttctttggtagctgatagtcgccgaagttgagatgacctccaaaatggaaacgaaaagggcgacgggcggctgagcacgtagctgcttttccacttctcctttatgttttatgtacagctgttgtttactttacttttagttttacttgtaacgttatgtattgtttatcagtctgttgatttattttttttttactccggttaagctatccttagctataatttcgcaaactctctgttcttcgctgatttaactgctgctttcgcattccaagccgtgctgatcctgttttttggagaagagcgaaagaaaccattgaaaattcgaaacgatacatattggcttatgttaacaggaaaatagttgaagtcttatttcttatgaaactatttatgaaatcagcatcaaccgcattaattacaatgcagtttattgaaatacattcttacgttaaaaggtctatatttaaatttaggttgagtaagaaagataatatgtacatatacacatggaaaaaacgtcagtatacgacagaataccttttttacctcagtacgaaatgtaacgttccaaaggtaaaacaaaacagttctatttcgatggccgcgtgtgtgtgtgtataataagaaacgggaacccgaaaaggggaaataagacatgtaacgattacatttccaggtagcaacaacctgtaacgtagtgctaactacgtaacggctgcattatcgttttagcgtgtgactgtgtgtagactgtgtgtgctatttacgtcaacaaaaggtgtttgtttggctattcaagcaaacttgggacgtcagagggacgaccccacatgtatatataaagatacatatgtacatttattttgcgagaatacctgaattaatgaatcaacacacacacgcgcatacatacacacgcagcgattactaacacaattgcgacttacttttttgccgtagacctcacaccaacgagtgtgcttgcgtgcgtgtgtgtgtcgcagttttctcagccacttcgttatacagatttcgatatttcgacaagcgttatatacaaaatgggttgagtttgggttaaaagttgccttgatttggatgtttcactttaaaatgttgcggaaattggtttgttttgcgtttttttttttgctcttttcttcggattttatttggggttatatgtggatgtgttcgcagctgtgtatatatatgtgtgtgtgtgtgttttgtaaaatcactttcaaaatggcgacgggctggcttcgtatttatatatttatatatatatatatagatgtaattccgcttaaagctttctcttcacttacagacaaaggctcaaaaaaatcacactttcaactgattctgattcggattttgttaaactcttatgtacaccaccgtctattgcgcagcgtttatttcgaatttgatttccgttatttgcgctcgccaagtactccactttagtgtgtgctcttctgtagcctcactcgttgtacttcgacgcgtattaaaatattaaactttacacaaatatttgatttatgtcacttaacttagaacatttacaatatgcgttacatatatatttatttttgtagcagaaattttaatcgatatctttatcttcttcgcttatgcttgttctttgcgcatcggtacgcttgcctcgaattttccaccatgactcacacaagcgcacgactgcgcggacttttatatgcccgcagcggcattgccaagcctaaaaaataaatttccctctttatgtatacatcgaaatatgtttaggcaactctgggttcgagacacgggtgaatcagtggatactcaagccggaaaagctggaggcctgttcagacatgcggcgaccgcggttagtaaattagtaattattttttatgaccaacctattgtttttactcaaaatagtcaatgttgtggattcgggacttgcacgtgaaacaaatgttcaatattggtaaaacaaattaaatctacctgtttttgattactacctacctactagagttgttacatctgccgttataagaaaacaaagtacgcggcaatttgaaattgaatataatacgacagctggcattttggaatggatttcggcctaaatccggattatagttatcttatgtaaataaatattcaatttgttttagtttggcgcataagcggttgtttttgtatatcattatatgaatagttaataaaaattgtgcatgtaaattcaatagattaagtgcacgtaaaatgagagcattacgtttgcaattaaaaattaagccattaaacacgaaattgaatcaattaaagaatgtcatcttctccatattcggattactgtcttaattttaatggttgaagctcaaattgaattcaacgcccttgctatttttgtgtttttggcaaataaattagtgttacacaatctttttaaaagagaagataaatgtgatattacattttattgaacaggatcagttgcacatatcttttgaaatcagccgaagtagctgaataacacaagtaattaccttatacaaattcaatgcatcaagaaatctgacacaatggggtatagtgggatgccccgtcaagaggataaataaaataaaataggatgatgagaaccgcttacaaccggcgacgcgtgtcactcaaaacc

SEQ ID NO: 20846 - DNA, 1957 bp, DROSOPHILA
ggaaaattcgaggcaagcgtaccgatgcgcaaagaacaagcataagcgaagaagataaagatatcgattaaaatttctgctacaaaaataaatatatatgtaacgcatattgtaaatgttctaagttaagtgacataaatcaaatatttgtgtaaagtttaatattttaatacgcgtcgaagtacaacgagtgaggctacagaagagcacacactaaagtggagtacttggcgagcgcaaataacggaaatcaaattcgaaataaacgctgcgcaatagacggtggtgtacataagagtttaacaaaatccgaatcagaatcagttgaaagtgtgatttttttgagcctttgtctgatcagcacggcttggaatgcgaaagcagcagttaaatcagcgaagaacagagagtttgcgaaattatagctaaggatagcttaaccggagtaaaaaaaaaataaatcaacagactgataaacaatacataacgttacaagtaaaactaaaagtaaagtaaacaacagctgtacataaaacataaaggagaagtggaaaagcagctacgtgctcagccgcccgtcgcccttttcgtttccattttggaggtcatctcaacttcggcgactatcagctaccaaagaaaatagagcggcgcagctagatcaacatctcaatagcaatagcagcagaagcagaatcagaatcagaatcagaaggcgtttggtttcgatttataaagaattgatttaagtgcgtgtgatatttaacgttaagcattaatttagcgaattaaccaaaaacaaaaagggaaaacagcagaaattttaataagagaaagagaagaggagatcggagagagagagatatcgatccagagatcggaaagcgacgaaattactatgacatactcgcacaatagcgttagaaacaacatcagaatgacaaccgcatcggccaccaagtccatacgattaaaaaagggagcagcatcagcgacctccgcatccaactcatccaccccctcgcccacatccgcacccgtctcccccacatccgtatccgcatccgcaccagcaacgcccttggtaactgcacattccaacagtattgccagcagtacaaataacgcccaattcctgagctcctcgcccacgagtctcggttttggcctgggtctatccgctcttgccacgcccccgaaccagaggcaacggcaactgcagtcccagtcgaccggatccaagaacaagtatcagcagtcgcagcagcagcgccagtcgccgcagcagcagcagggatcctctgtaggcggtggaggcttcttctttgccaacaacaaccgaaggaacggaggaggacgttcgccccagggagctatgcaggttcggcagtcaccagccaccattttgggtggaggtttctcgccgggaatcgtcggaggatcggctcgcaagcagaggaagagcccttcgttgggcggaaagatatcgccccagcaccagatgcagcagcacccactcatacccaccgcactgacgcatttcgcgggcagcaagtgctttgatgcaccagctccaacggcgctgcccaagccaccgcagcactggacgttgtccaggtcggagggtaagcttcccatgatgatgccgtcgatgcccaagttccaggtgccgatgcagacaggccgctcgaagcggaatctcctcgatgacttcgacacgcacaacctaaagttgctgctcaatgtgcagtcgtaaccacactggtgctggaggatcagtgtctggagtaggaaagcaggaacaggatctggatctagagctggatctgaagatggatctggaggaccgacatgaatggcaagaacacccggtggaccccgaacccgtcaatgagttgcaaaaaaaaatcgatatgaacataaaaccaacaaaaaaaaattaacaaaaacataaaac

SEQ ID NO: 20847 - protein, 272 aa, DROSOPHILA
MTTASATKSIRLKKGAASATSASNSSTPSPTSAPVSPTSVSASAPATPLVTAHSNSIASSTNNAQFLSSSPTSLGFGLGLSALATPPNQRQRQLQSQSTGSKNKYQQSQQQRQSPQQQQGSSVGGGGFFFANNNRRNGGGRSPQGAMQVRQSPATILGGGFSPGIVGGSARKQRKSPSLGGKISPQHQMQQHPLIPTALTHFAGSKCFDAPAPTALPKPPQHWTLSRSEGKLPMMMPSMPKFQVPMQTGRSKRNLLDDFDTHNLKLLLNVQS

SEQ ID NO: 20848 - DNA, 3198 bp, DROSOPHILA
tgagttgttgtttgttttgattaaaaattaagcatgtcccggtcagtgggaatgggaatgggactggtactgggactgggacaggacctccagtacgtgctcggctttgggaattaggcggccagcagaagtaaatgcgctccgtaataaattcaaatcaactttgggtgtccgactacatggtcatcaaatcgattggaacacaaagttacatccacgcacacgcgcacattggaaagtcctgtcccaggatgctctttagtttttgccagctataaattttatcagcagggtccctttttggcttccgttttacaatgttcactttgcagatcctgcgcggactttgtgccgacttaagcgcattacggactccggctgcgactccggcggatattccgggactcggactcgaactcggtcggatccggattcgaacagagtcttttaatgtcttatcgcttgtgcaaataaagaagcaggcaatggtattcggctcaagtcttgttagccaggctaagcaattgatttgttcgtttactgccttatgcaaattccttgatggattcaattagcaaacgtccagtgcagcacacgtggcgtatacttaataaactgactggatagcaggcagccaaatcgaacaaaatccattgagataatcgaactattattcttctttattcttttcaatgcctttatgaactgtcatccacttccgctacttggtttctgaaaccggaagtactggagcagccattttgtatgcaaacaccgcaaatggcttccggttgcaaatgaagttaattatgtccaggtccttaaggtgaagccaattgcactcattgaaacaacgacaatgactgtggaaattaagctgtttcaaagagaaaagatgaaaagttaactgatcacaattgtgatggctgtttttaagcagattagtgtcgcacgtaattgtctttaataatctcaataggttggaatggaaacccaactcctactttctcatccgaataatgatggtaaagagggagtaggccccctttagggtggaaaagaacgtgtccaggtggatacgcatcattccgccagccacagcggtgctcttcttcaacgattgctcaacgaacagcatcattttccgcttaaagctcctgttctgtgtgtgccaattgcaactgaaggccgcgtagtggaggcgtccgaaccagtactcgttgtcggtgccgaaaaagcaggacggaaagatctgcagcggcatggccagggagtagaagatgaagtacatccgtgccatgggctcgctgacgaaaaacaccagggctgctaaaccgatgcacacattcaaggcggtcactgtgaactgaattagcatgggcagggaaatgaaggcctcgatgcgtcggaatagtctggaaaaaagttggaaagtgaatagaacacgaacgttacaatgagccgcctgcccactctagaatatgcttgtgatcggtgatgcaggcctccaggtccttctccgcatctctggctggatccaggcccacctcctcgaatctgttgtacaacattttgatgtgggatgagatcaggcacagcaccaccgccggaaagcagtcgctaacatagttttgcagcagctgaaacgagatgcccactatctgataggcgttcgctatgtaatagttcctggtggagtgcagccagtcgaagggaaaccaggcgggatacatcagaccgcgctcctccttgaacagaaaggatagctcggcgaacagggcacacggcatgtagatgccgatgaacacgtatagcacatttcgcagctggaccctcacttgtccgtagatgctgcgttgctccggacccacgacgcgttcatccaaaagcctcaacagccgctccatctccagcacatccttgatgttgtaggcgtagagcaggcacttcaccgaacaggctgtgcaggtcgcaaaggtggtcaggttgaggatgtcctcggtgatggtgcggttgcgaaagagggatattcccaggtgaacggggtagcacagggtcacgagaagattcgacacaatgctgtaaaacacgtaaaggttcttccagttctcgacccgaaaatgagccactcccaagtaccgccaggcggtccaatggctcttgaaaaactccagactgtccactctgacctctgccatggttccttgaattctcggctttaatgtaaggttctccacacttaaataccgttttgggtgatggctcaatcggtgcgattgcccaattatgtaattagccttgcgtggccacctcaattagaaattagaccacctgccgatgaactaaggcttcccattcgttcatcccatggcttcttcacatttagtttaaacgcattccatagagtgaagcactccactcaattgagcatccatgtttagttaggaataatttgttcacttcaatcgcaaatttaaatattggcctccttttataatgaaaaaaaagtggctcttcacaaacaaaccatacatcaggatatgaactatgtatatgtaataggaaaaagcatgaatgccaaacaaaggtaaaatgcaaaagttgttaaaactgtgacgactttgttgtacaacaatttgcactccatgctgatttcaacaatggcaactaaaatgcagaattacacgtgtcacagtttcaggtgagcagtttggcaaagctttcgtcgcttttataattaataaaaccggcgcataaatctcaattctcgttttcggcccactttgcattggctggctgctgcttttgtcagcggtttttgtcgctcaaaacgcgcgctagaaagtatgctacagaatttatggcgcactcgctgtcaattttgcaattttacaattttacaagcgaacatgcgaatttatggcgcattaaattattcgcttcgtaaaagtttcagagccggtgcccaggacttacttgatatttccacatggtgcatgcaattagcatgtccagacgcagtcgagcaaaaaacatgttgccatattgttgacagccccataaattgttgcatgcacgtcgaaatggcagcgggccaagcaggacaaacatccgcaaaaagcggcggcaaatcggacaaaagggcgaaaagggggcgggtgaaaccagctcatcgcccatatgcatttagatgcatcg

SEQ ID NO: 20849 - DNA, 1140 bp, DROSOPHILA
atggcagaggtcagagtggacagtctggagtttttcaagagccattggaccgcctggcggtacttgggagtggctcattttcgggtcgagaactggaagaacctttacgtgttttacagcattgtgtcgaatcttctcgtgaccctgtgctaccccgttcacctgggaatatccctctttcgcaaccgcaccatcaccgaggacatcctcaacctgaccacctttgcgacctgcacagcctgttcggtgaagtgcctgctctacgcctacaacatcaaggatgtgctggagatggagcggctgttgaggcttttggatgaacgcgtcgtgggtccggagcaacgcagcatctacggacaagtgagggtccagctgcgaaatgtgctatacgtgttcatcggcatctacatgccgtgtgccctgttcgccgagctatcctttctgttcaaggaggagcgcggtctgatgtatcccgcctggtttcccttcgactggctgcactccaccaggaactattacatagcgaacgcctatcagatagtgggcatctcgtttcagctgctgcaaaactatgttagcgactgctttccggcggtggtgctgtgcctgatctcatcccacatcaaaatgttgtacaacagattcgaggaggtgggcctggatccagccagagatgcggagaaggacctggaggcctgcatcaccgatcacaagcatattctagaactattccgacgcatcgaggccttcatttccctgcccatgctaattcagttcacagtgaccgccttgaatgtgtgcatcggtttagcagccctggtgtttttcgtcagcgagcccatggcacggatgtacttcatcttctactccctggccatgccgctgcagatctttccgtcctgctttttcggcaccgacaacgagtactggttcggacgcctccactacgcggccttcagttgcaattggcacacacagaacaggagctttaagcggaaaatgatgctgttcgttgagcaatcgttgaagaagagcaccgctgtggctggcggaatgatgcgtatccacctggacacgttcttttccaccctaaagggggcctactccctctttaccatcattattcggatgagaaagtag

SEQ ID NO: 20850 - protein, 379 aa, DROSOPHILA
MAEVRVDSLEFFKSHWTAWRYLGVAHFRVENWKNLYVFYSIVSNLLVTLCYPVHLGISLFRNRTITEDILNLTTFATCTACSVKCLLYAYNIKDVLEMERLLRLLDERVVGPEQRSIYGQVRVQLRNVLYVFIGIYMPCALFAELSFLFKEERGLMYPAWFPFDWLHSTRNYYIANAYQIVGISFQLLQNYVSDCFPAVVLCLISSHIKMLYNRFEEVGLDPARDAEKDLEACITDHKHILELFRRIEAFISLPMLIQFTVTALNVCIGLAALVFFVSEPMARMYFIFYSLAMPLQIFPSCFFGTDNEYWFGRLHYAAFSCNWHTQNRSFKRKMMLFVEQSLKKSTAVAGGMMRIHLDTFFSTLKGAYSLFTIIIRMRK

SEQ ID NO: 20851 - DNA, 4235 bp, DROSOPHILA
tagtgtagggcaaatcacacaactattccataacaatctagatgtccattaaatgtattataaatgtccattaagtattataatcaccaacaattgcagcacaatggaatttaacggatttggaacattcaaggaaacccccaaataatacgtgcatcctaacatgtgtgtaagatatccgatctataacagatagttaaaatatatacatatagctgtaattgatttttgtccagaactctgtgtattattctcgctcaacatgaatgaatatgaattcgagccgaaaactatataggaaagtgataaaagcacactcgattttgcacagattgtcatatgatgtataaggaaaagcgaaagtcagccataaatgtaagaagcagcagagtggtgaaaagttatcaattgaatgcatgttttaatttttccgctccgataatatatgtctaatgagtgtgtattaaatgtgaaaagttaaatttaaatgttttccaaatcgtgttttattttgggggtttaattacaaggtgcacggtctgcaagcagggtaagtaaaaattagtttaaatgttgaaaaatgattttcatccatatcatgattaattgactatgttatattgtacaaacgttcacattttttaaagcttgccatagtagctttcgttactatatagatactcaccacacttgatttaccgaaactgttagcttacatagtatgtaggtatgtatttgctaacagacagcttaattgttatctactttgatgtcgtggcatttgtttaatagaagtaaatttcgtttcaccatttacatgaagaataaagaagaaaaagctatgataaattaaaaattaatacaattttacattttactcaatagtagtatttccaattagaactctgttccagttggaattcttcggtatatttggtatattcctgggagaaacaatgggtcacactacgaagtagaggaaataaatacaaacaaattgggctgtgtagcggaatttaaatttaaactttatcaacggcagtgttaattagcgaacctctcggcaaaaatgaatataaatctgccgaatttcaatgtgaagaacctggtgaaggaggcgggcagcacaatatcacgagtggtgcaggtgaacaaatcaatgaatttgggtggctgaaaaaaaagcgggtggtggtgaactttcggtggttgggcaaatgacagatgtaccccaaaccaatctcaagcactttcgttgtttctttgcccttttcaacggctctccattgttttcaatgaccttttcagctcacggaggagaaactgggcaccacggagcgcaccgagtacgacttgcacttccagaatctcgccgagcgggctgatgtgaccaagacatggacggagaagatagtgcgcgacacagagtcggtgctgatacccaatcctcagaaccgggtcgaagacttcatcttcgagaagattgaaaagtcgaagccaaaaaggttgagcaacctagagcacctggctctggacatgatcgaggctgggggcgatttcgggcaggatttaccctatggtcaggctctgatcaaggtcggccaagcggaacagaaactgggccagtgcgagcacgactttatagccacctcgggcatttgctttacacagccgttgcgcaagttcctagacggcgaaatgaagacaattggcaaggagcgaggcatcctggagaccaagcgcctggatctggacgcctgcaagaacagggtgaagaaagcgcgcagcatgctgggtcagcaatcggtaagtgggtgggatttgatggggtttccttattgcaagggggtatgattgattgggtttcgtaatggctttttcactcacggtctttttctgccctctgctgcccggaatttttagaaagatggcatctcgccagaggccgtcttggaacaggtatcaaaaccttgaccgagctcgtgctctagatttatggctaatcaatgagccaatttctaattgcgattttttctaggcggaacgggacttgcgggtggctcaggccgagttcgaccggcaggcggagattaccaagctgctgctggacgggatcagcacatcgcaggcatctcatttgcgccacttgcacgccttcatccagacgcaagtgcgctactacaagcagtgcggcgatgtcatggagcagctgcagcgtgaactggccaagtaagtagtaggcgatcgatagagaatgactgtgacttccacgtaggcaccaaacgaatcttttcttgcacaccaaaacaccatgtcccatccttgatgaaacccgtggtcccttctggtggtctcactgtgcgttatgatatctgcttgtggtcttacagaatgcagcatcccaagccacgcctgcgtatcaatagcgaagacgttgattgtgggcctcccagctcggtgtcgatgcattcttgtgattccgattcattaggggggatagccctagatagcgatccagatcccgatttggacaagtcgcttacgaatctgctcgaagactttcacatagaattcgatacgacagccgtctccacagtttaggggtcttgttattgtgatcttcatatcgaatcggattccatgcccagttaacattagcatttaatttcaaatcatacgtactagataggttgctgttatcggtagttgttgcactttgtaaagtcaggtttcagcagctcatctctccatttagagctcgctatcaaatcgaatcaaaaactcattaaactctgcatcttccatcagcttgggaggccccacgccatacattccgctcgacgtgaacgaggccagtgccagcaagtccaacatatcgtccggagccgcagcccgtggtcctggcaacaatcactctgccaatatggctgccaccggccacaagcctaatcagcccatgcacgtcagcacggatcagatgcagagggcacgcgtcctttgctcctacgacgccaaggatcacaccgagcttaatttgagcgccaatgaggtaaagtaaagaacaaataatatcctaagcaatgcttatatataactcatttttcaggtgatcttcgtgacggagtgctcaccagtaaacgaggattacatgtacggaaaacagggtctattgaagggtctggtgccacgcgcatttgttgaaatgctcgacgaagagcacgatgtcaccctctaagccctccagcaatttgttcagcaataatcaatcattcaataatctcaagcaaaattaatgaacaagaaaatactccaagtacggcaatactcatatgttaagaaagcagacacgatcgagagaagggaacggcaattggacaattaaaggatgcggccaaagcggcatttggcactagcaagagagtacaataatttattagaatatacatacataaatatatacaaggcataatatacatacatgagcgtgttggttagtaaaagcattgtagattagccttcggtaataatcaaacccagatccatgcccaaagagctacgctactccgttgcacagatcacgctgtaatcaaatatgcattctggctgcctgaaaaaccgtcaagttatacatgtaaatttatgcaattccaaacattatgattgttaaatctaatcgcatatctaaagagaaagtgctgttttattaagcttctctacactcgaaaaagtattatatatgtgttatgtttgtcaatatcttagttaacaagcgaaattctctgtgctttactatatatcctataattataaacgtaagtatgaaattgttaatcctattatctatatattcagcgaaggcgtttccaattattatctaatatatttgctgcaattattatgttaccaaatttttcgtgcaatttttgaaagtcaattaaaagaatattgcttgttacatttaaggcaaaactttgaaacaccaaggcgcttgatagctaaaaaataacagataaatattgttgaaaacgtacaatacaataattaaaaagtaaacaacgatgatttttaggttttcagcaaacaaacaatgttgtaatatgaaaagcgaatttttaaacaccaactattatactacataattacaaatatatgatcaaaattaaaacaacaaaaccaaattaagttcgatttattttgtatttcattagattgcccgtccagctttgaaaatcaga

SEQ ID NO: 20852 - DNA, 1350 bp, DROSOPHILA
ggctgtgtagcggaatttaaatttaaactttatcaacggcagtgttaattagcgaacctctcggcaaaaatgaatataaatctgccgaatttcaatgtgaagaacctggtgaaggaggcgggcagcacaatatcacgagtggtgcagctcacggaggagaaactgggcaccacggagcgcaccgagtacgacttgcacttccagaatctcgccgagcgggctgatgtgaccaagacatggacggagaagatagtgcgcgacacagagtcggtgctgatacccaatcctcagaaccgggtcgaagacttcatcttcgagaagattgaaaagtcgaagccaaaaaggttgagcaacctagagcacctggctctggacatgatcgaggctgggggcgatttcgggcaggatttaccctatggtcaggctctgatcaaggtcggccaagcggaacagaaactgggccagtgcgagcacgactttatagccacctcgggcatttgctttacacagccgttgcgcaagttcctagacggcgaaatgaagacaattggcaaggagcgaggcatcctggagaccaagcgcctggatctggacgcctgcaagaacagggtgaagaaagcgcgcagcatgctgggtcagcaatcggcggaacgggacttgcgggtggctcaggccgagttcgaccggcaggcggagattaccaagctgctgctggacgggatcagcacatcgcaggcatctcatttgcgccacttgcacgccttcatccagacgcaagtgcgctactacaagcagtgcggcgatgtcatggagcagctgcagcgtgaactggccaaaatgcagcatcccaagccacgcctgcgtatcaatagcgaagacgttgattgtgggcctcccagctcggtgtcgatgcattcttgtgattccgattcattaggggggatagccctagatagcgatccagatcccgatttggacaacttgggaggccccacgccatacattccgctcgacgtgaacgaggccagtgccagcaagtccaacatatcgtccggagccgcagcccgtggtcctggcaacaatcactctgccaatatggctgccaccggccacaagcctaatcagcccatgcacgtcagcacggatcagatgcagagggcacgcgtcctttgctcctacgacgccaaggatcacaccgagcttaatttgagcgccaatgaggtgatcttcgtgacggagtgctcaccagtaaacgaggattacatgtacggaaaacagggtctattgaagggtctggtgccacgcgcatttgttgaaatgctcgacgaagagcacgatgtcaccctctaa

SEQ ID NO: 20853 - protein, 426 aa, DROSOPHILA
MNINLPNFNVKNLVKEAGSTISRVVQLTEEKLGTTERTEYDLHFQNLAERADVTKTWTEKIVRDTESVLIPNPQNRVEDFIFEKIEKSKPKRLSNLEHLALDMIEAGGDFGQDLPYGQALIKVGQAEQKLGQCEHDFIATSGICFTQPLRKFLDGEMKTIGKERGILETKRLDLDACKNRVKKARSMLGQQSAERDLRVAQAEFDRQAEITKLLLDGISTSQASHLRHLHAFIQTQVRYYKQCGDVMEQLQRELAKMQHPKPRLRINSEDVDCGPPSSVSMHSCDSDSLGGIALDSDPDPDLDNLGGPTPYIPLDVNEASASKSNISSGAAARGPGNNHSANMAATGHKPNQPMHVSTDQMQRARVLCSYDAKDHTELNLSANEVIFVTECSPVNEDYMYGKQGLLKGLVPRAFVEMLDEEHDVTL

SEQ ID NO: 20854 - DNA, 3642 bp, DROSOPHILA
ccatcaccagtcgtccctgggcagccggtacgtggtgttgtcgctgcgcacgatgtggatgccggctccgtagtagggtatcacataggcggagccatccgccggacccacaacctgcagggctatcagcacgatgtcaatcagctggcccaggaacatgccgccgagggtgcagaacttgaggagtccgatgcccggatagcccaaatagaatctatccacgccgaacatgcccagaaagacagagagtagcagtgtggtgtccaggtgatagccattcctatagaataggaatagaatataggtcttaagattatgtttatgagatactgtagctgcactcacgtccacttgcagggcacttctcgggtgaacgtggcattgccagtctccgtgcagttgatctcgttggcggcgatgcaccagacgcgggcgcgaccctccctggtgcatccggccagctgctgtgtcttgggatcgatttgacccctcgccgggtcggggcacatgaactggcccatcatctggagctcgttgcagtccacattgatctggtgggtttccttggcgaagaagaagagaaggagcagcagcactgggaacatgggtggtgttctttttggccacttcggttggacaggcggtggtggtgttctgttggcgggagctctttctcgcgggtactatctgttgtcgttttcgattccggtttcgatgttttgtttattgcagttcgcgggggcaggctccaaaattgttgttgttttttaacattggcattttgggattgggtcagtgtgaccgcactcggagcggtcgcaaataccactgtgcagagatctaaaaatataccgaaagttttatggctctaaaggtataatgttagaaaataacagcaatttaacagcattagtacattcttaaatataaatggtcgataaatttaccaccttggcggaatatttaaattagagataaaaaaaacctagttattaactttgtcattgaaacaagcctgcctgtttattgaacacatatttcttacagttcagcaaaaccttaacattcttcacattgcttattgtttcaggagatagggcgtcctgaaaagttatagccactttggatgtctggccaaaggtgcgttcaatgcgacccttctctcccgtcgagagctccacattcttgccgacgtacaaatcacgtttggcgtccttaaaaaggttttgaactatcacttcgctgctattgaccactcgctgaatgcttcccactttctgtttgcgcttgaaaatccgcagtttcggcagttcttcctgaaagtatttggaactgtgcgtctgccaggcaatgcgtccccaaaacgccaatctacaactggtactatggacatccatgtccagcttcgaagcaatcagcgttgaatgtggcggagatagaacaggactttcgaattgcaacagagcgtagatcacatcattatgttgaacctccgcaggctggacgtcctccatatactcgtattctttgtccagttggaaagtggaagttgtgccgtccgtatcccgaaacaaagttacattggccatcactgtgttgtgtcccacggagatgtgcatcttcctcatagattttatgacttccttgtaatagcggatgggtttaaactgtagacacacggcatagatgggtttcaggtaacccggttgggtaatgattccacgctccagcagctttgcattgaattgtgtcacgcaaagcccaattctgtcgcccatagaggcgctggtcacgtttttgcgaaacatctgtatggacttcactttcctttgctccccaagagctggcagctcaatcacattgtttacctgaacctttccctggagcagagtgccagtgcaaacggttccctggccctttattccgaagcaatgatcaacgtacatgaagagtggatcggctaggtttctctgcggctgaaagtaggcttctctaagtacttctcgcaactccgcgatatgtgttccttgcaaagcagacacagcacatatgggcacttgaccaccgaatgtggtggcttccaaagtttttgcgagccgcaagcgtagcttctccagcttggacgccctctgattttctggataaacatctattttgttgatcactacaatcagctttttctgcagcagctccccgataatgaggcattctgctgtttgggtttgtttgcctttttgggcgtccaccaccaggagcatgagatcaatgatctgggcacctgcaattgtttagtttagctaagggatcttagaatgacattaaatgttatcaatacctcctataatagtgcgtataagacttgcatggccggggcagtcgacaaaggtgaactggagctgttctccttgaggtaagtgcgcaggagcatccaccaaaagtccactaaagcccaaatccaaagttatgcctcgctccactgattgcggattcttgtcgaaggcggccgtgctggaaatcgaacttaaagccttggccaaggtggtcttgccactgtcaacatgtcccagcaagccaatattaaagttgatcggcattgtacgccgaggaaaaatgaggtaaaaaatagactgcactaaaccaaacaatagaaatccaattgagatggaagtctttcgattttctaataaccgataacagtggtgttagttaacagagaagtgtaacatgctgctattgaccgatatctgtgtttagtgagatgatcgcaagtgatctaaaacttgctatcagtttactaatttgagtcttaacatctgtgggggcaaacctattttttttttgttggtattcaaatcttatcttattaattgtgcttaccaccctgatgtcagcgtaataaggtagtaaagtggagtatgcatccgattaaattttgacctgggatccagcgattacccagataacggttgcgccataacaaagcattcaatcaaaaacactcgtatcgaaagagcaaagactacaagtttcacttatatttatgaagagccatcggctgttttaaagtcagtaagcggtcggtgctcttggcgcgcagttcgcaggttttctaaatctagttgttatggcctcttccacttcggttatccctaccaccgtaaatcccgatctgcagaaggaacgagatgcagccagctttaacagcgaagaattcgccgcttggtgggcggggggcgaggaagtgctaaagttcaaccgcggcgttcgtaagtccataaaactaatcatcgctccgcttatcagtgggaacagataatttggggtcatgctgactgggctgtttttctctatgaccaggtgaatatatggagaaggatgtggatttgtcggagatgctgcagctgcaaaacaaaacccacgaagagatcatcgagttttccacgcgtggagcaatcgaaggcgccaagaagctacgccgcctgcaggaggagcgcaatcctggcggagatgtctactggccgtgggtgtttcctgcttaccgatgccaagtacacgaataatgactgattaccttactcttctaggaatttgtatgacgctcaagtgatgtggggtctcgttcccggtggcaatccttttggt

SEQ ID NO: 20855 - DNA, 1585 bp, DROSOPHILA
tttggtttagtgcagtctattttttacctcatttttcctcggcgtacaatgccgatcaactttaatattggcttgctgggacatgttgacagtggcaagaccaccttggccaaggctttaagttcgatttccagcacggccgccttcgacaagaatccgcaatcagtggagcgaggcataactttggatttgggctttagtggacttttggtggatgctcctgcgcacttacctcaaggagaacagctccagttcacctttgtcgactgccccggccatgcaagtcttatacgcactattataggaggtgcccagatcattgatctcatgctcctggtggtggacgcccaaaaaggcaaacaaacccaaacagcagaatgcctcattatcggggagctgctgcagaaaaagctgattgtagtgatcaacaaaatagatgtttatccagaaaatcagagggcgtccaagctggagaagctacgcttgcggctcgcaaaaactttggaagccaccacattcggtggtcaagtgcccatatgtgctgtgtctgctttgcaaggaacacatatcgcggagttgcgagaagtacttagagaagcctactttcagccgcagagaaacctagccgatccactcttcatgtacgttgatcattgcttcggaataaagggccagggaaccgtttgcactggcactctgctccagggaaaggttcaggtaaacaatgtgattgagctgccagctcttggggagcaaaggaaagtgaagtccatacagatgtttcgcaaaaacgtgaccagcgcctctatgggcgacagaattgggctttgcgtgacacaattcaatgcaaagctgctggagcgtggaatcattacccaaccgggttacctgaaacccatctatgccgtgtgtctacagtttaaacccatccgctattacaaggaagtcataaaatctatgaggaagatgcacatctccgtgggacacaacacagtgatggccaatgtaactttgtttcgggatacggacggcacaacttccactttccaactggacaaagaatacgagtatatggaggacgtccagcctgcggaggttcaacataatgatgtgatctacgctctgttgcaattcgaaagtcctgttctatctccgccacattcaacgctgattgcttcgaagctggacatggatgtccatagtaccagttgtagattggcgttttggggacgcattgcctggcagacgcacagttccaaatactttcaggaagaactgccgaaactgcggattttcaagcgcaaacagaaagtgggaagcattcagcgagtggtcaatagcagcgaagtgatagttcaaaacctttttaaggacgccaaacgtgatttgtacgtcggcaagaatgtggagctctcgacgggagagaagggtcgcattgaacgcacctttggccagacatccaaagtggctataacttttcaggacgccctatctcctgaaacaataagcaatgtgaagaatgttaaggttttgctgaactgtaagaaatatgtgttcaataaacaggcaggcttgtttcaatgac

SEQ ID NO: 20856 - protein, 511 aa, DROSOPHILA
MPINFNIGLLGHVDSGKTTLAKALSSISSTAAFDKNPQSVERGITLDLGFSGLLVDAPAHLPQGEQLQFTFVDCPGHASLIRTIIGGAQIIDLMLLVVDAQKGKQTQTAECLIIGELLQKKLIVVINKIDVYPENQRASKLEKLRLRLAKTLEATTFGGQVPICAVSALQGTHIAELREVLREAYFQPQRNLADPLFMYVDHCFGIKGQGTVCTGTLLQGKVQVNNVIELPALGEQRKVKSIQMFRKNVTSASMGDRIGLCVTQFNAKLLERGIITQPGYLKPIYAVCLQFKPIRYYKEVIKSMRKMHISVGHNTVMANVTLFRDTDGTTSTFQLDKEYEYMEDVQPAEVQHNDVIYALLQFESPVLSPPHSTLIASKLDMDVHSTSCRLAFWGRIAWQTHSSKYFQEELPKLRIFKRKQKVGSIQRVVNSSEVIVQNLFKDAKRDLYVGKNVELSTGEKGRIERTFGQTSKVAITFQDALSPETISNVKNVKVLLNCKKYVFNKQAGLFQ

SEQ ID NO: 20857 - DNA, 3631 bp, DROSOPHILA
ttcgaaatgaaggaaaacccagtttccaatttcttccaccaagatttgtgagaacctttcaaagctctgttatccctgagcagataactaaagctctgctggtaatctcaaatggagcctacttagctttggctcataacacactcaagcaaggggaatcactcgagattgtaatggccaggcgaggaattggctgagattagagttttctttaaattcataaagttcaataaattgacattataaacattataaatactttggccgtgtggctcggtacagtatcgattagttgattatttatttaactggtagcatcgcttatcagttgcgttccattgtttcgaccagattgcggccataaagaatactatgccaaaaaataaataaactcattcatttatggcggctctttcggttgctggtgctgagcacagttgtattaagctttcaggggatcggatttaatttttctacggcttcaggcctggcgagcaaaaacttttgttgataatcgtgccataaatctttcgggcaaataaacacgtctctggccaaagttgagtgttgggtgggtgtgcttattttctagccaccactttgtgtaaatccatcaatatttgccgataatacgtagaaacatatgcatatgctttctcaatccaccagcggatcgtactacaatagatccgctacgtcagtcagtcggcttctggaacgaggagttgcgtcaaagtgtctccgatcgccgatcttgtttgtcgctgaaccatctccctggggactcacctgcgagtccgcgggccaatcaactatgtgggtgaatgatatcgccgagcgtgttggcccaagctttcaaagctttccgctgtcgtataaatgtcggcaatacaatggcggctgggcttagaaccattgccccaatctaacagtgcagacctcggtaactaaaccaaaaagtgttccaagtggagttgcttcctggacttacttgccgatcatgacccataaaccttgcaagggccctcgtctgggcgtgcgacatctgcagtcgttcctgctctttctcggcctgaccgtgatgcacattgcccggctgaatgtcagtgtggccattgtggccatgactaacgcggccaccacgaatcccaattttccggtgagttttaagtgatattccttgcggttggaaatagctgacgtggccgctttccctcgcaggagttcgaatggacggagaaacaaaagtcgtacatactctccagtttctactggggctacatcctgaccctgtttcctggcagcttcctgtgtcgtcgctacggcgccaaggtggtcctctttgtggccagttgtggcactgctgtgctcagtctgatgaccccgtggtgcatcacctggggtggatggcaggtgttttgcgccatccgcattctgcagggcttgttccagggcgtgatctttccctgcgtcacagagcatctggctatgtggtcgcccccagaggagcggaaccgcctgggcgccttcagctacacaggcacggattgcggcactgtgttggccatgttcataagtggcatgattgccaagggagcaatgggctggccgggcatatcctatgtgtctggatccctctgcgccgcctggtgtttcctctggctaatattcgcctccaacaatgccactgagtcccgatttgttggcgaggccgagtgcaagtacatcgaatcttcgctggagcacaatgaggacttccacggtcgtaccataccaattccgtggagggcgatctggacttctgtgcccttcctggcgctgctggtgacccggtgcgcagaaacctacggactgagcaccctgcaggcggaaattccctcctacatgaacggagtcctcaacatggagattcagagcaacgccgtcttctcatcgctgcccttcttggccatgtggctgctgtcctatgtctatctgattgccgccgatgttctgctcaagaagaagatcctgtcgctaaccgcagtgcgtaagctgttcaacacgctctcgttttggattccggctgccgccctgatcggcattggattcctcagcgaggagaacaagaatctggctatcgtgctgatgaccgtctcggtgggtgtaaacagtggagccaccattggtagttccctgaactccatcgatctgtcacccaatcacgctggtatattgattggcttgagcaatacggtggcgaacgttattcccatcctcacaccactgattgcgggtgagatcgtggctgataaggtgagtcaagcgtcaggcgtcgaaaagagttatggaaaatcccaattcgaaaacaataataaatatttcccaatttcgcagcacaatcgcggccaatggcagatcgtctttggactggcagctgtcatattcttcgtgggcaacgtggtattcatcatctggggaacggctaaggcgcagccctgggatgcggatgacttcctgaagcctaaggacacggagtccgcctgcgagaagcccaagatcacgcccgcagaagtcgcgccgcccatcgatcccgtcctggagcagcaaatcagttggccggagcggtatactgtcaaagccatcgagtgatttgtggcggaagtgtccgctcgcccagaacaattgcttttgttaatcagtattaaacataagtaggctgtaatttatatttattctatttataaggcgtgaccgtagcacgaggcttaagtaaattatttgcaattgaatcgcttttgttgttaccaatcgcttgtgatttcggcactcgaatcaaggaagagctcgataggccagtccagcgcaatctaatcagttaatttatctcataaatgtatataagtaccatatttatattggattgcggctcatgcgatcaattgtcaatggctgtagctaattctaagtgctttgcactgcccctctttctcgaggggttcaaaaacatttgccacagctgtttgtgaatgtataaaatgttcaaaattgtgatacttcgaataaactgttgaattgtttctccgttctttgtacttagctctatttgaactagctgccgatggctgagaatcatgtctctattgagggggacacagggtgtgttaaaggtttgtttgctctccataagaccagcctctttttggccctgctaagatctgtgaattcaactgtgatcttatcacaatatatttatatatatgtaagattgtttattattattgtttattattaatttaattctaaatgcggtaattatataaagtattcttagtttgtgaccgaacgactgctgctgagaactcgactgactgcaacgctgacttccactccactccactgctgccttgcgatcgttccttcgatgactgattgtcgataacttcgatttccgacaatcatgttgctgctcaacagcgctgccaaccgggttgttgccagccttcagccttactccatgttacattcggccctcctgatcatcatcatccgacccggatgacaataggtctgcattttcggctatgtgcttccacaacttcatgttgtcacagctggtggatgtgacattgggtccttcgacgtttgcttt

SEQ ID NO: 20858 - DNA, 1488 bp, DROSOPHILA
atgacccataaaccttgcaagggccctcgtctgggcgtgcgacatctgcagtcgttcctgctctttctcggcctgaccgtgatgcacattgcccggctgaatgtcagtgtggccattgtggccatgactaacgcggccaccacgaatcccaattttccggagttcgaatggacggagaaacaaaagtcgtacatactctccagtttctactggggctacatcctgaccctgtttcctggcagcttcctgtgtcgtcgctacggcgccaaggtggtcctctttgtggccagttgtggcactgctgtgctcagtctgatgaccccgtggtgcatcacctggggtggatggcaggtgttttgcgccatccgcattctgcagggcttgttccagggcgtgatctttccctgcgtcacagagcatctggctatgtggtcgcccccagaggagcggaaccgcctgggcgccttcagctacacaggcacggattgcggcactgtgttggccatgttcataagtggcatgattgccaagggagcaatgggctggccgggcatatcctatgtgtctggatccctctgcgccgcctggtgtttcctctggctaatattcgcctccaacaatgccactgagtcccgatttgttggcgaggccgagtgcaagtacatcgaatcttcgctggagcacaatgaggacttccacggtcgtaccataccaattccgtggagggcgatctggacttctgtgcccttcctggcgctgctggtgacccggtgcgcagaaacctacggactgagcaccctgcaggcggaaattccctcctacatgaacggagtcctcaacatggagattcagagcaacgccgtcttctcatcgctgcccttcttggccatgtggctgctgtcctatgtctatctgattgccgccgatgttctgctcaagaagaagatcctgtcgctaaccgcagtgcgtaagctgttcaacacgctctcgttttggattccggctgccgccctgatcggcattggattcctcagcgaggagaacaagaatctggctatcgtgctgatgaccgtctcggtgggtgtaaacagtggagccaccattggtagttccctgaactccatcgatctgtcacccaatcacgctggtatattgattggcttgagcaatacggtggcgaacgttattcccatcctcacaccactgattgcgggtgagatcgtggctgataagcacaatcgcggccaatggcagatcgtctttggactggcagctgtcatattcttcgtgggcaacgtggtattcatcatctggggaacggctaaggcgcagccctgggatgcggatgacttcctgaagcctaaggacacggagtccgcctgcgagaagcccaagatcacgcccgcagaagtcgcgccgcccatcgatcccgtcctggagcagcaaatcagttggccggagcggtatactgtcaaagccatcgagtga

SEQ ID NO: 20859 - protein, 495 aa, DROSOPHILA
MTHKPCKGPRLGVRHLQSFLLFLGLTVMHIARLNVSVAIVAMTNAATTNPNFPEFEWTEKQKSYILSSFYWGYILTLFPGSFLCRRYGAKVVLFVASCGTAVLSLMTPWCITWGGWQVFCAIRILQGLFQGVIFPCVTEHLAMWSPPEERNRLGAFSYTGTDCGTVLAMFISGMIAKGAMGWPGISYVSGSLCAAWCFLWLIFASNNATESRFVGEAECKYIESSLEHNEDFHGRTIPIPWRAIWTSVPFLALLVTRCAETYGLSTLQAEIPSYMNGVLNMEIQSNAVFSSLPFLAMWLLSYVYLIAADVLLKKKILSLTAVRKLFNTLSFWIPAAALIGIGFLSEENKNLAIVLMTVSVGVNSGATIGSSLNSIDLSPNHAGILIGLSNTVANVIPILTPLIAGEIVADKHNRGQWQIVFGLAAVIFFVGNVVFIIWGTAKAQPWDADDFLKPKDTESACEKPKITPAEVAPPIDPVLEQQISWPERYTVKAIE

SEQ ID NO: 20860 - DNA, 3459 bp, DROSOPHILA
taccaattgattttggaacgccacacgaccaggcaatgctgttctaaacaacctcgtttaacagtagaaaaggaactgcaggtaggatattttcgtcaagatatctaaaattaactattaaaggtgcaaaaccttggcttctttcttgactaagtaacctgaaggccgaaatgcccacctattcgaaaaagggttctcgatatggccatgaaaaagcaatgcattctttttggcgctaacattttaggccatgttgcttatgtggcatctatcttttaccgaatcgtgccagaatccttactagaattgtagaaatggatgaaaataatgatttattgattgatttacaatattctgactaatgacataataactagtttgtaaagtacaacaattttttaatgacgctttttaattcaatggttaaattcgcccgctgtatgaccttatcacctgacgtgtcgtatcagataagcaacatttggcttatcgtctaattcaatttggatttaaatccactctatgttcgtggtctcactcacttaacttcccacagtgattccgatcggtcgtttaaaagaagtcaggaggtgttttgttgaccaaatcaaaaatgacggccgagacaaacaaaggtgcgtgaaaggaaatccttcggttcggataagagtttgtgaatgaattgacacccaacgaacttgacacagtggaaaaccccttcatggctcagaccttgcactccgtctgatttctgggcttttcgcacacgcattgagtggtcataaattactacaataatggcgcgataaccgagtctcaagagcaattcagacttatttacccaactgtttgtagacaggaagtaacagtgataataccagttcgttttgttattgcaggacccgttctgggaatgaggcatgtccaggcgctactgatcttcctcaatataactaccgtattcataggccgcctaaatgtgggcgtgtctgtggtggcaatgaccaatgcggaaaccacgaacccgaactttccggtaagaatagggatcctatcaagaaaataccacttagcttactagattctctactaggaatacgattggacggaggcagagaagtcgtacattctctccagtttcttttggggctacatcctaacgcaattccttggaggttatctctgcaagcgctttggagtcaagagtgtaatgttttggggtgtcttcggatctggtgtctgcagtgctttgacgccgctgttcatcggatttggagaatggcaggcctactgtggaattcgagttctaatgggattggcccagggagtggtattcccctgcattcatcagcacctggctaaatggtcaccgcccgaggaaagaaatcggttgggagctctgagtcacactggaatcgagtgcggcaatgtgagtgccatgttcctgagcggaatgatagccaagagctccctgggatggcccggaatctcatatgtctcggctggagtggccttcttctggtgtacattatggttcgtcttcgctgccaaccatcctacggaatctcgtttcataggagagaacgaactgatctatattgagtcgtctctaaagcacaatgagtcataccacgctaccattatacccattccctggaaggcaatttggacgtcggcaccattcctggccctgctcatagtacgatgcgctgagaactggggactgagcactctgcaggccgagatcccatcctatatgaacggagtcctcgacatggacatgaagagcaatgcgttcttctcggcactcccattcttggccatgtggtgcatgtcgtatatttacctagtcgtagccgatgtgctcttgggcaagaactcggtgtccttgacgattttgagaaagacctacaactccattgccttctggattcctgctgccactttggtgggcattggctttttggacaaggaacaaaagaacttcgcgattgctctgatgaccatcagtgtgggcgtgaatagtgctcaaaccattggcagtgttttaaacacaattgatctatcgaaaaatcacgctagcattctaatgggaattgtgaatacagcggcgaatttcgtgcccatagtcactcctttagttgttggatggattgttaaggaaaatgtgagtgcttgcaaaagttggtaggaagtaaagatttttaattgcttattgtatcctttcctttcagtctgatcgctcccaatggcagatcgtgttcatcattgcctccgtaatcttctttgtgggcaattgcatttacttggtgtttggcacggccgaaactcagccctgggatgccgaggactatctgcagacacagaacccggaacttgccaatagaccacctatgcaggcgttatcctttccaattaacgaaaattccaaagagaaaattaatagtaaaagccattaattcttaacccatttaacgcatttattttttagactagtctggataaccaaatttacattttagcatttggtttttatttgttcactttagtggtctaaaaatcataacttggtagagagatagcaaacgattcttttatctataactgacactcaaattgagttattcttgatattttgaaaatgccattgagggcgacatcactaaatatttttaattacaagtccgcagtctcaagagctagtcagctattattgttttgattgctcgaaaatatagacatattcttgtgtttaaaattcccttagttaccgtcgctagtagactgaattatagagcatttagttctgcagttcatttttaagatgccgtttgcgaagacctaaaaatattatcttacgtacaacgatctcgtcattgcacttctcgccatatgatttgtgataaaaaaaattggcaatgcccacagtatcactaaatggtacacacctttatggtttctttggaacaaaaatttaaggcgcgacctataactttagtaagtgactcatcgttcgaaatgaaggaaaacccagtttccaatttcttccaccaagatttgtgagaacctttcaaagctctgttatccctgagcagataactaaagctctgctggtaatctcaaatggagcctacttagctttggctcataacacactcaagcaaggggaatcactcgagattgtaatggccaggcgaggaattggctgagattagagttttctttaaattcataaagttcaataaattgacattataaacattataaatactttggccgtgtggctcggtacagtatcgattagttgattatttatttaactggtagcatcgcttatcagttgcgttccattgtttcgaccagattgcggccataaagaatactatgccaaaaaataaataaactcattcatttatggcggctctttcggttgctggtgctgagcacagttgtattaag

SEQ ID NO: 20861 - DNA, 1335 bp, DROSOPHILA
atgaccaatgcggaaaccacgaacccgaactttccggaatacgattggacggaggcagagaagtcgtacattctctccagtttcttttggggctacatcctaacgcaattccttggaggttatctctgcaagcgctttggagtcaagagtgtaatgttttggggtgtcttcggatctggtgtctgcagtgctttgacgccgctgttcatcggatttggagaatggcaggcctactgtggaattcgagttctaatgggattggcccagggagtggtattcccctgcattcatcagcacctggctaaatggtcaccgcccgaggaaagaaatcggttgggagctctgagtcacactggaatcgagtgcggcaatgtgagtgccatgttcctgagcggaatgatagccaagagctccctgggatggcccggaatctcatatgtctcggctggagtggccttcttctggtgtacattatggttcgtcttcgctgccaaccatcctacggaatctcgtttcataggagagaacgaactgatctatattgagtcgtctctaaagcacaatgagtcataccacgctaccattatacccattccctggaaggcaatttggacgtcggcaccattcctggccctgctcatagtacgatgcgctgagaactggggactgagcactctgcaggccgagatcccatcctatatgaacggagtcctcgacatggacatgaagagcaatgcgttcttctcggcactcccattcttggccatgtggtgcatgtcgtatatttacctagtcgtagccgatgtgctcttgggcaagaactcggtgtccttgacgattttgagaaagacctacaactccattgccttctggattcctgctgccactttggtgggcattggctttttggacaaggaacaaaagaacttcgcgattgctctgatgaccatcagtgtgggcgtgaatagtgctcaaaccattggcagtgttttaaacacaattgatctatcgaaaaatcacgctagcattctaatgggaattgtgaatacagcggcgaatttcgtgcccatagtcactcctttagttgttggatggattgttaaggaaaattctgatcgctcccaatggcagatcgtgttcatcattgcctccgtaatcttctttgtgggcaattgcatttacttggtgtttggcacggccgaaactcagccctgggatgccgaggactatctgcagacacagaacccggaacttgccaatagaccacctatgcaggcgttatcctttccaattaacgaaaattccaaagagaaaattaatagtaaaagccattaa

SEQ ID NO: 20862 - protein, 444 aa, DROSOPHILA
MTNAETTNPNFPEYDWTEAEKSYILSSFFWGYILTQFLGGYLCKRFGVKSVMFWGVFGSGVCSALTPLFIGFGEWQAYCGIRVLMGLAQGVVFPCIHQHLAKWSPPEERNRLGALSHTGIECGNVSAMFLSGMIAKSSLGWPGISYVSAGVAFFWCTLWFVFAANHPTESRFIGENELIYIESSLKHNESYHATIIPIPWKAIWTSAPFLALLIVRCAENWGLSTLQAEIPSYMNGVLDMDMKSNAFFSALPFLAMWCMSYIYLVVADVLLGKNSVSLTILRKTYNSIAFWIPAATLVGIGFLDKEQKNFAIALMTISVGVNSAQTIGSVLNTIDLSKNHASILMGIVNTAANFVPIVTPLVVGWIVKENSDRSQWQIVFIIASVIFFVGNCIYLVFGTAETQPWDAEDYLQTQNPELANRPPMQALSFPINENSKEKINSKSH

SEQ ID NO: 20863 - DNA, 3311 bp, DROSOPHILA
aggtgagagatacgattcctatcacacttacttatatgtgtcgccggtttgcccatttatacatatattctgcggctgtgtctgtgctgcttttctattgttcatgagtccggctttgtatataaaggtgatcaatctcgcagtctaaaattcagttcacttcaaacgcgactcgaagccggtttttgcgaaagtcaaatcttttttattctagttgtgatttcgtggaaatttcgattattattcaaaatgcgtttcgctctgtttgcttttctaggtacataaaaacaactctttccattagcatctataaaaaatacaaagggtatagttagtttagggatcgaaaataaacaaaattataaatacaattttggatcaaacgaagcaatttgttgtatgattggaaagtgcaaaaataattggctatccattaagaccaaaagcccaaatgaatgatctcacggacagaattatattccgatctacaaaaatataatttgctccgaacggtgatgcaattaaattaaataaagtactaatacatatttatctagttttcatttaaacaaacataattgagcgggcttaagaattttaacatgaccaaacttatttagcactgtgcttgctggcattcgtcctggctactccggccaaggacaccaagaagccggccaccaacagttgccagcacaactgcggtgaagtctacgagcccgtttgtgccaaggccaaaaacagcagcaaggagcgcctcctcacctttggcagcccgtgcgtcatggccaactacaactgccagcatgccgacgatcgtaagagatcctctacaatatccttacagaattaaatatgatttaatccttttgcagcattcgagcagaagtccaagggcgagtgcggcggtggagtgagcgttcgcctgtcctagaagtccaatttcaacacttttgacgattaaacatctttcactgattgtgcaataatatattcatgtattttttattccaacgggaacgctttatttgttttcgacacaagcttgtatttcgcataacagaacggaaaatttaattagctctcgggactacttagaattcccctacaaaacacacacgtgcatatgcattcatacaagatcagttccagctatcctttagtatcaatgacagacgattcctaaacttctatgcacttatcagcagtcacgcggccaatctgcaatcaaaatcaaagcattaatcagttggtatgattattattgttattatttcagtaaaagtgtgttaagagcaactagccaataggcaataaacgaggattattttgcattgtcatacatattattaaaaaatatgtatgtagttcctcttaaccaccattcactgtatccataccatttgactcaccactcacagagctctagcgaacaataatcgcatactacgacctaatgccaagtaatatatagtatatggtattgtattgtatggtagagtacttatagttgttttttttttagtagttgttcagagaaacgctccactacattcacagattccgttccgcctctcagttggccaccttcttctgctgcttgaccttgtagtcagccagggccgccttgatggcatcctcggccagcatggagcaatgcagcttgacgggcggcagacgcagctccttggcgatgtccgtattcttcagctttccggcctcgtcgatggacttgcccttcacccactcggtggccagggagctgctggcaatggccgatccacagccgaaggtcttgaacttggcgtccactatcttgccgttctcgtccaccttgatctgcagtttcatcacatcgccgcaggctggtgctccgaccaagccggtgcccacagtgacatccttcttgtccaaagatcccacgttgcgcgggttttcgtagtgctcaacgacctgtgggtgaaaataggtaggtgtgttagtcaccagggggttgtgctatcgcgcttatcactttgcgtgccgcctgaaacgctgtctttcagaacgacaacaaagtcgtttcttatctatattatacagcttctagatattacgaaagaaccttccgcgcggcaattgcgagttctaacttacattttcatgatacaatgccaccgggacactttgtacgcgcttcagctgcgatcgcagcaaccgggaggagtttcgcaccagggacatatttaaattaaataaatcaatttaatgaagaattgttgtgaaattcaaagagatcgaaaaaacacaggcaactgcgtgttagaaacagctgatggacagtgtgcccgttttaaggcagatgtgaaagaccagctaacgccgttgtcgatatgttttcgattttttaaaagatttcttatattattattatttactccttaaaaacagttcagtataataagttatttactataagtaataaattgtttttatcaataatgagccataaaaaagcttgaataaagcaccctcttgcatttaaaatcacactctgagttggcagcttgccaggtattttgtaaactcactcctatggtcactccccaatcacaaagtttactattgcccatccacaaattctgccaacttccgatatatttttacagcagcagactatgagtttctgaaactagtcccctaggtcaataatatccacatccagtcatgacctctcgcaagcgcagtggcagcggctccaccaagcggcccaaggagaaggttcgcccggagcactggatttcacgagctccgccctcgaagatttgtgctttgcttgactaattggaatttattgcaggtggtctatatatatgagctgttgtgccggggcgaggatcccagcagcgagagtcccgaattttggaacgagttcttcctgctgcagccgaacttcgaggcgctggagaatgagattggcaaactcaacaacgagcagctgcagctggtgaaaccgaacctgaacaccctcttccagaggtgcatcgaaatgcttgacacgggtagaccagtttgacctattaatatatacctccagccacctataatccgtgatttcccccagaagatcatcctaagcggctgtgcaacagcctacacacgctgtgctccctgttctacgggatctttaagaagtccaacgcagaaccaacattaaacatcctaaacgagatcttcggccatgagaagatggacgaatggctgaagctactcatgcagtactgcaatcgcatcctcctgggcgatgtgcccgaaaacgctcgatttatgtg

SEQ ID NO: 20864 - DNA, 937 bp, DROSOPHILA
ctgtttctaacacgcagttgcctgtgttttttcgatctctttgaatttcacaacaattcttcattaaattgatttatttaatttaaatatgtccctggtgcgaaactcctcccggttgctgcgatcgcagctgaagcgcgtacaaagtgtcccggtggcattgtatcatgaaaatgtcgttgagcactacgaaaacccgcgcaacgtgggatctttggacaagaaggatgtcactgtgggcaccggcttggtcggagcaccagcctgcggcgatgtgatgaaactgcagatcaaggtggacgagaacggcaagatagtggacgccaagttcaagaccttcggctgtggatcggccattgccagcagctccctggccaccgagtgggtgaagggcaagtccatcgacgaggccggaaagctgaagaatacggacatcgccaaggagctgcgtctgccgcccgtcaagctgcattgctccatgctggccgaggatgccatcaaggcggccctggctgactacaaggtcaagcagcagaagaaggtggccaactgagaggcggaacggaatctgtgaatgtagtggagcgtttctctgaacaactactaaaaaaaaaacaactataagtactctaccatacaatacaataccatatactatatattacttggcattaggtcgtagtatgcgattattgttcgctagagctctgtgagtgattggccgcgtgactgctgataagtgcatagaagtttaggaatcgtctgtcattgatactaaaggatagctggaactgatcttgtatgaatgcatatgcacgtgtgtgttttgtaggggaattctaagtagtcccgagagctaattaaattttccgttctgttatgcgaaatacaagcttgtgtcgaaaacaaataaagcgttcccgttggaataaaaaat

SEQ ID NO: 20865 - protein, 154 aa, DROSOPHILA
MSLVRNSSRLLRSQLKRVQSVPVALYHENVVEHYENPRNVGSLDKKDVTVGTGLVGAPACGDVMKLQIKVDENGKIVDAKFKTFGCGSAIASSSLATEWVKGKSIDEAGKLKNTDIAKELRLPPVKLHCSMLAEDAIKAALADYKVKQQKKVAN

SEQ ID NO: 20866 - DNA, 4794 bp, DROSOPHILA
aatacatctcattcgcttaatctcattgcaattagctcatactaagtcaaggaaaataagttttgtgtttgtgtgtgtgtgtgtgctagcgctctttctctctcaacaaaaatcgattcgctaaattagttaattaattaatcgtttagttcaatttacacgcagaaatatattatacgttattaggtttacacagtaatttaatagttaaatatttgatttgctatttaaatggtaaacgatccgttctttcagtgttcaaaatgcattcacatcaatggaaatcgatcgatcctattcatcaatttattaattagctagactgtgatcctcaaacaacgattatcatcttgtgtgatctcttatggatttttgctgctttttctttgcttttgcttttgccatttggttggtttttttttgttttttgttttttgttcgccaagctactgataaaacgcaaatagttagttatacacacacagtcgtacacgtaaaatgtaacatattaagtcaaaagttagattatgcaacaataatacatatacatatatttaagtatatatttaaaaaaaaaaaaataaactctgatttcactttcaatgtttaattcgtataaggaacatttatggactattgcggcacatattgcaaatggtttcgaatttgtttgcttgtttcattcgtttcttctatgcaagattacatttctagagttcaaggattacgattattacaaaaaatgacctttgctcatttcaaatttcattacactttcggttgcatctcggcactgcgcctcgatatttctaaataatcatatgtatacatatatgtacgcttcttttttgccgctgctaaatgtttggaacagattagcgctggattttgtttcccatatctcttcaattggattagtgtttcttgcctctggggattatggggattctgctggggtttttcatcttaaattatcgcattatcgcagggggagggatttcaattagctctttccgttttgttcattttccattttaaaatttgcccatttcagtttatagtttatacattacaacttaagctaggttatgggttacgttatgggttggttttcttctatcgcgaaagggaattttccgttttgggggccggcgcgccaaagtatgccacacataattttaatatccaatgtgcgcgcgcctgcgtaaaaacaaatctctgctccgtgccgtcggtttggaggctctgggccatggacatagacatgggcatggagctggtgcgggatcacatacgaaatgcagggggttatgacaattacttagaattagaattggttttagtatttaagttgttgctctgccacattaagtttaattaaggttccgttcggttggtgttctttgtgttgcctccgctccgctccactcagcccctccttcagaccaattcagacctcgccagactccaccgtgccgcatctgcatctgcatcctcgtcctgcagccgcactagatggcacagcttacccatgtccagccccatttttgccgccctgctgactgtgctgattcggatcctcgctgggcgtgggcggctgatcccgccgcggcggcatccgttcgttgacggcatccaggcccttggcctccgcgaacgaggtaatcttgtggttgggcgagaagccctgcatggcgttcttgagcgactgcttgccgccggagagggcgccgaggggcagggcgcccgtgggcgtcaggcccttcagctgcagcaccgactcggactcctcgcgcagcacggagaagacgcgcgccatcttgccaatggcacggatcttgttgcgtatcacctccttgcgcagcgccgcctcgtcgtcggagagcggctcctcgctctcctcggtcatgagctcgtcgtcggagcagatgttcagcacgttcaccaacatctcggtgaccttctcgcccacgaagggtagcgaccaggtgaacacgtccatgaagttgggcagccagtacgggtgcggcgagcagttgaattgccggatgttcatcacgttgttctcgtacttcagcaccgccgccttgttgttgtacacgtcgagatagttgggcgccgagaagatggtgatcagcgaggggaagccggtggtctggcttttgcggtacatgcggtagccggcgtcctgcgcctcgtgcgcccggatgatcgacagcaggttgttgttctgcaggaagtcgcagcaggcggcgtagctgtagaagtacgagcagccgcgcacggagttgtgcgtgtagaagtccgagttcttctcgttgccaaagtcctccaggggatcggaccacagcaggtcgcacatggggccaaaggcgggcggctccttgaagcggtcgagccgccggatgtcctccagctcgtgtatctccggcgacagaccgccgtgcacgcagaggaactgctggttcattagcgccgccagcggcaggcagtcgaatgcgtccatgcaggcgtcgtacacgcgctccgagtacttgatcttgcactcctgcttgaaggtgaagtactcggttaagtgccggcactcgtggttgccgcgcagcaggaacagcgtctgcggataggtgatctttagcgaccacaaatacaggacgcactcgatgctgaagtagccccgatcgacgtagtcgcccaggaacagatacttggtgctcgcgggcgagccgcccacttcgaacagcttcatcaggtcgtagaactggccgtggatatcaccgcacaccgtcaccggcgcctcaatatcgatcatcgtcttctcctgacgcagcagggcggctccgtcctggatgattttcagggcgggcgcctcctcgattctgccctcaagaatgaagtgctgcttgagcagctcatggttgggcttgccggtgcgttggtcgaacacctccgccaaggtcagcttgtggctgggcgggaagggaacgctgtccaccacccgttccttggtgtttactgccgtgtggccgccgtgcagctttccagtgctcgctcctgtgcccgttccagtggtgggactgctgttgtcgctgttgttgcccgctgcagcggtactgctgctattattgttgttgttcgaggcggtactattggcatctgtggcttccgccgatccggcactgacggtgcgggcacttgttgccgcctgggcaacgctgctgctctggttattcgaagacatggttgagacttctgtttctgtttcggtttttggctctgcttctacggctactgcttcccgtttcctttttcctggtttctattccgggattcggaatcggactgctcctctcccgctcccacttccactagctcgctctcccgctctcgctctcccgctctcgctctctcacggctcagttctgtttccactacccacacacacgcacacgcacactcgctcactcactcactcacactctggtactttccctggctgctgctgctgctgctgtgtggttgttgctgctgctcctactgttgttgctattgttgctgttgttgttggagtgcctggtgagccgctttatcgccttccagctttgattcgctttcctttactttccgctggctttgctttgattttggaacgctgactccgctgctttcttccgtggcctgcgccgctggcctagccgttttccaaaagtgctgctttcacttaacaacaatcatagtcactctgtttcagtatttgctacttttttcgcttcggccctgcagacgtcgtaatttctctctttcgctacgttttttttctcgctttttttaatggaattttctgcagtgtggccgtggctcaaaagctcaaacttactacacggccgctggaatgtgtactctagtcgagactcgcacctggaatggaagtcatggaagtagtcgagtaaggtacgtgcaaaattatatctttctctgtatatttaatattctaaatgaatacgcttacttttatctcctttctaacaatatattcactttaaagatgtagatggtggcgcaaaattaaaatctgaacaaattccgcacagcaatgtaccacaaggtgctaaactttgataattatatccaattggacttggtacatattcaaaatgtcaactggaaaacattttattttaaaaaagcttaagctatcaattaagccgttcatcttaattattctttaaacgtagttaactaaacattataaaatgaattaaaattagagaatatgagagcccagatgctgaatttatcaatataggtaaaaacctcattattgaaattcttggccacctgtcggtttcgccccacttacacttacctcttccttaattttcgagcaaattctggacattactcactcagtccaccacttctccagccttctactggtggatatgcttcccgggattaaatatgtatatgcttattctgaaattccccggtggcgaaatcgactcaaacgaacttttagaggaaataataaatgtgcgcgcattttattctcaggataggtacttgtatattttttttaatgtttttgtatttcttttttggttgtttttgttttttttttttgcttgttctttttttttcgtttttgttaatattaattatgttaataacattgataatcattttgttttcattgggtttcttcattttgttttgcattcacttaaggttaaaacttgttgtctgcattttgttgttgccttcatttattctccatcgtctacatctccattatca

SEQ ID NO: 20867 - DNA, 2575 bp, DROSOPHILA
agaaattacgacgtctgcagggccgaagcgaaaaaagtagcaaatactgaaacagagtgactatgattgttgttaagtgaaagcagcacttttggaaaacggctaggccagcggcgcaggccacggaagaaagcagcggagtcagcgttccaaaatcaaagcaaagccagcggaaagtaaaggaaagcgaatcaaagctggaaggcgataaagcggctcaccaggcactccagcagtccgattccgaatcccggaatagaaaccaggaaaaaggaaacgggaagcagtagccgtagaagcagagccaaaaaccgaaacagaaacagaagtctcaaccatgtcttcgaataaccagagcagcagcgttgcccaggcggcaacaagtgcccgcaccgtcagtgccggatcggcggaagccacagatgccaatagtaccgcctcgaacaacaacaataatagcagcagtaccgctgcagcgggcaacaacagcgacaacagcagtcccaccactggaacgggcacaggagcgagcactggaaagctgcacggcggccacacggcagtaaacaccaaggaacgggtggtggacagcgttcccttcccgcccagccacaagctgaccttggcggaggtgttcgaccaacgcaccggcaagcccaaccatgagctgctcaagcagcacttcattcttgagggcagaatcgaggaggcgcccgccctgaaaatcatccaggacggagccgccctgctgcgtcaggagaagacgatgatcgatattgaggcgccggtgacggtgtgcggtgatatccacggccagttctacgacctgatgaagctgttcgaagtgggcggctcgcccgcgagcaccaagtatctgttcctgggcgactacgtcgatcggggctacttcagcatcgagtgcgtcctgtatttgtggtcgctaaagatcacctatccgcagacgctgttcctgctgcgcggcaaccacgagtgccggcacttaaccgagtacttcaccttcaagcaggagtgcaagatcaagtactcggagcgcgtgtacgacgcctgcatggacgcattcgactgcctgccgctggcggcgctaatgaaccagcagttcctctgcgtgcacggcggtctgtcgccggagatacacgagctggaggacatccggcggctcgaccgcttcaaggagccgcccgcctttggccccatgtgcgacctgctgtggtccgatcccctggaggactttggcaacgagaagaactcggacttctacacgcacaactccgtgcgcggctgctcgtacttctacagctacgccgcctgctgcgacttcctgcagaacaacaacctgctgtcgatcatccgggcgcacgaggcgcaggacgccggctaccgcatgtaccgcaaaagccagaccaccggcttcccctcgctgatcaccatcttctcggcgcccaactatctcgacgtgtacaacaacaaggcggcggtgctgaagtacgagaacaacgtgatgaacatccggcaattcaactgctcgccgcacccgtactggctgcccaacttcatggacgtgttcacctggtcgctacccttcgtgggcgagaaggtcaccgagatgttggtgaacgtgctgaacatctgctccgacgacgagctcatgaccgaggagagcgaggagccgctctccgacgacgaggcggcgctgcgcaaggaggtgatacgcaacaagatccgtgccattggcaagatggcgcgcgtcttctccgtgctgcgcgaggagtccgagtcggtgctgcagctgaagggcctgacgcccacgggcgccctgcccctcggcgccctctccggcggcaagcagtcgctcaagaacgccatgcagggcttctcgcccaaccacaagattacctcgttcgcggaggccaagggcctggatgccgtcaacgaacggatgccgccgcggcgggatcagccgcccacgcccagcgaggatccgaatcagcacagtcagcagggcggcaaaaatggggctggacatgggtaagctgtgccatctagtgcggctgcaggacgaggatgcagatgcagatgcggcacggtggagtctggcgaggtctgaattggtctgaaggaggggctgagtggagcggagcggaggcaacacaaagaacaccaaccgaacggaaccttaattaaacttaatgtggcagagcaacaacttaaatactaaaaccaattctaattctaagtaattgtcataaccccctgcatttcgtatgtgatcccgcaccagctccatgcccatgtctatgtccatggcccagagcctccaaaccgacggcacggagcagagatttgtttttacgcaggcgcgcgcacattggatattaaaattatgtgtggcatactttggcgcgccggcccccaaaacggaaaattccctttcgcgatagaagaaaaccaacccataacgtaacccataacctagcttaagttgtaatgtataaactataaactgaaatgggcaaattttaaaatggaaaatgaacaaaacggaaagagctaattg

SEQ ID NO: 20868 - protein, 570 aa, DROSOPHILA
MSSNNQSSSVAQAATSARTVSAGSAEATDANSTASNNNNNSSSTAAAGNNSDNSSPTTGTGTGASTGKLHGGHTAVNTKERVVDSVPFPPSHKLTLAEVFDQRTGKPNHELLKQHFILEGRIEEAPALKIIQDGAALLRQEKTMIDIEAPVTVCGDIHGQFYDLMKLFEVGGSPASTKYLFLGDYVDRGYFSIECVLYLWSLKITYPQTLFLLRGNHECRHLTEYFTFKQECKIKYSERVYDACMDAFDCLPLAALMNQQFLCVHGGLSPEIHELEDIRRLDRFKEPPAFGPMCDLLWSDPLEDFGNEKNSDFYTHNSVRGCSYFYSYAACCDFLQNNNLLSIIRAHEAQDAGYRMYRKSQTTGFPSLITIFSAPNYLDVYNNKAAVLKYENNVMNIRQFNCSPHPYWLPNFMDVFTWSLPFVGEKVTEMLVNVLNICSDDELMTEESEEPLSDDEAALRKEVIRNKIRAIGKMARVFSVLREESESVLQLKGLTPTGALPLGALSGGKQSLKNAMQGFSPNHKITSFAEAKGLDAVNERMPPRRDQPPTPSEDPNQHSQQGGKNGAGHG

SEQ ID NO: 20869 - DNA, 2692 bp, DROSOPHILA
actccagacgacacccctaaaaagaaatcgctgaaaaccgttaaggaacccataggggtaacacagagatttggatgcggtgtcggctttcaagcgttccacactgctgggaattccctgagtaccatctatggggggtacgacgatatcgttaccccgaatacccgcccccacaattcacccgacaaatggtactcgtaacgtcctgatgatgccgttctcctcgggatcgccccattccatttcccacttaactgcatatggtttttgttagtggttgtttcgggtttcggaaatttctgcccgcgttcgggaccctaccctccacttcatctattagcaacggctctggcagctgttctaccctattaaaaggtcccttagttcctcgattccgactacctgcatctgctgaatggaaatgcactgaaaactttatcgtattttcttttttaagtattttattactgttattttgattagattaaatgaattgctatgcaagaaatgtagattctactgataggaaatctacatcaatatcaataaatcaatacttcacgaaaatgattgcaggtgcagttttttagggaaaaataaaacaaataaaaatcaagcagaatttttgtttagggtaaaatacttatttatcatgattgcttactcttctaggtctaacttaaattttttgcagtgtacaaaggcattcccagcgtgtgtaacgtactttccagccttaacgaaaccgggcaccgaagggaatttagggtattctacccctggaatacctcccctcgcatacctgtagcaattctgggcattgcagtgaaatcgaataatagacaggaagtcccttcgatgtcttttattcctttcaagagccgagccgctctagtagatcatggtgcagcgattgtgtcgacccatgatgctggtctttgttctgttttatcctaaaactaagttcctaatgtggtggtcctaggcatctgagcccgactcaggtggagttatccagaacaaccacctgtgtgttttggtatcttcgccaggcactctccgccctttccaagtattcaccgatctcctgtcgcttgttcagaaggtcgtacttctctagagccaacttcaggagtacgtactccaggcttcgaatgcctccgagattgtttggatcccttaggttatcgactaggattacgaatttcttgagcagctccaccagctgcccaaagttgctcaaatcgtccagattagcatccacctcgttgacgtatcgcatactctgcttaatccttctggccaaatcggtgctcctgccaaccaggggtgagagctccgtattcagctgttgcaccgatctgcgcgtatcggtcaccttcagcaatgcgtcctgattatactgatcctgatctgtccactgggtcatcggagccttagtagtcgctccttcgttgtccaccatagatatccgatcgttctccacaataatggtcttgtcgatggtgtcggatgcattcggcggctgctgtacgtgaaagtccaaggtgaagtgaaaccgcatgctaccctataaggattagaaattttgttaagaaacatccagcaggcttgcacaatcggaaacatgcctggaccaaagtaaatgctgctaggaaaaccaaaatagtcttagaggaccacatcttgtcggtgaactgggaaatgtttgactgattccaagctgaaatctcacgatcagaccacttcatgcaatccaagctcgacatcgacgcttatcaaaccacggggttatcacacatcgttcccacttgaccgataacagattcattcacattcaatgagttttctagctatgggaatacatattgccagacaaagcgcaagtcacgtgttcgccgagatgaaaagtcaatacagtgaggtgagcgattgccaacctaaaaccatttcaaggcgcttggaatagcaagtatttcaatttgctgaaagcttcgtatccaatatgacctctatggaaactagtaagttctttgaacctgccgagggtatacagaattcagaattatcttaaactgactaaacgaatgccatatcatatgtggtctattaatattaattagtggtagttgtattgtaataaaacaatgagtatgcagattgtatgcattattgagggtgatccaaaaagcagttaatattaattgcctgatatggatatagttcccatttggtataaaaatttaaacaatttaagaaaaaatgtgtgctatataaatataatcttaatacatgtgacataaaagatggactggttaatagcccgcatgggtatttggagtccgtgaatcatccaccttttttgggaacccatttcacagagtcatttccgttacgaactcaaccgaatttccgactctctaagggttaacatctgcttgactacactacgcttatcatccgtctgaggtaacaacaaccgctcttatcgctatatatgatgtttacgcgtgcaataataattataatgtacacagagccactatagcgataaggtgcgaatgctatcagggtccgcaagtaccccacatatatgtacatatgtatatgtacacagtcgaatgtttgtttgtgcgaaagtatgccttaatttagaaaatggtatcaaagcagggcagttcatggaagcgaa

SEQ ID NO: 20870 - DNA, 631 bp, DROSOPHILA
cgacaagatgtggtcctctaagactattttggttttcctagcagcatttactttggtccagggtagcatgcggtttcacttcaccttggactttcacgtacagcagccgccgaatgcatccgacaccatcgacaagaccattattgtggagaacgatcggatatctatggtggacaacgaaggagcgactactaaggctccgatgacccagtggacagatcaggatcagtataatcaggacgcattgctgaaggtgaccgatacgcgcagatcggtgcaacagctgaatacggagctctcacccctggttggcaggagcaccgatttggccagaaggattaagcagagtatgcgatacgtcaacgaggtggatgctaatctggacgatttgagcaactttgggcagctggtggagctgctcaagaaattcgtaatcctagtcgataacctaagggatccaaacaatctcggaggcattcgaagcctggagtacgtactcctgaagttggctctagagaagtacgaccttctgaacaagcgacaggagatcggtgaatacttggaaagggcggagagtgcctggcgaagataccaaaacacacaggtggttgttctggataactccacctga

SEQ ID NO: 20871 - protein, 187 aa, DROSOPHILA
MRFHFTLDFHVQQPPNASDTIDKTIIVENDRISMVDNEGATTKAPMTQWTDQDQYNQDALLKVTDTRRSVQQLNTELSPLVGRSTDLARRIKQSMRYVNEVDANLDDLSNFGQLVELLKKFVILVDNLRDPNNLGGIRSLEYVLLKLALEKYDLLNKRQEIGEYLERAESAWRRYQNTQVVVLDNST

SEQ ID NO: 20872 - DNA, 4160 bp, DROSOPHILA
tccctggatgagctgctgcccctcaacatgattggaattaagaaggtgaccggtggctcgctggaggagtcacagctagtgtcgggtgtggccttcaagaagaccttttcctatgccggctttgaaatggcccccaaatcctatgacaactgcaaaattgccctgctcaacatcgaattggagcttaaggctgagcgcgataacgccgagatccgcgtagacaacgtcaaggagtaccaaaaggtggtcgacgccgagtggcagatcctctacaacaagctggctaagatccacgagtccggcgccaatgttgtcctctccaagctgcccatcggtgatgtggccacacagtatttcgccgaccgcgacatattctgcgccggccgcgttcccgaagaagatcttaagcgcaccatgaaggcttgcggtggagccgtaatgacgacggccaacgacattaagcccaatgtactcggcctgtgcgaacatttcgaggagcgccaagtgggcggcgaacgtttcaacctcttccaaggtaagaatcttattcgtatacttaattgaaggactcgttttaacaaccacttgttattttccattttaaataggctgccccaatgccaagacgagcacccttattctgcgtggcggtgccgaacagtttctggaggagactgagcgatccctccacgacgcaattatgatcgtgcggcgcaccatcaagcacgattccgttgtggccggcggcggtgccattgaaatggagttgtccaagctgctgcgggactattcgcgcaccattgccggtaaggagcagctgctgattgctgccatcgccaagggcctggagatcattcctcgccagctgtgcgacaacgccggtttcgatgccaccaacattctcaacaagttgcgccagaagcacgcccagggtgagtgtccaatggtatttgtccatacaaagccaccttaacgatgagtgaatttgaaatttatatttgaaagggggaaggataagtttttattttaaagaacttgtgtgtgaaactttaaacaaaaaacatttgttcctcttaacgaatgataatccatttttattcacttcgtccaattgtctgtctgattacttttttgagctgctcatgccagagaaggaagcagggttcctggcatagacccggcttatcgggacaggtgttgcacatgtacctgctgaactgcagcattccgcctttgtggcaatagcggcagtttttcttggccggcttcccgttctgctggataagcatgggttcgtgtagaatggtcttcaacctgggctcgggcaccggcttgttctttgaccgttcatatgtctctggcttctggatactagttaccggttcgttcgtcacttcttctcttagaagcgactttatgatgatcacccggaactccgagtaacttttaagatgtccgactcgcgcattctggccattagcaaagtatagcaaataggcattgtacacgaggatgttgagtaggaaaatggtcaactttatgtttgccttcagctccttgcaggcagcttggtagtggatcaggtggtggcgaccgtcgtttccaggtcgtagttgaaactcgagctcctggatcaacttaggttttgcatttgtcttttgcatggccatctccttggaataaatggccaagcagtcagagctgaagcagtacaagctctttgcccgtcgtcgccatttggccatcatcagagaagtggcatagctggtggagatgctgttggaatccaaccgctggtgcaccagtgccttactgttgccatatctattcctgtccagcagaccagtgcaataggtgcttttcttggccaactcctgagccaggccgtagcttccatagaactttgaggtgtacacagtgcgtcctccatggtaaccctccattagtttcaggacaatcttgtttcggtgctccaccaactgccgggaattgcgtacccatgccggtgcgtcttccttccgcacaatctccggtagaatcttcaccaccaaaccgctctgctcagttagcatatgcagcagtagtgcgttggtgcggaatttgtttggaagttcatcctggtatcttaatgcacccttccacagagtgataggttcattgagcaccagttgctggccacaaatgtatatctcttccatacgctcgttgataaagtctagcagtagagagttcttcactttggctctgcccgcttgtagctgcggtgcatcaaagttaaggcagtgcagcagctgctgataccgttccagaggaatcttcccagagaatccgacgagaccgtaaaacatgttagtgctccagtaatccgataggtgctccagcttcaggtcacacataagcagggaaagcgccataaagatttccatttcttcggcagttgtgggattggacttgagctctcctccctttaggttgcagctttgggccagggaactgaagaacttggagcgatttcccagcacttggttgaagtagtgctgtggtccctggaagcgttgtccgaatttcaggccactctgctggatgggaaatttgaagagcagtcgggaacccgtctgctggctggaccaatctggatcgtagtcatccatatcgtctgggtttaaaaaggataattttataagtggggtcttgaaatgacgggaggagcacccttcttaccctgacagaagacatcttcagcttggtaatcgagctctgagtagccatcctcgtcggaatcactctcttgctgttccaattccaagcgaatggtgttgctggccgcctgctgctccgccaccagctgcaattggagttcagtgagatccggcttgatatcggccgtacttaaatcgtagtctgctagcgccggatagccgtccaagggttccgacttgatgtccacactgcgtcgcttcaccggcgaccggtgatcgtcctgacgcggcttaagttgctgcttgcgctttcttccggagctggacatttcgtttggctgcgttttctcttccaaataatgtaaatacagaggaaattttagccgcagcaacgcgtgtttttcttcgacctcactgtcactcgtcctctctcactcgagtcacatgtgctgtatgttgtgctctttcgcaccttctcaattcgtttattgcgcgggctgtaagcggcgttgccacctgaacgaaatgttacctgcaaaaatcgttggcgaattcaaatcggtcgtgtaattttgaactctaattaataattattataattttatacatttacctttttacaggaggacagtggtacggcgtcgacatcaacaaggaagacatttcggacaactatgagcagtgcgtctgggagccgtccatcattaagatcaatgcactgacggcggccgccgaggcagcctgcatgatcctttccgtcgatgagacaataaagagtcccaaggccggagaacccccgatggccggcggtggcatgggaatgggccgcggaatgggcaggcccatgtaaatagaatcattcagaaatccagagaacactacaccctaatcatcaaaactcacttgcatttctctcctaatttaacacgtacacgtattactcggtcataccttcgcatttcgcacgcttcgaagcaagaacaacagcaacaataatccactgacctatctgtatatgtttaataataaaacacaaaattgaaatttgtattttcataacatcagaacgtttttagtttaaatgcggggcgaggtggcaactctgcggggagtgctgttaagcagctgcccgtggtgctgttaaacgcaagcaacatattgtcaatccaatccaacccttaaataaacaataaataatgggcaatcataaagttcttcgatcggcaggaagcaatttgcgctattcgatgtacgagttcattgacgcggtacacaaacgttctattatatgggaacgaagccacccaaacttccataaccgcgaactcagagatgaggcctggcagcaaattggccacgagctttgctcgaattttgacgactccagcgagccggagaagcaggaaataggtaggtggtggctacctttttgagtctatatcatacataacttccaattcc

SEQ ID NO: 20873 - DNA, 2095 bp, DROSOPHILA
cacaacatacagcacatgtgactcgagtgagagaggacgagtgacagtgaggtcgaagaaaaacacgcgttgctgcggctaaaatttcctctgtatttacattatttggaagagaaaacgcagccaaacgaaatgtccagctccggaagaaagcgcaagcagcaacttaagccgcgtcaggacgatcaccggtcgccggtgaagcgacgcagtgtggacatcaagtcggaacccttggacggctatccggcgctagcagactacgatttaagtacggccgatatcaagccggatctcactgaactccaattgcagctggtggcggagcagcaggcggccagcaacaccattcgcttggaattggaacagcaagagagtgattccgacgaggatggctactcagagctcgattaccaagctgaagatgtcttctgtcaggacgatatggatgactacgatccagattggtccagccagcagacgggttcccgactgctcttcaaatttcccatccagcagagtggcctgaaattcggacaacgcttccagggaccacagcactacttcaaccaagtgctgggaaatcgctccaagttcttcagttccctggcccaaagctgcaacctaaagggaggagagctcaagtccaatcccacaactgccgaagaaatggaaatctttatggcgctttccctgcttatgtgtgacctgaagctggagcacctatcggattactggagcactaacatgttttacggtctcgtcggattctctgggaagattcctctggaacggtatcagcagctgctgcactgccttaactttgatgcaccgcagctacaagcgggcagagccaaagtgaagaactctctactgctagactttatcaacgagcgtatggaagagatatacatttgtggccagcaactggtgctcaatgaacctatcactctgtggaagggtgcattaagataccaggatgaacttccaaacaaattccgcaccaacgcactactgctgcatatgctaactgagcagagcggtttggtggtgaagattctaccggagattgtgcggaaggaagacgcaccggcatgggtacgcaattcccggcagttggtggagcaccgaaacaagattgtcctgaaactaatggagggttaccatggaggacgcactgtgtacacctcaaagttctatggaagctacggcctggctcaggagttggccaagaaaagcacctattgcactggtctgctggacaggaatagatatggcaacagtaaggcactggtgcaccagcggttggattccaacagcatctccaccagctatgccacttctctgatgatggccaaatggcgacgacgggcaaagagcttgtactgcttcagctctgactgcttggccatttattccaaggagatggccatgcaaaagacaaatgcaaaacctaagttgatccaggagctcgagtttcaactacgacctggaaacgacggtcgccaccacctgatccactaccaagctgcctgcaaggagctgaaggcaaacataaagttgaccattttcctactcaacatcctcgtgtacaatgcctatttgctatactttgctaatggccagaatgcgcgagtcggacatcttaaaagttactcggagttccgggtgatcatcataaagtcgcttctaagagaagaagtgacgaacgaaccggtaactagtatccagaagccagagacatatgaacggtcaaagaacaagccggtgcccgagcccaggttgaagaccattctacacgaacccatgcttatccagcagaacgggaagccggccaagaaaaactgccgctattgccacaaaggcggaatgctgcagttcagcaggtacatgtgcaacacctgtcccgataagccgggtctatgccaggaaccctgcttccttctctggcatgagcagctcaaaaaagtaatcagacagacaattggacgaagtgaataaaaatggattatcattcgttaagaggaacaaatgttttttgtttaaagtttcacacacaagttctttaaaataaaaacttatccttccccctttc

SEQ ID NO: 20874 - protein, 622 aa, DROSOPHILA
MSSSGRKRKQQLKPRQDDHRSPVKRRSVDIKSEPLDGYPALADYDLSTADIKPDLTELQLQLVAEQQAASNTIRLELEQQESDSDEDGYSELDYQAEDVFCQDDMDDYDPDWSSQQTGSRLLFKFPIQQSGLKFGQRFQGPQHYFNQVLGNRSKFFSSLAQSCNLKGGELKSNPTTAEEMEIFMALSLLMCDLKLEHLSDYWSTNMFYGLVGFSGKIPLERYQQLLHCLNFDAPQLQAGRAKVKNSLLLDFINERMEEIYICGQQLVLNEPITLWKGALRYQDELPNKFRTNALLLHMLTEQSGLVVKILPEIVRKEDAPAWVRNSRQLVEHRNKIVLKLMEGYHGGRTVYTSKFYGSYGLAQELAKKSTYCTGLLDRNRYGNSKALVHQRLDSNSISTSYATSLMMAKWRRRAKSLYCFSSDCLAIYSKEMAMQKTNAKPKLIQELEFQLRPGNDGRHHLIHYQAACKELKANIKLTIFLLNILVYNAYLLYFANGQNARVGHLKSYSEFRVIIIKSLLREEVTNEPVTSIQKPETYERSKNKPVPEPRLKTILHEPMLIQQNGKPAKKNCRYCHKGGMLQFSRYMCNTCPDKPGLCQEPCFLLWHEQLKKVIRQTIGRSE

SEQ ID NO: 20875 - DNA, 6361 bp, DROSOPHILA
tttgtagaaggtgtatgatagaaacctgaaatgaatggaaaaccgaattataaacttcagtggccattaattcaaaattagtctcaccgttttgtataaaatattgtgggcttcatgtatgttcaggcatcaatgccgaggaaatcaatagggagataataactatgataactaatccttaaatggtatgtttaataactttttacactgcaaagacaataaaaaggataaaaacggttattggaatatatgtatgttttatatatatgttttaattacaatacttcaacaagaatatgcaaacaaaacattcgtaattttcggtgtggtaaaaagtttgagtttattgtacaaccaaagtggaaacaattaaaatcaaattaacagcaaaaaatctttttaacaataccttcatcttttacttaatttccagatgagacgtgtgttattatcgtagtaaaatcccacagaaccgaaatatctgtgctactatataaaacagtttccttagcttgtcccttataaaacccaatacaaacattaacaaatgctttttaagggccatgaattcattaaaactgacgaaagctagacagccaaacaaaaaataaaacccgaaatataaacaaaataaaatgtaaatgttttacacttatttctttttagaaattgtttcttgaatattgaacaaagcaaggtttgtttctcgcattttgttttgcagattcctatagcctaaaatgtttgaccaaacgaatttcactgtaaacaatttggaaaataaaaatacgaaaaatgttcagtgttttttcttttttaaaaagtttattttcatcatcgtttattgagcttagtctcgggctaggtaaattgaatttttaaaacttaaaaaattagaggtatgtttttgttagattgtttccacattggcggaatactggttatagaatacgtaaaagtaagtagataggcaacttaagagtacagaaacagtctcgtgtcaaaggaagttggggaaaatgaaaagagagtacgataacgaggaaaaacatttaggcaacttacaagaaattgtcggtgccggtggtgcggcactcgcagctaccggaaccgatgttgctggtgacgccgatgtagctgttattctgaccgctttttgttgctgttgtgtttggttgttaggtgtcaaaagtggttgattgttgtcctcgtcatcatcatcaatgtagtacgttttgttgtagtggctgccgccgccaccgccgttgttgttgtgagtgctatgctgggtgtagttgctgtgagcaatgttgctgctgctgatcatggttgttgatgttgccgtttgctgcttgcgcttatgtccggtaatgcttagagcagccgatagactggaagcggcatgcagaatcgagcgttggttgaaaatgctgttggaggcggctgccgcagccgcgttgttgttctttcggaacttctgatgatgatgatggtgagctggtggctgtggcggcgctggcggtggctgctgatgtggcggatgcggatgtagcgttggcggttgtcacgaacatgccacctccgttgtggttgtgttgctgctggcattgccattgttgtgaggctgtgtcggttcctgctctacaacgtctatctcggagccgttcttgccagagctcttaaagcttggcgcacttaattgcgccgttgtgggcgtggtgggcgtccctgcccccatatcgctggaggcattcgagttctcctctgtcagctagacatacaaagtttcgactaattaatacgttctaaattgatatcttttttataccactaaccgaatcgctgagtctttgtatcttggctccgctatcccgaccgcgatttccacttgatggctgctggcctgggggcagtggatcctgcgattgggccagttccgtagaaagtcgtttgcggttagccaatagcgtgttattaaaattattgtgactttccattgacttgcgctcacgttttaggaagtcagagtctaaataaagcgacagctgcttgcgctttacatggcgggcatcaatggtcatgccttccttaagcattttgatgttaacctgcaagattaaaaaagtaataagcaactgaataaacattattttcgattttttacttacgccgtgcatcatcacatgctctgtaaagttttgtatgctctcggtgaggtccacgttaaggttctccgatcgctcgaattccaagcctataaaccacatggagcagaagggtgccgatgtcacagcagactggtttccctgcgactgcttcagatcgtcttcatttccactgttgttttgtgagttgttggcactttggcccttcttaaactcaaaacacttgggattgacatgggccagtgcaatatggggatttcgctccaagttgccaattagcagacgcacctttgactcaacaaggccgcaccactctaaatgatcgtcagccgtctgcgagttgactaacaacacgataaagtggcggtatctgtaaaaaaagctaggtgcctcaaacaaacgctcccacggaatgcgaccgagcatgatttcatccgtgatgttcatgccgcgattgaactcggtcaatatgaccttcttggtggattcggacacattaaatgtggaattctgttgtgggtatgcgggcgtaataatgggcatcagatgataccgatccgaggcattgacacgcggatcccagacctagaataggaaaatctattagagaaccggactatttggataagtttttatgacttacttgaaatcttagattaacgttgtccgggtgcttgagtagcactgggttaggccacttccagcgcgaaaagaccaagaaaaacttgtgcaccagtgtggcagccgcagcgttgggatacagctgacaggttctggccactaacatggcccaggtcacaccaccgaaataacccaatgaatttgagtagattccgtgctctaagagagaaaatgagaacaattagaatttaatttataagaattttatataataacacgtactctttgcccacaatttgatagtgcgcagtgccaggcggaaattttcaatattgggcaccagggccaggatctcgtccgtcacacgacagccgttgaggctgcgcaccgaacggtgatccagattccgcagtaagttatcatcccgtagatcaaagtcatcaggaatttcttttagggacagacgggcaaacagcaaatcaatttcgatgccatcaaagttcattttgatgacgggcacaaaggcctcttccaccgagcggcactcggttacctctggctgcttcttgagcacctcaaagaagctctgaaagtagtcggtgcgctcaatatttcgcggagcaacacataaggcatctatatcggcacccttgtgatggacacccaatcgatacgagccgaatgtgtagatcttgccgccaagcttctcggcggctgactctggcatgttcttgctgacagagatttccttgacccactgcttgaccagtgtgttgagcttggccaggatctccatacggtgatttagctcgtcctggctctcaaagacgttgtacggctccagtgagccgcggagctcatcagtgcgctggagatcctcaggccgtggctcggccagactgatagccgaggtcatgcccaattgcttggcgggcggtccgcccgaggtagaatttccattgtgctgatggtgctggcgatgtgttggttcggaattccacatgttgtctgtctgccttcgtttcagcttaaagttatgtcctgaaaattgaaattttaaacggttattatctgatcctttcggaatcgctatattcgatttactcacctatctaggcttaaaatgtatgtggtattatatttaagtttgctctccaagaagacaaaatggaatcatatatatgcgacacctcctcttgtggctctgtttaagaaactgcgcttaataaaatgctggaaaagaaaataatacatttagtatgacatctaaagcattactctaaggtttggttttaaaattcttaaggaagagcggatcgtattgaaattgaataggtttgttcggactatgataatctcataaggattgcgaaatattagggtttcttaaagtgagaattattgtacggcgtttccaaactgatgacgacgcggttttttaaaaagtgaatcacctaatatttgaactaaatatttgtgggatacacattcatcacgtgataagggctacatatatacaacagttactactaaattgaaattacccttttcttcctgtgtagcaaaacagttaattgacaattacaatttactttcgcgctgagtaaatgcaaattgtaatgtgcgataagatatttctgatagcgccgttatatacaaaaaacataacaatgaatttcgcaaagcagctgggcacactggttcactggatagcctttcgggcatataaacaaatgcgtaaaagaaattggcaaataaattagcggttggagtgggttgccgtagctgttgcttgtagcagaataattgtgacaatgacaaacataaacaaagaaagcgaatatttatgcgcctgcaccacccccctctcaccaacgacaatcctcccacacaggtaaacggtgctctcacgcacgcactcacgcacacccacacaaacaggcacgcgccgtatacatacacacacgaggggaaaagttttctctgcttgtttttgcttacctgcgcttattcttcagattcttggcctgtttttgttgttcccgtgccgccgcttcaaacaatatctgaaggtgtgtgtgtgtgtggcgtgtcgtgctgtttgtccgctgcattcgtgagtggtgcatatgtatgtatgtatgtttgtttgttagaacttttggcaggagagtgtatcccattcatgtgctgttgtcgctccggcttttactcttttcgcacgttcgtcttcctcgcttttttgccgcactcttcacatttcttttttcgtttctttttccgttcccgttccaccaccttccactgctgcttaacggacagaaactctcgcgttttatgctacgtgacgcacacgcacacaccgatatacaaatgccagtagtcgacttgccaaaacgcaaacacaaacgctttccgcccacttttgtttcgtttcggaggtgacgggggcacactgataacacgacgggatcgacgctgtggcgtttagtgggcggcaaacatattttactaacttttaagcccctgcgcgttctagcaataattaaaatgtgtggcaatcgattggatgcttgtggcaatcgttatcgtttcttgcggcgcatagagatgagccaatgggagtagctagggatgggaagatttccatgctctctgcttacgtatgcctattgtgaatggacatttttagtgagaatttttaaatgatttttagcaaattggttttaaatataatgtgtatgagcaccattttatttcattatcaagcagattcgtttcgcaagtaataaaagtgagagtcatctgcaagcgataccgccttaagtaaaataagctgagggcataggatttactattggttcttttacagttgggacctaatctggccatctgcttatttgaaatctgcgacagatgtcactttttgcacctttggtgtaggtaaattcaaaacccaattttcttacctgaaatttgaaaacccatttcaaactgggatttcaagtatgtttgggttttatatgacgggtctaaccaggtaccaatttaccattaagacacttagattgtattactaatagtttttggaaaatgaattctttaattctattactatattcgggtaactactatttattgcagtaaagtaacaaaagtatttaaccccaatgttttcctgttattgttattggctaacgataaggaataacatagttttcttcatatatgtacatatcacgatatatttataaagttcagccacataacatattttaaaatagtttttcatgtcaaaatagccgttataaagattaggggtattccccatggatatggcctatctggcagcaccatcaaacagctgcttgctatcgactttacaaaaataaaaatcgttttttttttttttgcaataacgcatcgattctgtttacttgcgagaaatatgcaaaatagccatcgaaaagtgccgcaaaatgtaacaaacacctagctgcagacccaagatgataccctggatgcgggagaagttcaacgagaaacgggccaagtggttggcgcgtagcaagcgc

SEQ ID NO: 20876 - DNA, 3295 bp, DROSOPHILA
aagcatccaatcgattgccacacattttaattattgctagaacgcgcaggggcttaaaagttagtaaaatatgtttgccgcccactaaacgccacagcgtcgatcccgtcgtgttatcagtgtgcccccgtcacctccgaaacgaaacaaaagtgggcggaaagcgtttgtgtttgcgttttggcaagtcgactactggcatttgtatatcggtgtgtgcgtgtgcgtcacgtagcataaaacgcgagagtttctgtccgttaagcagcagtggaaggtggtggaacgggaacggaaaaagaaacgaaaaaagaaatgtgaagagtgcggcaaaaaagcgaggaagacgaacgtgcgaaaagagtaaaagccggagcgacaacagcacatgaatgggatacactctcctgccaaaagttctaacaaacaaacatacatacatacatatgcaccactcacgaatgcagcggacaaacagcacgacacgccacacacacacacaccttcagatattgtttgaagcggcggcacgggaacaacaaaaacaggccaagaatctgaagaataagcgccattttattaagcgcagtttcttaaacagagccacaagaggaggtgtcgcatatatatgattccattttgtcttcttggagagcaaacttaaatataataccacatacattttaagcctagataggtgagtaaatcgaatatagcgattccgaaaggatcagataataaccgtttaaaatttcaattttcaggacataactttaagctgaaacgaaggcagacagacaacatgtggaattccgaaccaacacatcgccagcaccatcagcacaatggaaattctacctcgggcggaccgcccgccaagcaattgggcatgacctcggctatcagtctggccgagccacggcctgaggatctccagcgcactgatgagctccgcggctcactggagccgtacaacgtctttgagagccaggacgagctaaatcaccgtatggagatcctggccaagctcaacacactggtcaagcagtgggtcaaggaaatctctgtcagcaagaacatgccagagtcagccgccgagaagcttggcggcaagatctacacattcggctcgtatcgattgggtgtccatcacaagggtgccgatatagatgccttatgtgttgctccgcgaaatattgagcgcaccgactactttcagagcttctttgaggtgctcaagaagcagccagaggtaaccgagtgccgctcggtggaagaggcctttgtgcccgtcatcaaaatgaactttgatggcatcgaaattgatttgctgtttgcccgtctgtccctaaaagaaattcctgatgactttgatctacgggatgataacttactgcggaatctggatcaccgttcggtgcgcagcctcaacggctgtcgtgtgacggacgagatcctggccctggtgcccaatattgaaaatttccgcctggcactgcgcactatcaaattgtgggcaaagaagcacggaatctactcaaattcattgggttatttcggtggtgtgacctgggccatgttagtggccagaacctgtcagctgtatcccaacgctgcggctgccacactggtgcacaagtttttcttggtcttttcgcgctggaagtggcctaacccagtgctactcaagcacccggacaacgttaatctaagatttcaagtctgggatccgcgtgtcaatgcctcggatcggtatcatctgatgcccattattacgcccgcatacccacaacagaattccacatttaatgtgtccgaatccaccaagaaggtcatattgaccgagttcaatcgcggcatgaacatcacggatgaaatcatgctcggtcgcattccgtgggagcgtttgtttgaggcacctagctttttttacagataccgccactttatcgtgttgttagtcaactcgcagacggctgacgatcatttagagtggtgcggccttgttgagtcaaaggtgcgtctgctaattggcaacttggagcgaaatccccatattgcactggcccatgtcaatcccaagtgttttgagtttaagaagggccaaagtgccaacaactcacaaaacaacagtggaaatgaagacgatctgaagcagtcgcagggaaaccagtctgctgtgacatcggcacccttctgctccatgtggtttataggcttggaattcgagcgatcggagaaccttaacgtggacctcaccgagagcatacaaaactttacagagcatgtgatgatgcacggcgttaacatcaaaatgcttaaggaaggcatgaccattgatgcccgccatgtaaagcgcaagcagctgtcgctttatttagactctgacttcctaaaacgtgagcgcaagtcaatggaaagtcacaataattttaataacacgctattggctaaccgcaaacgactttctacggaactggcccaatcgcaggatccactgcccccaggccagcagccatcaagtggaaatcgcggtcgggatagcggagccaagatacaaagactcagcgattcgctgacagaggagaactcgaatgcctccagcgatatgggggcagggacgcccaccacgcccacaacggcgcaattaagtgcgccaagctttaagagctctggcaagaacggctccgagatagacgttgtagagcaggaaccgacacagcctcacaacaatggcaatgccagcagcaacacaaccacaacggagcagccaccgccagcgccgccacagccaccagctcaccatcatcatcatcagaagttccgaaagaacaacaacgcggctgcggcagccgcctccaacagcattttcaaccaacgctcgattctgcatgccgcttccagtctatcggctgctctaagcattaccggacataagcgcaagcagcaaacggcaacatcaacaaccatgatcagcagcagcaacattgctcacagcaactacacccagcatagcactcacaacaacaacggcggtggcggcggcagccactacaacaaaacgtactacattgatgatgatgacgaggacaacaatcaaccacttttgacacctaacaaccaaacacaacagcaacaaaaagcggtcagaataacagctacatcggcgtcaccagcaacatcggttccggtagctgcgagtgccgcaccaccggcaccgacaatttcttgtaagttgcctaaatgtttttcctcgttatcgtactctcttttcattttccccaacttcctttga

SEQ ID NO: 20877 - protein, 830 aa, DROSOPHILA
MWNSEPTHRQHHQHNGNSTSGGPPAKQLGMTSAISLAEPRPEDLQRTDELRGSLEPYNVFESQDELNHRMEILAKLNTLVKQWVKEISVSKNMPESAAEKLGGKIYTFGSYRLGVHHKGADIDALCVAPRNIERTDYFQSFFEVLKKQPEVTECRSVEEAFVPVIKMNFDGIEIDLLFARLSLKEIPDDFDLRDDNLLRNLDHRSVRSLNGCRVTDEILALVPNIENFRLALRTIKLWAKKHGIYSNSLGYFGGVTWAMLVARTCQLYPNAAAATLVHKFFLVFSRWKWPNPVLLKHPDNVNLRFQVWDPRVNASDRYHLMPIITPAYPQQNSTFNVSESTKKVILTEFNRGMNITDEIMLGRIPWERLFEAPSFFYRYRHFIVLLVNSQTADDHLEWCGLVESKVRLLIGNLERNPHIALAHVNPKCFEFKKGQSANNSQNNSGNEDDLKQSQGNQSAVTSAPFCSMWFIGLEFERSENLNVDLTESIQNFTEHVMMHGVNIKMLKEGMTIDARHVKRKQLSLYLDSDFLKRERKSMESHNNFNNTLLANRKRLSTELAQSQDPLPPGQQPSSGNRGRDSGAKIQRLSDSLTEENSNASSDMGAGTPTTPTTAQLSAPSFKSSGKNGSEIDVVEQEPTQPHNNGNASSNTTTTEQPPPAPPQPPAHHHHHQKFRKNNNAAAAAASNSIFNQRSILHAASSLSAALSITGHKRKQQTATSTTMISSSNIAHSNYTQHSTHNNNGGGGGSHYNKTYYIDDDDEDNNQPLLTPNNQTQQQQKAVRITATSASPATSVPVAASAAPPAPTISCKLPKCFSSLSYSLFIFPNFL

SEQ ID NO: 20878 - DNA, 8067 bp, DROSOPHILA
caggctggtgccgttctgggtgtgattcacggccagcaggttgccatcggagctgcaggcaatgtaattcggaatactgggcagtggcaccagacgcgcctgcggctgttgggctgtgctcttcgcattgaccaaatcctttacaataatcactgcaaggagtgccaggataaatttatatatttagcctagctaactcaagctacattacctttgagttccggctgcgttggactcccggcaaagagcaatccccggctactggagaccgccagcaggttcacattgctgcggggctcaccgcattttttgaacgcaacaatcttgtggtgcagtttgaattgaaagtcctgcgaccaaaaccaatggaatgtttgacatctcagtgctatgcaattgtgcttacctgcgtgtcctcgcagtctggtgcattctgcgccatttttgtctgttttcgctcctatttcgccaaattttttgcggcttgtcgatttcccaatcgagtcgatggtgtggctgcaagttgagatcgttggaaacgttggcaagcaaaaagcgcgccacttgcagtacggtcactttcaggaaactcaccacaaaaactcaccaccaaaaaatccaacaacatatacaatacaatctgatttaaatttcatagatgttcctttaaaaagaaaatgggataaaatcttatataaaaatagttttctcctataactaactgatgaacttgttaactaaaagaaaccaacttagcttgaattaagtattcaccaatcttgtcttagcggttgaccatatggcaattgcactttgttggtattttttcagacggtattttgttttggacagtatgtgcgagaacgaaaatttcagcacatcgctagcgcagcagccttgttgttgttcgtctgtctctgtcctacaagcgtttctttttgtttgctgagaattaaacaaaagcgatttgttcgcgggcaatgcgaatgcatttgcaaagcagggcacaaagcatcggctgtttcgactgtgattgcacaaagccatgtagtagaggtcgagctggcgattcgcaattatccacaggcgacgcaacacggtgctaaaaattgcgtagccaattaatctcgaaatccttcgaattcaatcgcagttaccaaaaagtaaatgaaatttaaatcgacttaaacagaaatctgtggattttatttcgatattgcccataaagtaccccaaatcacataatttacggaaaagtcaaggaaattccaggtgaaaattggggttggaaaggaggccaggataacggagtggactctaattaaataccctacagttttcccctagagcagccaggcgacgctcaagatgatcagcagcctgttttcgcggcttataatgtgagtaataaccgattactactatagcaaatcccgacttcatagccaccgcaagtgagtgtgagtgcgagtgagagcgctacagctgctgacccccaaaaaaaaacaaaactaacttttcaagctcggccttcgaaagcgagaaaagcacctacgaagcccgtcgtcgtttcctaattgtgtgggcgtcacgcttctgatttctaagttttatacatttccgtggttcctcgattcgctgattgccggattgtttgtttattaatcagctgtcgcaaagtaccgttcacttgtgcgcgagtgtgcgcggcctgtgtgtgtaaccctcgattgaactcctaatttggagttgcaactttccaagcttctgcgtctctgtgttcccgaggccgacgcactcgcctcgcccgatttgggtgcagaacatgtggatatagcctgtcggcgacccggcgactctctgtgactccgctattgttgtcaatatttatagatcgcaactcgacgcttgcccatagtgtggcacagtcgcggccaagtagctagcacctcatttgttcaagcacacaatacctccgttagcattttccattatgtcaatacatcttaacttcgaactagactttacttttgataatgaaattagtaatcggttcaaatcaataactaacatcatagtcaagatatatagttcttacatctaaggaattaaatcgaggcgatttctcccattactcgctaaagtatcctttccaaattaaagattcaaatatcttgatactgaggtgctattttcttgaacgcctctgtcgcaacattcggaactgcggcgcattcctacgtgtaaacattgagtgctcctctgttgctggttctctctagacccgatcgtgggtttattaatagacctctcgcctgagcgttagacgccgagctacggcagtctctgctcggcgttctagcggccaggaactatctgcgatccgtgctgcgggcaatgcatccccgttgccatgaggccaatctatcagcaggagccgccgctcttctaccagcggccagctaatctccgccgcctacgtcatccgccgggcaccgtctacggacgcagttactcgctcgaggaccagccagaggacgtgatacccgtgtatccaaagtttatctacgccccacaacagcagcaacagcaacaacgggccccatatccgctgtatcaactgggcgactcgctgagctcgctggacagcgattttcccgagaatgagtacgcgggtgcctacatagtggaggatcgagttccgctggccaacgcacctactcccaaagttgtccagaacctcaatgcgttgggtcgaatgctggagctgctgcagcgctgtcctctgccatgcctctccttcaacacggcctgcatctgctcactgattgtcatattccttgcgcctcgcacttgtgcccagagtttactgtttcccgctttcagattgttctgcggcaccctgtacccggcatatgcctcatacaaggccgtcaggaccaaggatgtcaaggaatatgtaagtatctgaacacgtaactaaaaaccgtagcgaactgagctaaggtttataatgttcattcatctctcgcctcaggttaaatggatgatgtactggattgtctttgcatttttcacctgcatagaaacattcacggacatatttatctcctggctaccgttctactacgaggtgaaggtggccctggtgttctggctcctctcgccggccacaaagggcagttcgactttgtatcgcaaattcgtgcatcctatgttgacgcgccacgaacaggtgggaccagagaactcgagtgtatatatagatcgctcaatacatcataatttcttctctttgtgcaggagatcgacgagtacgtgaatcaggccaaagagcgcggctattcggcggtcctgcagctgggctccaagggagtaaactatgccaccaatgtcctcatgcagacggccatcaaggtaatcctccccacacacagctcgcacctcacacaccacacactgcccccactgacgcactcacccacaatctcgcacacttactcgactcggtaaccatattcatttggccattttcgatcgcctccagcgtcgttgcataaagtgagcagcaaacagacatcagcttctgctgttctatattcgaaaatttgcgcaacactctcgcgtgctcatcttgatcatcgccaactggccagcgaatctgcagcagagtgcggggagctcctcgtcggagaatcatcagcatcatcgccttcatcatttgatcgccttctctttacatttacttttattattatttagtctaaacgtctagattggaatgctcttttgtgccatttgcgtgtttgttttggtttagtttgtagtgtgtttctctttgtgtagcccgatcactatatagactatacgtgatacaagctgaaagataaatcaacatgttgaaataatgtaataaaaacaatatctgaacaaacccatgtcaaagatcccagatactcgccgcaattcacaactgttttgtacacaatacagatgtgggccaagtcacttgtggactgcaacagattttatggcatctgaagtgcagcaaccaaatgcagtcgataacaaatgccccttgatgtaggtcaaagaatagagaaaacatagaatgaaaggtgtaagtgatttgtttagcaggttcagttgcgcattccttgtggttaactcaatacggtctttaacaaagaatctgagtcaatcgtctgatgactggaacacttgagctttctttgttggctgacaaagacatctgtgcaaatgcaggataggaaagggagaaaatatatttttacttaagctaatatttgggatttctggggaaagagtattgattaagaagctggaatcgcataaggtaataggaactcattatgtatgcaaggtatttaccatcgaaattcagcctgaaaataactttatttctttgttttaagacaaagaaactcgtttgcttcggagtcttttgtgcgtagctagtaccctagacatctgactggcactccttgcttccacatttgcattccgccacttccactcggccatcgccgttgtcgccttcccagctgcccagttgtatagttgcatagttgcacaattctaattccaattccgaatcgcctcctagggtagggcatacaaatataaatagatgccgggcatgagacatctctatggcgtgtgtgtattgtatgcttcatttgacccagctgcaattcatttcaatttgagacttttgcgttgctactattttaattaacgttttcgtttcttcacttatgtttctttgcatttaacccaccaaataaaactcaaaatcccaactaaacgcacctgcctgcaccgctcgattgccactaacccgcttaccgctagacctacgcgctgactacggcgccatctggccatggacgcggcctgcaaaactcccattcggccgatgagctgtacaggggccaggatacgatggacagcacggaaaactggctgccgcgagccagttccttgagcagcatcgagagctacacagagacgatctacgagccgaggaccgagaccaagcgactggttattcgagaggttagcgaggaggcggagttcgatgatgatcccctgggcgatgccggagcagcccgtctccgggacatgcccgtccggaaggcacaaccacgtcgggctgctagcactgccaaggctgcaggcaaacgcggccagaaacacaacgatattgagggcgccaggagctccagcagctccagcaatgtgatccgctcccgccgcaagctgcgcgaacccacgcccgatgtggatgtggaaaactactgaagatggctaccatcaagcatacagatactcagcgaacaatcggattttacacactcagcgaaacacttacacttcatcacattaacactgtcgcccactagcagttatatttttgtttcaataatgtattttaactacgtttacacctaagtttccgattagttgtagttaatattaaattatttaaatgccaactcttgtgctcttgtgctctactccatcatccacgatcaaccacttaacaacattgctcccctgaagggaggcggcaatctggtgcagacgatcaagcggagctacagcctcagcgatcttagcgaaccggatatgcatcgcacgcaggacgagctggacgacgtgatgatgtcctcgatgacatcgtcggcggtggtcatgcgttccacagccactggcgcacgtctactgaggccaagaaatcagacgcccgtgggcagatccggcagcggaacacgccactccacgggcatgtattttacggaggtggatgtgaccgccaagaatgccggcgatttcaagtgagtcattgttcagttcagtaccacaagaaactcaatacttgggtaatcccctttttcgatttcaagttatttcatttgccaaattcgataatcaaattatttcgtatctatttcagctacaacattcgcagccaggatgacatcagctctggctactcgagcgccgaacctgtgagtggtctcagtcgcacctcctccatgacaaacgcttccaaggctcgagccaagtccaaacgcaatgaggtaggaatcatttcagtctttctttttggaactatcttaatccgtttagagattggtgttggttagcagttgctggaagagatgagagacgaggtctacttagacaaccagctgtattttcaaggtgtgcaaaggaagagctcagttccagaagctgaagaactgaaaatagtggagagttctgaaagcatccaatctcaggagttggaaaaggtgctgaaggaggagaacattgatgcagaagatgaggccttttttgaaaccttgcctttgatagaggagcacataaatgaagtggtggctaactatggaagggatgaaaagttgttgccccaagagcggaagcataattcgatagaagaggagcagtttgaagatgcattgtttgaggaaccacagaaatgtgtctcagatgaagtggatgctaaaaatattgaggagatactaacggatagaagtcaaaaccagactccgaatggatctgctgaaactactgattcaggaacaccttcccaaaacaagccctatgtccatccaccgatagacccatttttgctggttctaagcgcttctgcatctgctccggatccctttatgcccgaacggccgcgtccaatgtcgccgcgtgaaatgcgcgagactctggaggagattaagcacagtttccgtgcccaactggaagcagagccctccgtatcagcctcaccatcaccctccttgcggcccaaggccaaccatggcaagggacgagctccaccaccgcccttgccacccaagaagcactcattgagtccccaaccggacgccatcagccagacatcgacgggcagcgtggaacgcaagtcaggtatcggacaactgttcaagaatatcaaagctaatgtgctgcgtaacaaagctaatcccagccagcagcagcccgaggatgagcagctggcggccaaagagacacagatttgaagtaagcccagccgcaagcccgttttcgaagctctcatcatccccgtgttatgtttcgctcaccgccgggcgatttctgctccgcctttaacttccatggcccccaatatggcattatctttctgtacagttgcgttactaacccccagatttaaggatttgcagcatgttgttttagaggctccaattgaagtacatactctcatccttcatctactttcttgacttattgcaggacaaatccatgtctgctagctgcaccaccttgccccgctcgagcagccggaaatcggagagatcccagggtggaactgccactggccagatgaaaacgcgcaacaagtcggagaagtagtggagcatcggtttaaggctgcccatctttgtcagtatgttgatttagatggtgacggtgggcagacagtggaatccatagaaccagaacctcatgttttagtttaaattgtaactttatacggatatcgatacagattatgataatattagctatatatgcgcatgcactgtgtactttgtttgtgattctattagagctccgggcgcagttcgtcctggttgccactggtactcatttcgtgactagtttagcgttaagcgagtctcctagcctctatccaaaggttctgcaacagatgtactaaccaaaaatgaaacccgaagaaacctatcaattgtgtagcataaattcctaatattgtaattgaacattaaataaaagaatctataccattgatccattgaactgaacaaccagagatgtctttaatgatctttgaactagcaattcagaaccgtttacttagatacgaaggacttcttactcggcttcttctacaggcgccttttgggtgtccccgcccccagctgctcctgcctcggcctcgtcctccggttgctccgactcatcgtcatcgtcgttatggtaaagaaccttgcgtatatagcgggccaccagctcctgtggtctcttctcccattt

SEQ ID NO: 20879 - DNA, 1982 bp, DROSOPHILA
cagggcacaaagcatcggctgtttcgactgtgattgcacaaagccatgtagtagaggtcgagctggcgattcgcaattatccacaggcgacgcaacacggtgctaaaaattgcgtagccaattaatctcgaaatccttcgaattcaatcgcagttaccaaaaagtaaatgaaatttaaatcgacttaaacagaaatctgtggattttatttcgatattgcccataaagtaccccaaatcacataatttacggaaaagtcaaggaaattccagatgatcagcagcctgttttcgcggcttataatattgttctgcggcaccctgtacccggcatatgcctcatacaaggccgtcaggaccaaggatgtcaaggaatatgttaaatggatgatgtactggattgtctttgcatttttcacctgcatagaaacattcacggacatatttatctcctggctaccgttctactacgaggtgaaggtggccctggtgttctggctcctctcgccggccacaaagggcagttcgactttgtatcgcaaattcgtgcatcctatgttgacgcgccacgaacaggagatcgacgagtacgtgaatcaggccaaagagcgcggctattcggcggtcctgcagctgggctccaagggagtaaactatgccaccaatgtcctcatgcagacggccatcaagggaggcggcaatctggtgcagacgatcaagcggagctacagcctcagcgatcttagcgaaccggatatgcatcgcacgcaggacgagctggacgacgtgatgatgtcctcgatgacatcgtcggcggtggtcatgcgttccacagccactggcgcacgtctactgaggccaagaaatcagacgcccgtgggcagatccggcagcggaacacgccactccacgggcatgtattttacggaggtggatgtgaccgccaagaatgccggcgatttcaactacaacattcgcagccaggatgacatcagctctggctactcgagcgccgaacctgtgagtggtctcagtcgcacctcctccatgacaaacgcttccaaggctcgagccaagtccaaacgcaatgagttgctggaagagatgagagacgaggtctacttagacaaccagctgtattttcaaggtgtgcaaaggaagagctcagttccagaagctgaagaactgaaaatagtggagagttctgaaagcatccaatctcaggagttggaaaaggtgctgaaggaggagaacattgatgcagaagatgaggccttttttgaaaccttgcctttgatagaggagcacataaatgaagtggtggctaactatggaagggatgaaaagttgttgccccaagagcggaagcataattcgatagaagaggagcagtttgaagatgcattgtttgaggaaccacagaaatgtgtctcagatgaagtggatgctaaaaatattgaggagatactaacggatagaagtcaaaaccagactccgaatggatctgctgaaactactgattcaggaacaccttcccaaaacaagccctatgtccatccaccgatagacccatttttgctggttctaagcgcttctgcatctgctccggatccctttatgcccgaacggccgcgtccaatgtcgccgcgtgaaatgcgcgagactctggaggagattaagcacagtttccgtgcccaactggaagcagagccctccgtatcagcctcaccatcaccctccttgcggcccaaggccaaccatggcaagggacgagctccaccaccgcccttgccacccaagaagcactcattgagtccccaaccggacgccatcagccagacatcgacgggcagcgtggaacgcaagtcaggtatcggacaactgttcaagaatatcaaagctaatgtgctgcgtaacaaagctaatcccagccagcagcagcccgaggatgagcagctggcggccaaagagacacagatttga

SEQ ID NO: 20880 - protein, 569 aa, DROSOPHILA
MISSLFSRLIILFCGTLYPAYASYKAVRTKDVKEYVKWMMYWIVFAFFTCIETFTDIFISWLPFYYEVKVALVFWLLSPATKGSSTLYRKFVHPMLTRHEQEIDEYVNQAKERGYSAVLQLGSKGVNYATNVLMQTAIKGGGNLVQTIKRSYSLSDLSEPDMHRTQDELDDVMMSSMTSSAVVMRSTATGARLLRPRNQTPVGRSGSGTRHSTGMYFTEVDVTAKNAGDFNYNIRSQDDISSGYSSAEPVSGLSRTSSMTNASKARAKSKRNELLEEMRDEVYLDNQLYFQGVQRKSSVPEAEELKIVESSESIQSQELEKVLKEENIDAEDEAFFETLPLIEEHINEVVANYGRDEKLLPQERKHNSIEEEQFEDALFEEPQKCVSDEVDAKNIEEILTDRSQNQTPNGSAETTDSGTPSQNKPYVHPPIDPFLLVLSASASAPDPFMPERPRPMSPREMRETLEEIKHSFRAQLEAEPSVSASPSPSLRPKANHGKGRAPPPPLPPKKHSLSPQPDAISQTSTGSVERKSGIGQLFKNIKANVLRNKANPSQQQPEDEQLAAKETQI

SEQ ID NO: 20881 - DNA, 12016 bp, DROSOPHILA
tggatggcatttcaaacatgcgagtgctgaaatgggccagctttaactattccaataccaactatgccatccgcctgagtgatatctacattattaaggtatagttaagttctcaccactttggttgacaaaactttactactaactttgctttacagtgcgaggactggtatgcaacaaatggtggaaactgtgaggagataacacggattgcggagcaactggctcgcagtgcctcgatggctctgctgccacttctcgatcttttagcagctgctggcattaataagcttggcctaagagccacgctcgatcaggataacgtatgtctattcaatgcggaggcaattcaaatcactaataatattatccactcctaggtgggctatgaagccggagctcgtggctccaagctaccgccgttgtacatgaacgcgctggacaaccatctgatagccacgctgcatggcgaatcctccggcattcaagagcccatcattctagagctgatcttttacatactgaacgcttgactttagtccctcgtagtgcaattctcccgctggatccgaagaccaaacggaaacattcttaactctaagctcgacgcgatcaaagccaatggacaactacacgagtccatggggcaagaaatgaggacatgttggtattgttggatggctcagttaactgtgtatatatttaagtagctcatcgtttggtttttgtctatacatttctacaacccccccatttctaacctttcacttcaactgttatattatttctgatttttattagttttgagttttcattgaaagtaaaacgtatctaagaaacctaaatatatatatatttgtatgtgatgttctttaatatgctttacacatttaccactcgagtatatatgaataacaactatattaaaactgttgatcaaatggctgtttcactttgtggatataagataaattagaaaaaacaaaggccgcgtcttgttaaattattgatagcaattctttattcaatttaaagtgtttcaattgacttcgtcttgagagtgtgtctgatttacaatatacgatattatacgatattatctttacgatgggtctaaaaatcgtcaccacccgcagccgacacaaaatatataacaacctataaatgtatataaaaatgatgttcattctctctcagattgtacataatttaaactacgtctagtaccggggttacagacacacaaactactaatgcactcctctaatgtgttggtgtttagatgcagatgcagatgctgatgctgatgctgatatgtatgctatatacaaaatgacatcgggaagcatttggttgcactcgatttattgctcggctcgtgcctcatctgttgtatatgttctatttttgtgtatatatttgggttttatataacttaagcactcgtgtcccttcgatgttgacggcaaaccaagaacccccattattgagcactacagctcgtcgtgtttgggtcccgagaactcatcgtgcgagatgaaaccgttcttatccttatcctcgtgctgaaagatctcctccaccagcttgtcgttctcagccagcatgttcttcagctcctcggaatcctgtccctccacggcggtcatctgcttctttagatactcgctgacctttagaggagagatataatatccagcattaatttaattgtagctactttatatattgctctagtctactgaaagcataggctggttagtaacttatcccacatccaacggatatttcagtgtagagagacatgtatatgtaacaaaagtgcgatccatacatagacgattacctcttcgcgactcagctgcttgtcggcattatcgtcgatctccttgaacacattggtggtgggcggggcattgccgatgttgatcagctccacatcgaagaggagggtggccttgggcggtatcacgttgccggcaccctggtcaccatagcccagctggggaggaatggtcagcttgcgcttctcacctggatttcaaagtgaactccaaattaatttacacattttaccgagcacttctcgcaagcacttacccacgcacatgttgagcagaccctgatcccaacccttaatcacctggccggcgcccaattggaatgtgaagggctggtcgcggtcgaagctgcaaaaaaaaaaaaaacgagatgaaaaaaaacacggggacatacaaattgttagacgcttgttggccacaaagtttcaagtgcttgcaggtgtcgtgggctgaaagccaccttaaaccgaaacaattcatcatttctttatgactgctctctttttttcatatctttcgttatttgcagtctataaaaattatttatttgatggttccgctaagcgaatttactttaatttgctaaacgtaaaaaaggggggatataaaggcaatggagctgctcaggtatgcatgagaatgtcgcgcttgttgagcttgatgtatgatgtggcacagttgcaggccatttcgcgatgattatgatatatagaaatggattcacagtagctcagggtttgctaaaaaggtcgggggcatatcgcaaatggagccataaacacgctgtaaaatggcgtttataggccaacatgagcttatgggctttaattcagttttgaattgtgcatttttcaagggtgttaatacaaattaaggctaagccgcatatacagatacataaaacacgaacaatataaattctaagtacattacacatctcatttccacacaattgaattaatcaaaatttgtttatttcaaagcttaagtaacgatcttcagctgaaataattagttaagactgtaatatagctgttctcctattgttcgaaacattttaaaagattttttttttataatttttttgaacaaatgttcttaaactttctgaagcctctagagatcagaagttggcaattgaaatgtgtcgcttgggcctgctgactgcaggaaaagtttccttgacgttttccttcgaaaactctcctgttgttcatcattatattattattgctgtttgttaagaaagttgtttggctgttgggtttttaagaacttgttggttatccccgtttaaatggagccgagacagattattgcactcgaggctggggaaaaggaaacaaatgattaaccaaccaggaggagtcacccacatggctgggaaaaagttgtagggcatgtctgttaaatattttatgtgcatctcttgggcattttgcaaaacatttttacatgcgccggctgttgtttcaaattccagttcaagtcacaaccatgatggggcaagtggcaagtggcaagtggaggtgcggcaagtggctcggcggattgccgctgaataatccacccaaccgggccgcaaaaaagaaaaaaaaacgaacattcacattcagagcggttaagtgttacgctggagcgtaaccaaagtgtcgtcgttgctgtttttgtcgcccgcctttcgctcaagtgcaaatctccagatggaataaaaaagcgtaaaaaatttgtaccaccaccccccttcccaacccacttgagattccgcatgtcctgtgtgtgtttcggtttggttttccagggattacgcggcatctaagacaccttggtggcttgtctttatttcggtgtcgccgtctgtggctgtgaatttttattgcattattttccatgaatatctagtacaatatgtgaaacattttatggagtctcccttccttccatttcatatccttggagtgtttactcctgaatcctcgctaatttatgcgatttgcgaagcttacaacaagctctacatgtttattttttttttgtacactattgaacgggtatctaaaatcgcttattcgctttttaagttttgagttaaaaactgcttataaactttaataaataagcattaactgcaatgacactttaattaaatttcaacaatattacaccccacaactttaaatgcgaaaccgtttaaaaaacggagctgtcgagtcgtaaataaattaataaaatcgtttaaacgtgttgattgtttcagtcagcacgattgagccccctcccccccctcttctcaacggacttccgtgtccttcgtcctgtttgtccccctgaagcaatcaaatatttatgaattaccggacaagacaaacaaaaggtcagctgagatcagacctgaattcactcgcaggtgggcaaacaagttgcagttgctgttgctgttgcagttgttgtgcaattggcaaatatcaaacggaatttcatcgatattttgcaagcgattcgcaggtttttccagctcgtctccaatggggcttagattgtggtctaaagtgggaaataatggggggtctgctgtcagggggggaggcacaagtgtgtgtgttgcggggtgcttctttttacattttggctttatggccagcgcattatcataaagtcaagcaaaaaatgtaaactcattcatccactcgctaaatatttaataagtttcgatttcattcttccactggctgtgccgtgtgttgttccttttttaacccaatcccaattcgaatccgtgttggtatctgtatctgtatctgtatctgtatctgcgaattgcgagccaagtcccaacgcatcgcataatttaaaatgcagctgaatgggcgcccaaacatccgtttgccgttctacgtgattccgcaccacgggtggtggcatttcgatgggtgggaatcttttggctgggcatatggccacccgaaatcataccacgtcactccgccgacttcagacacattcaatccaatcaaattgaatccttttgggtggatcccttgatgacctcgttttatgtgtccggccaagaaaagttataaaatcaaatatgcaaccgcaattcctttgccttccgcttttttggatacctccccattggggcgacaacttgcgattaacgtgcaccagagaacaaggactccagcaggacctgcggcgcaggatttctctcggcgggaatggtcaacgtgcgaacaattcacacaaaaagtctaaagtttgaacaagtttgcagcccagcagcactgagagaaaacagttgggtttatggtctttgaactactataagttctgaatgcatggatgttttttttgtttaattaggaaaatgaaatatttgaaatatatttagtaagtttatagacttatttctttctatctacgtatccttttttttcagtgtcggcacaagtacctcaaaggacacccaaatttatgccccagctggcggcatcacgttccatcgcccttaacacacaaccccgaaaaaagctgctgtaaattgtggaaaataagaattgcaaccgttgaagctcattaattatttaaactatctacaaatgtctgacgcgcgagccgagtaaaatatacattcgtggcaagagttgccataaaagtcagacggctgttgcagttgcagttgcagaaacagccgcacttgattgcatccacatggtaatgagctttagatttactggagtctgagtcgcagtctgcaacgccacaactttgttccaagtgttttgccatcaatggtgtcaaggtttctgtggtcactcgagcagagcttaaggtctcctcccactcccactccagctcccacttccacctccaactcccattttccactccatggccagcagcaccacattcaaggttgtccagagtgtaagctaaataaaactttcactttgatgcatttctggttgctgctgctattttttttttgtttttgtttttttacgcactctgcttttggacattaaattgcacttgctgcaaaagagttgacacaaaggggggaaaattgggaagaaaaaggcagaaaaaaatgggggactttgcacttggaacatacaaatcatggcagccagaaagcgacaacatcgcaagttatggcccgatgcttcaggtaactgacttgtgctcctctttatttcctccccttgactacttcaacgttacgttgtcaaaaatttttgtgaaacatgttttcgaggatgccaacaaaagagccactcctcttttcatattcaaactacggctggcactgaaagaaatgctacttgcgtacctttggacagcaaaaggtattaataaatcaattaaaacatattcattatagcatcggacattgccttttgtggttttatcatttggctgtctcaactttcacccatacgaaatatggcccattaacatgttcatcaaaagtgtcgcataaaggtgtgaattgaccccaaataccatatatggctttataaaataccaactaaatatgtttatgaagagctctaacttaaagctcctaaaatttcctttacactatctctccatttgtttcagcgaaactttaagcgaaaacatcaccaagtttgttgctgcaactcaagtaacaaattaatttccccggaaaagtgacacagcgcacatgaaaatcttgtgatggggggcatactagtatacatatatcatagcaggtgaaagggagcagtgtagtcatgttacgcgtcaggctgattagaatatagcgacgaaaggctgcataatttatgcggccaaaagaaggtctgcgggtcaaaagtggagctcaacttgttgccacaaaaacgggaggcgccgcgtcgcgaaattctaatgaagatgtggagtgcggaccaaagtcattgacaaactgtggctgcacgtgacccgggtatggctatgacaggtagacatgatggactcctccgccagttggatccctaaccaagggacaatggagataaaaggcggcaggcacgtgacaggactccagctctggtcctggtcctcattattgaattagttacgagtataaaatgcaaagggatgagggcagttgggggtatatttgtaattgtccgaaatatagtagagtttcttttatggccaaccaagtaggttgtaatccattttaatatcaattaagcacgtatagtcgtatattcgttttccgtttccctatgcttgtgtgcttaggacagtttttcattttgattggcatttcaataagaaattccatcgacaaacccgtcaaaagcagaacaaaatcttcgtacttatctctctctcaaggagcatcgcatcttcgttttaaacccattttttcaggtgctctgccggcaaaagcttaattatagccaagtgaagctggctttcagccagctaatttccgctgcaaggcggagactgtttggccaaaagccgaagccgaaaatggcagaaggagctgtgttcgcagcttgaggctgaaaagcaagaagtggctgaaaaggatttctcgcacaaggcgaacagaagatggcgaatgaggaggacgcctgtcgacatccttgactgcacttgactggcacaaagtgccttgtttgttagccaacttcgagggcatttaagccgcagcgcaacaggtggcaggccagagagaaaaacggcaaagacggggacgcactctgattgagttagttagttggccaactccgccattcctgcctcacagagactttgccacgccaaatttaacagcaattgcgaaacttttaagccccgaaagagacgaattgcaacttccacataatttgcaaccaaaatttgtctaccaaaactcaaggtaagtgaaaggacacaacatgtccaatgagatggatgggaaaatgaaatgttttccctttttagcatatgacaaaacgggttaagccggggcaatttgaaatacttggggtcagtcagacgtttataaaatcgtttcccctgcgagaaacacaattttctggtcgtaaaattaaatcaaaatttgataactgagagagagagtggtggagtaatgccctcacactcaacgtatattttatttatatgcaatcaacggacaatatatcagtttagttaatctagttgaggtcgcttatcgacaagtttttgccccagctgatatttataaaacactgataatgagttttaccgcttgccaaacggttacacaaagattttttgtttgcctggtggcaaacaacccactttggggtgttaattagccgcacatgtgaaataatttggttatcctttaaatttaattggttttttgtatggctatctgggctgggagctcaagtttcgctgtggcttttatttacaggatttattacaagaaagtcaaaggttgaatatgagaaagaatatttgagataagaaaataagtagcgccttatcattttctttaattgaaactactgcttaagagctaactatagtttgaaaacaaattgtttatgggtaatatttttaaatggtttttaagaatcttatttgtaccggaaaacgatttctttgcttaatgaagccaaaaattgagggccgcgtcactataaacgcccataacccacagaaaaatgaaacaaaaagcgggaaaatgggtttgagtttgagtttgggttgcaggaagaaggggggcattcaggcatggaaaatgcaccagcagcacaagcaaaaaacaacaacaacagcgtcagcgacaatgcaacaatgagatcgcttatcagttggcgtctaatttacggcaatgagccgccgcgacgacagactgactatgcagcaccagcagctttaatcccatacggaaaacacatgtatctgcgagtatgttaatctgcatctccaatggatgcgtgtgtgtggagattacggacagcatcggctttaaaaatatttcatcctgaactctctgacattctgccgaagtttttggggcaatgtgaaataatcactttagcatgggatttagcttagttcattgataacaaagtgtgcctattttagttttgtacactttaagatcactcacctcgagtcgaatttcttgccatcggcctgcagagttccagtgtagtgcatggtgagggaatcgccgttcttggacttttgttcgcacacctccggcgtgctgatcacctccactttcagatcctgagcccggaccaggctgttgctgatggccaccagcagaaggcacgagataacgagattggatttcgacatggctgcaagataaatgggcaaacttgattaccacaaaacgtaagagactttcaaaaaaaggggaacgtgtttatgcactcgactacaaggagtatagtaaaccttataaagagtttaagatttgctaatccttaaaattaactgagttcgaactacagacgataagatccactaactcgaaactaaaccgaagcaccaatgtcttgctcggattgatgttcatcacttttatacacacagattcatcatcactatcatctactcgccatcatcttcgttttaatcgcgtattagcgttgcacaagcgttaaatgatgaatttaagccaattacccggagaggtgtaacagttgtttgctcaacagtgtaaagttgaaattgaaatcgtatggatggcgaggggtattcgcagcgattgcgaatgggatgcgcgaacagcaaaaattagtcattatgcaaatgtgcaattcattttcgagtggggaaccgaattcgaccaaccaaccagctttgaccatctcgaccagctggaggggattatgcaagccaagacccaaagccaagcgaaattattgcgcgtacgcggtggcgtatgcgtaatgaccatcgtagtcatttccaatgggatatgttggtgggtgtttctggttaaatgaaagttttgaaagcgcctaggtcacccaaatataaaaaaaaagaagcgaaaaaaattcgaatagccgtaaaataaaaaaactaataaggcaaacaaaaaataaaatatggtgggtctttatatagtcggaaaactttcactaatggaaaggcaatggtcaagcctcaattacgtgaaatcggcattaacatctcttgatcttcctcttcaactgctctctttcgcttctgcttctttttccttatacagtgaaatctcagagacatgaacacacatatgccttacttttttgcttaagcttgaaaatgattaattacactaataagttcatatgctatgatatgcaattgttacagttaagaccaagctgaagccagaaaatccacagatttagggactagaaatacttcaaatactataaatagataagacgagatggcctcctgtggctaataatcctaaaatcacattttcaaatatatttcaaaatcttttttttcagaagccgcttcactgtactgagcgtccactttttggccttaaaacctgttgggcgatccagcttcttcgtttacacacgtatctttttgtttcagctttttttttgtgtgtcttttatgaaaggttcagtgaactggcggtacgaagtttaccgtaagcgatccaatttacagaccggcgctaaatgtttcggaaaatcttttcctaagcgacacgtcaggagttttcctcttatttcgaatcagaaatgctaattgctgacccgagccgatctttagcaacaaaagcaagagcaaatgaccggcgatatttttttatttttattttcatggacttgtagcgataagctctctttctcctcctccatcattcggttttcttggggcgtatgtgtgtgtatatatatttatttgtgtatgcatgtgtgatggcgtggactgaatatgaatggaagagacacgacagcaatggcaaagtacacgctttctttcgatttctcgattttcatttcttaatgagcacatttccaagatgtttacgctaagccaagcacacgatttacgatctgatatctgtaatatacctttggtcttccacagacggatatcactcgattccggcgaaggggcgggggcggatgcggcgggcgaacaacagaaaacacgcgagcaaacggcggatgtgaagtgcaaacacgtccgattcgatcgaagtgcgggcgagaaatgctggaaccgaagccgccgacgttgttttactaaccgctacttctacactcagaaacatttttgtggcactttgcaagttagaccagattattttgtagtttagtttaaaatcttatttatatatattgcattcctccaagtttttcataagattatagttttttttgtatttcaatgtttttttcattatattccctatcttttttttgggtgcacccctatataaaaagagtggaaatcttcagagagacccggaaagtgtgagcgggaggaggcgggggatcgtgatccaccaccatccacacgtgtaagagtacgagagagagtgaaagatcgtgtttttgtagagccaaaagagattcacatactgtgggaacgcgatccacaatacggggggcagaataagagagagcacttgtccacgtaatcaagcagaaacttgttcaggagcggatcaggcggacttaggttaagacacaatcaaaggtgttccttatcccaaataaattagttaatatgtaagattaattttttaaaatttaactttaaatttatgattaatcagaacttacaggaacaatgtaataccgaaatgtattccaaaaagttattcattttttattaagctaataatcgttttgaaaaatgtaacaaaaacgaaaaatatatggaacacgaaggacacacaacctattcaagcaattgctcaagtttaactaaaaggagtttccaaagaatatgccgtagtctacatgttgctggcatcaaagtttaagcaacattatgcctcgcctactttttctagtgcgcaggcgcctcttttattttatttgtgggtggagcctgataaagagttaatttaatgattggcgaattaaattcggcaaaattatgtgacattttcttttgttttcatactctaatttaatttattacagtttatttttaaaccgtgcttgataattttgtacactggtaga

SEQ ID NO: 20882 - DNA, 1271 bp, DROSOPHILA
atcgaatcggacgtgtttgcacttcacatccgccgtttgctcgcgtgttttctgttgttcgcccgccgcatccgcccccgccccttcgccggaatcgagtgatatccgtctgtggaagaccaaagccatgtcgaaatccaatctcgttatctcgtgccttctgctggtggccatcagcaacagcctggtccgggctcaggatctgaaagtggaggtgatcagcacgccggaggtgtgcgaacaaaagtccaagaacggcgattccctcaccatgcactacactggaactctgcaggccgatggcaagaaattcgactcgagcttcgaccgcgaccagcccttcacattccaattgggcgccggccaggtgattaagggttgggatcagggtctgctcaacatgtgcgtgggtgagaagcgcaagctgaccattcctccccagctgggctatggtgaccagggtgccggcaacgtgataccgcccaaggccaccctcctcttcgatgtggagctgatcaacatcggcaatgccccgcccaccaccaatgtgttcaaggagatcgacgataatgccgacaagcagctgagtcgcgaagaggtcagcgagtatctaaagaagcagatgaccgccgtggagggacaggattccgaggagctgaagaacatgctggctgagaacgacaagctggtggaggagatctttcagcacgaggataaggataagaacggtttcatctcgcacgatgagttctcgggacccaaacacgacgagctgtagtgctcaataatgggggttcttggtttgccgtcaacatcgaagggacacgagtgcttaagttatataaaacccaaatatatacacaaaaatagaacatatacaacagatgaggcacgagccgagcaataaatcgagtgcaaccaaatgcttcccgatgtcattttgtatatagcatacatatcagcatcagcatcagcatctgcatctgcatctaaacaccaacacattagaggagtgcattagtagtttgtgtgtctgtaaccccggtactagacgtagtttaaattatgtacaatctgagagagaatgaacatcatttttatatacatttataggttgttatatattttgtgtcggctgcgggtggtgacgatttttagacccatcgtaaagataatatcgtataatatcgtatattgtaaatcagacacactctcaagacgaagtcaattgaaacactttaaattgaataaagaattgctatcaataattt

SEQ ID NO: 20883 - protein, 216 aa, DROSOPHILA
MSKSNLVISCLLLVAISNSLVRAQDLKVEVISTPEVCEQKSKNGDSLTMHYTGTLQADGKKFDSSFDRDQPFTFQLGAGQVIKGWDQGLLNMCVGEKRKLTIPPQLGYGDQGAGNVIPPKATLLFDVELINIGNAPPTTNVFKEIDDNADKQLSREEVSEYLKKQMTAVEGQDSEELKNMLAENDKLVEEIFQHEDKDKNGFISHDEFSGPKHDEL

SEQ ID NO: 20884 - DNA, 6725 bp, DROSOPHILA
ttacgtttattgcattcacttacataattggcattccacattcattttacatatacggatatatgtatatggatcacacatatgtatatgtatatactattcatcatatgccgatagttgcgaccccaacaatcatcaaattgcaactaactagaaaaggcaggtaaggaaattaaatcaaatttaacacttcgactgatggtactttcgattatggggcaacgtaaatgcgtaatcttgtgacttcgattatctgtatctttatgggtaggtaacttcatctttatctagttggagacaatccagaaatgcttactttaaggtcgagtgtcgggaggcgagacgggatcgaatcaatcagtgtatttagttaacgaccgaactcgcgctttctccttctgtgctatgcaacttcctcgttatatttcctctgtctctgtctctgtcttaacacacacacgattttagtagctgctactagcagacttggcctagttaatacttaatgtgaaatactcgctggaaatgaaacattttgcgtttacaaaaatatcgccgcactcgaggtgctttgaatttatatatgtatatatatatagttatatatgcgtattcattaaagaaaagggcttttgggtttgaattttagacgtaattataaacaattaaacacactaatgcagggttacacaatttaggcgactatcgaattaaagttttcgcgctcaaagaaatattacattatattgtacggggataacgaccagtgacgacatgtctgcgattatagataatctaagggcaagtggaccaatcctgctcaacagacacgcccactcgcacaggcacacacaaaaaaaaaaacatatatagacggatatatcacgtaaatctgaaaggtttaaacctatagaaaatagagaaaagaaatctatcacttttttatcctatttcttgcggtccgcacacacacacacactgatttcgcatccatccgcctctagtgactgatcttttgcagcttttgcaatactttgagaccctgttcctgatactcctgcttggacatccagaagccgtcgcgatcctttgtcacctccgccagaacagctccgccgataaagaccatatccttgcgtcgcggtggatcctcaatgcgtattttgaatttctgcaatgtaatcgttcaatttgttaaacacgatgtgcattgattagctttacttgacaacttaccgccagcttttccgtatcgttcttgagtacccgctccaggtacagctgtttgatctcacgctccagccgactgggaagacccggatacatggtggagccgccggacagaactatgtgcttgtagagttcgggccgtatgtcgatgtctgccgcctggatggtgttgaaggccagttccgcaatgcccggtccctcgacgttgatcaaatgcggctggaacagagcctctggcgcctcaaatctctcgccaccgaccttgataacacgaccgtcgggtagcgtgtacgattccaccagcaccgtcgtctccagggccaaacgctgctccatctcgatgtcgtagccaatgtagcagagcttctccttcattatgcgaaccgtttcgaagtcggcggaatgattgaaagcgtagccacgtagtaacagtaactaatgatcatagatagatgcgaaagtataagtcacagtttggctatatgtaattgtaaggcaaagcaaccttaatcaaatagcgagtgatatcccgaccggcaatgtccaatcgtcgcgtcagatggggcagggcaaactcctcgtagacgggacatatatgcgttacaccatcgcccgaatcgatcaccacgccagagatcagaccctgggcatatagcgtcagcacggcctggatggcaatgtacgccgaatcgaagccatatttctcgaacatcacctgtgaacacaaacacaacaatgttagtttgaagtgggattttaaaatatggtatgacctcacctcaatcatcttctcgcgattctttgtgggattcatgggcggctcggttagcaggatttttgtgttcgtcggatcgatgtccatctttttgggaccgaacgtgtagtcccacacgtggcacatgtcgtcccagttgcgcaccacaccgttctccatcggataggagacctccagcagggatcgcagctgtgaggcctcatcgccgaccatcagatcctgtaaattcgttcgtcagaggacgcagcgttagtgtccgtggcttggtcaatggatagccattgggattcggattggtttggactgtttggttggttggatggttgattggttgggtatttgcttagaggctgggatggttagtcattagtgtgggagacatacacaggtgttaggcacaataacagcgagcacactacaagaatgcaactaaactcgtctaaacaatcaacgattaacaagaggcagcagtgagtgtgagtagttgcggaaaaggacttgcctttccggaacactggcaaacacagggacgtgcaaaacaaacgggggattaaaatagggctaagcagacacaggacatcatgcagacgagaacacataacaatttcaaatcagcaaatcacaattaaaacgagaagcaactgaatttggttgccttaagatatgtacaaaaaaaaccaaagggtgtaagctaggaaacaaatggtatgaaaacataggagtaaaacttaaataacaaaaattatatttacgtaaatttgtcgttaaattgaacagattcgattggaattcggttttaaacacgcctcagatttatccgatatgagaattaatagatttgtttttttttttaatttttttttttcgattgtggattttgtcgattttgtggatggagtacaattatagatgatggccaaaaggaagcaacaagatagttggacggggccggaatatagttgggaaaatattcaaggcaaacaactagtgaaaaatgtgaacagttaacagttaagttaattaattaattaaatcctaagtgcgcagcttgaacttcaaaaaaatttcgcaatattttgccaagcgtgtgttattttggtttttggtattttcgtattgtgtcaatcgtatacaaatttttattattttatgtttacttggtgattagatttctggtagtggtagtttggattttggttttttttttaactatacaaacttgacttacatcgacatgtaaatcctgcaaaacatttgtttttaaaaatatatgtgaaaaaaagaacagaaaaatgtataagaatattaaaaaagaacagaaagattacaattttaaaaatatttattttctgtatcgtttttttttttattgctattcaagatgtgttcttaatgattcttaatttgatgtttcttctgtctaaagtaaagaacttctaagtaagatctatatatcgaaaatcaagtgatgcactcaaaaaaaaaaaaagcttaatgtctgcggggttcagcctccatatccacagtttattaagctatgcctaaaccttggttaaaatcagatatccacggaccaacttttagcatgatatatttaccataatatatatttatatattttgtatgcatgtgtataataatatgagggcccacacaccgagaccaatgcaactcaagcaaaaatgcaatattgggataagtgacccccagaagtgatgaaatcaagatggtaaatgaaacgatatgcgaatggggtagatcgaaaacaaattatatagaagtaagtagatatgcgacactaatagacagaatagaaaatagagcaattccactccaaaatcagatgggttaggggtgaaaaaatatggtgggtaatttggtggatagtgaacttctatgcgctaaatgtatttcttgccgtttaactagtcatggagtagttacatcgaaaaaaaaaatgatataatatatggatattcgtgtatttgatggcctgtgcacaattgaatttgtgtagtgtatatggttgtactatctcatcatattgttaattaattttagatactttaattggtaagtacgatggatcataccttgacttcgatatcgccgattttgttgaccgcccgaatcatgggtcgtcccaccatcgagggaaaaatgtgggtggggaaattgctgccggcatatccgcacttaacgaactgaaaaataaatggagatgtcataaatacatatatttatattatggtgtatgtggaaacacattaaaataatatgacagccgacatatgtacatatattattatttgagttaagccctaacacgtaatatgataatttaaaatgcttttgtatcaacaggtacttaaaaattgcacataataataataaataattatttttaatcattttgtttaagaccagctatatcatttttcccggtgcagcatttccttgcgtttttactgctgtgacttatcgaattcggaccgttatcacaaaacaaaaatttttgaattagttttgattatttggtttaggaccagctaaatcatttttctcggtgcagcatttgcttgcgcttttactgttgtggtttatcggacgcttatcgaaatcggaccgttatcacaatacaaaaattctgggcctgcgataagaactgattgtcggaaattttatggaagtgttggtgtgtgccagtgtcgctctttcgacaaatatgtaggtgtgggagatactgagtaacgctggaatcgtgagtaatccactgattagtcaagcggagagcaagaagaagagtggggaagcggaatataaaggagaggaagaggcaatcgcgtaattgcaactgctgcaactgcttgactaaccgcgacgtcaacgcccgctggccagcaagcagtgaaataagcagcagcagcagaagcgctgcttagtccacaagaagaagaaaacgaaagaagcgcagccaacaacactcgaaatgtgtgtcacacaccagtcgttggtgatggtgtgggtgtgtgcgctctgttttcaccgcttgtgggtgatgtgggcggtgcgggtggtgactttcccgttatcttaccccagtgccgttatcacagacgataacatttcgacccttgctgtccatgcttgaaggactcaaaaccggatctctggaaaaccactgcttctgctactcccgttgcttctgcctctgctgtggcaactgcctttccacttccactgatgacgcgaccaggttgcctttttgggtgttggttgtgattcggtttgaaatcacagctcgcagcgcctctgctcgataaaaccaaacaaaatattgcacatcaatcgcctttcctgttgacttcctgggccgtttgttgagcactactgttaattgattccttttcggctttttttgtatttggaccgccggagagcgattgtacttaatcatacactttcctcttccactcgcacactctcacaacacgcgggcgggaaccttgctctcttcgccactctatcgcttacgtttatcgccgcttcgtttggcggttattgggaattgaactcttaatttagactcgcaattaaatttaggccgaaacagtttgccgctatcgactatttatacttataatttagttatactgctgtacaaaaactccctcgttactccccagagttgaataaaaatagatgcatattcgatactatcggcgttggactgaagcgtacaaaacaccgaaaataaataccagaaccgtttagatactagatccaattatatttttttattattttacaaatttgttaattaagtttactagtctgtgtgccacttttaacaatttaaaaaagattaaaaaatacaagtttattagtaatatatgttacttgcacaggatttacacaaaacaatttcaattcaattaagactttattaattaaattattggattaaagatttggcaatttaacaactaatcacatctatttgaaaaaccaattcggcaattgctgaaatttcaaaatactcacattgatttctggtatttttcgtttgcgctcttgcctctcgttcactctcatacttggaaaaatattcttgaattaagacttaaaacaggttcaaaatttggcgccatcattgaatacatgcatgtatttaaagaattgtaatttaagcaattaagaagaaaaatgataacttgacaatactgctcccaaggataaaaagttaagtgatcgaacgccataaaatggaaagtttgttgctgatttattttattccgtttatatagtatgtatatgtatgtataatttaataatataataaacgttactcatttgttatctttataattgctttaagaggcgaaatgtcttatatatgtatgtatataccatgcagccgtctcgttcccgcattttttgattctgcttttgtctgggtattatgtgttatattgaacgttttaatgctttttaaatagttcccataagtatgttggcatggtcttgacgtacatattatcaaaatctactcatctcctcctcagccgttctattcaattatttacttttactatgtgccaggaagttttgcctatgcctcatgcaatagttatgtactttctttatcgagggaactaagcaaatgtattgttagtcatacatagtgtagaattattaatacttcttagctttattattt

SEQ ID NO: 20885 - DNA, 1760 bp, DROSOPHILA
atagtatcgaatatgcatctatttttattcaactctggggagtaacgagggagtttttgtacagcagtataactaaattataagtataaatagtcgatagcggcaaactgtttcggcctaaatttaattgcgagtctaaattaagagttcaattcccaataaccgccaaacgaagcggcgataaacgtaagcgatagagtggcgaagagagcaaggttcccgcccgcgtgttgtgagagtgtgcgagtggaagaggaaagtgtatgattaagtacaatcgctctccggcggtccaaatacaaaaaaagccgaaaaggaatcaattaacagtagtgctcaacaaacggcccaggaagtcaacaggaaaggcgattgatgtgcaatattttgtttggttttatcgagcagaggcgctgcgagctgtgatttcaaaccgaatcacaaccaacacccaaaaaggcaacctggtcgcgtcatcagtggaagtggaaaggcagttgccacagcagaggcagaagcaacgggagtagcagaagcagtggttttccagagatccggttttgagtccttcaagcatggacagcaagggtcgaaatgttatcgtctgtgataacggcactgggttcgttaagtgcggatatgccggcagcaatttccccacccacatttttccctcgatggtgggacgacccatgattcgggcggtcaacaaaatcggcgatatcgaagtcaaggatctgatggtcggcgatgaggcctcacagctgcgatccctgctggaggtctcctatccgatggagaacggtgtggtgcgcaactgggacgacatgtgccacgtgtgggactacacgttcggtcccaaaaagatggacatcgatccgacgaacacaaaaatcctgctaaccgagccgcccatgaatcccacaaagaatcgcgagaagatgattgaggtgatgttcgagaaatatggcttcgattcggcgtacattgccatccaggccgtgctgacgctatatgcccagggtctgatctctggcgtggtgatcgattcgggcgatggtgtaacgcatatatgtcccgtctacgaggagtttgccctgccccatctgacgcgacgattggacattgccggtcgggatatcactcgctatttgattaagttactgttactacgtggctacgctttcaatcattccgccgacttcgaaacggttcgcataatgaaggagaagctctgctacattggctacgacatcgagatggagcagcgtttggccctggagacgacggtgctggtggaatcgtacacgctacccgacggtcgtgttatcaaggtcggtggcgagagatttgaggcgccagaggctctgttccagccgcatttgatcaacgtcgagggaccgggcattgcggaactggccttcaacaccatccaggcggcagacatcgacatacggcccgaactctacaagcacatagttctgtccggcggctccaccatgtatccgggtcttcccagtcggctggagcgtgagatcaaacagctgtacctggagcgggtactcaagaacgatacggaaaagctggcgaaattcaaaatacgcattgaggatccaccgcgacgcaaggatatggtctttatcggcggagctgttctggcggaggtgacaaaggatcgcgacggcttctggatgtccaagcaggagtatcaggaacagggtctcaaagtattgcaaaagctgcaaaagatcagtcactag

SEQ ID NO: 20886 - protein, 394 aa, DROSOPHILA
MDSKGRNVIVCDNGTGFVKCGYAGSNFPTHIFPSMVGRPMIRAVNKIGDIEVKDLMVGDEASQLRSLLEVSYPMENGVVRNWDDMCHVWDYTFGPKKMDIDPTNTKILLTEPPMNPTKNREKMIEVMFEKYGFDSAYIAIQAVLTLYAQGLISGVVIDSGDGVTHICPVYEEFALPHLTRRLDIAGRDITRYLIKLLLLRGYAFNHSADFETVRIMKEKLCYIGYDIEMEQRLALETTVLVESYTLPDGRVIKVGGERFEAPEALFQPHLINVEGPGIAELAFNTIQAADIDIRPELYKHIVLSGGSTMYPGLPSRLEREIKQLYLERVLKNDTEKLAKFKIRIEDPPRRKDMVFIGGAVLAEVTKDRDGFWMSKQEYQEQGLKVLQKLQKISH

SEQ ID NO: 20887 - DNA, 15306 bp, DROSOPHILA
tgtgagagaaggagcgtgtgtgtttgtatgctggtatgtgtgtgcatgtttcaatgccaatttggtttctagttcgattttatagttttttaatgtgtggggcgagtgttcgatgcaattttggaaaaaaaaaaaataggccgagaactaaaccgcgcaaataaggcaagaatcagcgatcgtcgaactcgaagtcgccagatattgatagataggtggtatgagagatttctgcaagcatgctttatgagatctgcgtaggatgtgtgaatgcgaatgtcctaaccgagctgtgcccgcctttcggagacaatgatttcgtttcgaatcgggtggtctgaaatgagagtctaagttacgcttagggtcatgccaaaataagataagattcaagaactacttttcggaacgctccaaggcgactccgtgctacgggattagatatgatcgatgcaatgccagatgccaaatgcttaaagtacgagggtaatccatattacagctaaatggaccgtcacgcatgagtttagcacttgcacttcgatgcgtcgaccctgacaaccaggattaagtttgagtttgattagaggccaggcagcgtggtagataataatactgctataactatcgcgcatccatgctctacggtacactaggccaaagctttagactactagggggagttaagaacccgacttgaatgctggattggttttgggcttaccgcacgcaaggataacgaatcggtaacggtttcgatttcagtttcggtttcagtatcaatcggtttgacattgtgtgtgatgcgtgttgcgttgtattgtgagtgtggtcttgtttttgatgttggatggggagccttcggttctttcggatgttcggttcggtttctcaagcagctttgtggatcggatctgtgatctgggatcagtgtttctttctggctatcagtaggtagagtagcttatgctaatgggtatcagagttgtctgccacatcctcagatcgtttgcgtttgcgtttgcatgactcgtgtgcggcgtattagtttttgtgtcttgattttgggtttcttggcggtctccgtggtgctcgacgcactgccgctgttgtccaacaccgctggctgattgtttgtggtgtcgccaatgtagtttgtcgcatactgctgctgctgctgctgctgctgctgctgggtctgactactgctgttattactactgctactactagttttgtatgccttaagactactccgatggggcgtacgtttcagaaagtgactgccatccgcaatttgttgcacttgctgctgctgctgttgctgcggatgctgctgcttgctgcttgttgcggagctgacggacgacgacacggaggtggtggtggtggtggtggtgctgctgctggccgatccagcgtcatgcaaggcttgcagttttttaaagtacgcgtcgagaaatgatgatgtggttatcggtttggcggtggttggtgtgggtcttgctgatgttgccgatgttgctggtgttgctggtgttgctgatttctgcgcagcacttgttgctgctgtgggtgttgtggggaacttacgtttttgccgctcaatcgcttcattgctctgaatgccggcagtcgcctcgttctcttcatcgggcagcccatcctgtagttgctgctgcgcctgttgctgctgctgctgctgtctctgattctcgtccttgttgctcggtggctgttgctttgccccgttgctggtgctgctgctgctgctggttacactataatttgtaaggcttttttgaaccaaggggatttcgactatcgactgttgttgttgtgactgctgttgctgttgttctggttgaaatttggtggcatgttgttgtgtctgtagcatgtgtaagtagtattcgatttgtttgcgtagttcgtgtgtatagatttggaaaaggttcggtgtttgtgtggtggttgttgttgttggcctgcgtgtcgatgttgctgcggcttcaccgctgctgctaccgctgctgctgctgctgacgctgctgctgattcgcgtcgtgaccagcacgccattgtcctgcatccactgtcgctcgggaaggctgcgatgcagatagccaaaggacttggacttgggcttggcggtggttgtggttgtggatgtggtgcgcacagtggttgtcgtcgtgcttctggcggttgtggtcgactgcgcagcagcgccgccagcggcagagctctgctcgatcttgttgtcctcctgctcctcgctgctagtggtgccctcatcctgatcctcaacactctcagtctcgtcctcttgggactcggtttcttcactactactctcaacatcctcagctgcatctttcttgttgtcgattttactaatgttgttgttgtttggttgttgtatatttgggtgttggaattgttgttgttgtaccgaattggtgtgtaagggtgtaaaagtttgtatattaaaaatttgcattctgagtgtattcgtgtacttggaactcaaaagtaatgtgtttttggtgtattttagtaataggagtactcttagcttacacaacaaaactactggagaacagtcttcttttaattaaattacccattttactatactcacttgtagactaaacgatagttgtgtccgtaatcgggaatgatgttcgagggcagtggtgtacaacgaccatccagacagtgctgtaaagttcaaggtaaacaaaaacggtcaaattcagagtttgtccgctcaagagagagattgtttgaaaagaatttaagaatgctaaagttgttaagttaagaaggccattaaatcctgtcagcttaacacgacaactctgtccagcaagatgtccgttcaagagagttcctcccgtgatatctctcacattacttacataaccatttccgcaggccgatccttcggccgctggcctgtaggccacacagtatcccgtctgggcgtcgaagcagaagagctgggcacacactcgctcatccttgaagcaggcatacgttccccgatctctgcggcactgggcgtccagcgagagcagggttcctggcagagatctacccagggcgctgtcctcatgaggggcgttgtgcaggcaggtggccgtgtctccactaaaaatcaaagcgcagccattagtacctttcgaaaccgtccagaaaccagcagctcacttgaggaagtggtggaagctctgcaccgtgcaggcggaccatcggaaaccccgctccgtgtgacgcagatcggacatgatgtagccatcctcccagcgacaccgctgggcgcccggtccgcccaagtagctgggcggtggcgaaccgtcgtgcaccgctcccaacctgagaaacgagcatgggacacattatgattgaggggcaaaaaatatggtaattgattaattgcacgccgaatgatgtcaaacggaaatgcaaacgggtttcggtgaccagtttgcagcggcggaaattattcatgttttttattagattgggcgcccaatgaaatctgaatcgttcatttggggcgataaatagtttggatttaatggaaataggtggtcattttggcgagtagtcaaaaaaaaaaaatgagtaggtcacatatgtatgtacacagggcaatggacctggcgattgatgtggtcaagttgggggattactcacagatgtccaacttcgtgggcagccacgatgatgccgctgaagccgccggtgtcctcgatgatggccacgctgttcaccttctccagtcgcttgttcaccacgcatgcgccgccgacgtaagcgaagccttttccgaaacaaaacacacgaccgaaatgaggcaattagtgggttgtcttactcagttgcattttcttcttcttgtcttcattgttatttatttttttgttcgcttttgtccaacaggaagttgacaatttttttcgagtcgccgtcgccatagccgttgcagttattaaatgaaaaatctaatgtttctgttttcgcaactgagcaatttacttgtgttttcactttcgaacatcgtattaaaatatgtttttacataataactgtaaccgctgggagaagcgggtcgcttagtggttgtgacttgatgcgagttagcaattagttgttagtagctgcatttgagtgcgtaagattagccacaattaccatcgctagataaggtgtgtccacagcccataaagtttaatagagcgtttaaatgttgtaccaaatagaccagtgttagtaggaccagaaccattcttaagatatacgtttatcattttaaataagattattatatttcatgtataaattcctcacgattctcattgacaattagctagcatacttaacagccattcttcgagagattctgacacatccgttgagcatggatactacaatatgtacacaaaattagacagatcgaaagcagcggaagagactgtacaatgcgaagacaggagatcggaagaatcaattgaagaatcagaagatgggttttgagttgcctgtacagtttgacagccattggtggcacggcgcatgcgcagccgcttcctgttcttgttcttctcttctgactgtacaaaaggggcgcgtgcgacacaaacaaagacacatggaagatatagattgccgatcgtggaaagagagaggtgaaccagcagtagagagagagagagagagagagatacagagagtgagacagagacgtgcatgaaattcaattaaattcgcttgatttggttgatgatggagcgacgcattttggggctcggcggtggccgcctttaatgttatttatttttaacgcgttcgcttaacttctgtgttttttttgtgtctttcgtatggcttttgcatttatctgtacagatgttggctaacaaattgccagctagttgggtctttacctgcggtaccgcgattacattcaccataagcggaggtgcgacggcacatatcgagtctgcgggcgaaaattgatcagaaatgcgtagaaattttagattgggttgcttttgggggttttcagcgtcatttaatcaattatctcctctcggctttgatcgatagctgatggttatagttgttgtctcactgagtggacctgcccaattggattcgcggaattgcgcaccaatatcgcggactggttgcacttgtggagtcgagatgagggcaagtgaagaggcggaagaatcctgccttcggagctccgaagtctaagggaactaattatactgtagctaatgttatcgtagccagtgaaccttcaagttcagcgaattgggtgagttattctttccataaggaacagccactaacttaggcgcataaaccataattaaataccaagtctagatgtaaatgttcgctacaaccaatgagaccttaaagcagctacaaattactaaataaatcaaccggttttatgctttatggaccgatccgctactcaaattagtttaacgctttgcgatttagtttttccttcgcctaaatgttgtaaattttctgttttattgtgagcgtgtgtttgtgtgtgtgtgtgtcgtgtcattgtggtagtatcgcttataagacccacacgcagttttagtcaactttactgagcttttcaggtgtttcttgtggcgcgagaggtgcaaaccaaaaactgactaaactatgttaaacacccgcaatgacatttgttctggttgtgtatctgtgtttcagtgtatctgtgtatctgtgtatctgtgtgtaatgcatgagtgttgtggggtgagtctagttggttggaatttctttgaaatctttttacccgctgtgcccttggtgcaacgacctcctttacgcctgcgacacatatcatacctagacacgagtagacattgtaaataagtgtaattcttggagaaaatcttgggtaaagtgaataggtttatagtgggtgagataggggaaatcgcgcgcggagaaatcagctggcgcaaatctgcaaagagaattcaaaacacaagggccatcagggcccacttcgaagcccactcacttggttatggccacggcaatgtcgtagaccggaagtcggcgttcccggaacagatactttcccatgtccgtgagagcagcggccgaatcgatggcatcccgacccactcgattgcgttccagatagggagtggcatcacgaccctggaatagaaatgaacgaaatataacttaaaataatgcgccaaggaagctcgtactgcatgtatctaaaacttagaaaatatgtgtggtaactacctgtctgctgtctgctactcatctcgtgatctttgcagatattagccattaatgctggcatttatggctcgtaaaagccccattgaaccctgtgacccacattagaatacagtagcaaggcagtgcaaattgcgaaatgttcgacgaaatcgcccaaggaagctaccagtgcagtgatgcaactgatttggcatttgactggatgcgacgtagcgaattaaaaaagagctgcgagtgaaatatttatggcccattcggcggtgaaaatgaaactggaagccgactgcaagccaactcgcagcggaaatcaagtgaacgtgaaaaacgtgctgccaaagtcgagcctggcgatagcctagcaatgccaatgcaacagaagatcatcattagatgcacttgagcaaaagttgagttttgcatatgcaaacgattgaaaagaaaaatgtaatgcaattgaatgtttcaagtaggcagtaaacagataaacagagaaaccttaagcctctcattgtattttgataattgcccaaatagacccaaatatttatcagtgtagatgactatccagccgggcaaagtcaaagtcgtgtgggcttcctttggaaatttgctgttttcgactgttaggctgccccagtggacacaaaccagttgcaattgtgcgttgcataattggatttgcagtggcagtggccatttcatcagctgagtgcatccgagggcaccaggcaccatggtacataagcactcgtgtcgtgaccaaaggggcgtttagatttaccaaagtgacaggtacataaattaaataaacacaattgtcaatcacattgagccctaggcaaatcaatatgttaattccgctttgaggctaatctatgtgcccggggaccagttgcatttccactaccagtttgcagcggcagcgttgcaggtgataaaaccgaagttaagtgacaatccgcactgggttgacacgtttgatttgcagccatttgccagctggaaacaatctcgcagatactacgactctcggctggctaagccgggccaaaacgaattcgaagtcttttgataaattaccaactatatacatagttggacagacagcagatgtctaggaaatgaacacagtttgacaaagtgatctaagatcgcacaagcaccgcgttttgaaatctgtatattgccaaaggagcatcgattgggtgtatctgtatctgaatgtggttctcaatccgatgtgaatccataagcattcagcactcagcactcatagtctatccactcccgtcagtttttcggacgctctgacacttggatcacttaaaagtgcgggcacgtcgttctcccgaaagaagcacagcttcgaattgaattcaattcaatttttttggtaattttcgacagacaaaactatcaagaattttaaatgcttcgattgtggccttcggaccgaagtgggaaaggcactggcactcgcttagattggaatccacgaaattacaaataattgttgtggaattgcattttgagtggtttattagagcagtctctctgtgcggtgtgaagatgcttcactcgagttgtttgtttatgagcttgattggagttgtaactgcttcgtggattcattgtataattgagcaaatattagcactgataagctgctatttcagtttctgtttcgtaacttggccaactgtttccttaaacgaatccagattcgcgataagagaccacaagcaagtcacctggcatgggaaagacaaacctttggaagttggagtagaccaccagcggattgacagactggcgaatgtagtgcctcccggtgctttcggtgccacggaaccactggaccatggatgacctggcacatctttgattaccgattgcacaatgcacaagtggttaccccagaaaacaaacgcaaacatttgtcaaatgatcggacacaaaaagcgaaaaattatcaaagaaactgtcagtaggacctaaaatgtaaccgagccactaaaaccgggaccggtttgcctttcgcccaaaaaccgaatataaaccaaagtctcgcgactcttttgcaatggccttttgtgcgtaattaaaagcaaaatgttatattttaatttaatttttcgaccgcaactggcgctcggctggctatccagctcctttccctgggcggcgcatataaatcttgcggcggcccaaagaaactgtcaatgcaactggctgtaatttctagcatttcgcaaggcccactaaactgttcaacggggtggtggacagcccacgcccactcggccccgcacacacacacacacacacacccagaatagaggtgtagccaccgcccatccgccccctccaatgacatatagtgcgctacgactttcggcgcccacacagcggataaatcgcactgggcgacagtcggccgatcgggcaccacccacggagagacaggcttttgggtcaagatatgggattgggaatacagaatatgggatatggtggacacttttcctttcccaataccctgcaatggggtatggcgatcagctgatgcagctgtttaaaaaaaaggtattcaataaaccatcatgaatactttctttttatttcatagtaatttattatctagtatggctaatatgtttaaggctgattaataatactgtatagtttactatttaagccatttcccgttagggtgttgaaatgccccccaattggcggcgagttttccggcttttccagcaatatttatttgtttgcctagccgcacgtttccatttgcattattgcaatttatgtttgtctggggcacttgcatttctggctaccggcactctatataccatcggcttatatggatggggatatggatgtggagtacgagaaatgtgccctgggggcaacacctggtctagtctggtggcctggtggccagccctatcccgaactttaagagcgcggcttcgttagcggcggaattcgttatgacaacttgcaaatatgagatttgactggcaaaaaggcagtgaggcacttgggtgtgtcgctgtggattatttggcatttctgtggcactttagatagagtcgacgagataagagcgagtggagaatgtcgattggcgcggaaattgggataccccggctctcggacagcggaattctggacaggaatggtcgccccactcggctctttcttcggctccagccaagcggatcgattaatcaaatgggcggaattcctgcagctgatagcgcggcgcaatggtgatcataacaagtcatagatatagatttataaagccaacactatatatcagatccgatcagatcagatcggaattggcgtgggggtagcctaagtcggctaccgacttgacttgaacttttatctgtgacatttaattaacattttaattaattgcgggcaactttccgttagaagttaaacaacctgcctcccttttgtcttcactgcccccgctgcctgcgatagggtacaagtgtcgaacgcattggcgctgcgcttgcgccacacacatatttcaatgcggccaactgcggccacgttgcgtatgcgcaatttattaggtgcgtatcgtgtggcgaacatggagaaatatgccaaagctcgacgggctgttacttagtattaagtttcgcagggggacttaaagcgcctgctagatatttttatgggacctaatttataattacctcgcaatgtcgtttgataaatgtgcagagtagtttaagctgtgaaagagtagctttttccaacgtatccaccctcttttacccattcatactaaaaaaaaaaaaaccatttaaaaccattgccctggcaaaatgtaatttgagcgctggccactcgattagaatttttgatttagccaagtttccaagtctcaaagtaactgggttgccactcgatcagagctcattgttctgccactgcggaatgaaataaaaaaattgcttttaaccaggctagtggcgcatttgcagtttctaacgccttcggaccccaatcgaagtcgtctgagttacgcagtttatggcttattaatgtgacggcgttttgttgtcattttgttgcggcttatttatttgtttttcggcttcgagttagaatcaattaattgaacaactctccgaagttggggcctaagtaattctctaagttatttgtcaatgggtgattaatttatgtgactgcagatttcgtgcttgggctggctgttttgttctatgaaatataaataaacgattggctttcagtgttttctagctggcattggggtcaagttgcttgggttttccaaagcgaaactcgcactcatttggtactcatttatggtttagcctgtaaagtgatcggcacgagctcctgttggccaaacaatctacttagccaatctcttccgataaaatgactcaaaaatccaataaattcgctcggattacctgtttctgcattgcgtcgacttatcggatatgtgtatccaataatttgttgcccaatccaaattctgagtaattacccgacttccactactccacttctggcaacattaattatcgtggcaaaaagtggaaaaagcttagcgacggatgctatattttaagatactaagtacctgtatccaccagatacgcactttgcatctaccacctaaatgtgtgtgtgtgtgtgtggggggcatagaagaggaagtcatgtgtgtgtgaaattgggcaaagagtaaaataaaacatgccagccgaaaaaatctgatctgaactaactgccgactgcagttagcgtggcccattagattatgtaaccacggccaacacgcagttgcagcagcaggcgctgttgcattatttatgcggtctgaaaatgattttttggtttagttttagttttttgccaggccagaaaggcagaaagacagccagagaagcagagttacagccaaagccaattgacgtacttagggtaacccgtcgacatcggtgtctcctcgatgcgaagttgtcgtgtgggcagccagctcgatgcaactgcaactgcaactgcagttgccactgcaactgctgcaggtgaaccactcattccgccactcgctgtgccaattttccactttcttggcccactctctacgctctccaatccccaatatgcactctccactctcttggccaactacgaatggcttcctgaagcagcgccaatctgatttgtgtgagaaagtctggccgaaagtctgagtattcgagtatttgagtattgagacgggtagagacgagacgagacgagacgagacacaaagccacgatgctataatgttgtcaaagtgttttatggtcttggcttatgcaatcgaattagttgaatgttgataagtgaaagatgttagcggagatcaaagagatcgctcacgacaccacagctcgctgtaataggaaattaaagccatatttttatggccattagtcatttctcccgaaaggcttctaatatgtttagcttctgccacgcgatgttaaaatttatgacttgatttacacatggtaatcttgatttttccagcttgaaaaaacgacttagccacctcaaagcagtttagcccaattaaaaatgcttgacaccgattccactacttaaaaagccatttcaggaaatctaaaaagtgccagaaggttagatgcaatttttttttttttgcgaactcgattcgcgtgcccataacgaattttcgtcgctaatttctagaaaaacattcagtcagttccagcaaaagacagagcacgagtaaaaaacttgttaaaatttgctggcctggctttctgctttttgtgtgctgtggccaagcaaataaccaaattgattgttcacattttttctagcgaatcgaacgaagcgcatgcgttgcatgtttcttcggcctgtttttgcctgccagattcccagatcgtgacaattcattcggagtgggtctcagtttactgggctagctgggggctacttgggctccgaaggaaagccgcccgattggccagacccacttggccaggggttaaagttgggcttccaaaaatggattactcaattagccaaatgaaagttgaattgctgcaattgtgtaatgatccagctggaggggcattcaaaggaggttgacttgggcaggaaacccttgttcagaatattatttcgggattctatatagatactcacccgcgaaatgattatgccggcgatactgatgcggattctgggaccctttagtaggcggtagcgcagatcgactccgttccagaatgagatgaagtagcgtttgacctggggaagagatacgagttatgttagttttggtttgggcacattgcacgtttgtccttgtcattcagttccatctctatagggctttcatctgagccgcatctccgggttctaggtattccacgaagctagaacgcacccagatcagacaggcaaataaatcttgagcgcgagtgatgtgcatgacaattgaatcatgtgtttcggcaactcaggctcgagaatcttaagtaaagaactacctgggacatgaatcgtacacttagatgtgtggaacaaatgtgatttaactactttatggaaagagattttcccagccattgctctaataaaatatattgctttaataaatctgcaattcccctcggggatttgggtctcagtcgcaaccagacctatctatcaatgcgagcacatgtctcggtctcagctcgcataatatctacacatgtagcgcacaagaaacaacttttacaatcctgagactccaaaatcccctccgggttgggttggataccataccatatcgacggcatggaatcgcgactgaaatctgcgcgcacgcagagacaatccccaattcaatccgagctgtctgcaattgccgaaacaacttcattggagccagcggcctttaatttctctcttcagttttttcccccatttttatttattttttttggcggccctgtcacgcacacgtacctgcagattatcgccgccatggagccgatagccatcgtagtccacgatgaccaagacctccggatagatgatatagggagcctgacggcgggatctggtgcgagactcggccacttggggctctccgtccagggcgccttcgtcctcgtcgttgaggtcctcgaaatcgggactgctgggtgcactgcgtctgctgcgacgctggcggcgctgcaaccgctcgagcttctcgctggcgagcagatcatcaggttccatgaaggctgaataatcgagaaaaaatggcgaataaataataaatgccataagcaggaagcggggaattaagcaaaaattaagcaaaatcgagtggtggaatgtctttattatgatataagaagctggcaagtcaggtagcagccacacatttaactgtattgggtataatttttgggggcatttcggcaaagccgacagtgcaaaaataagtttctgcggcgagaaataccgagaaataaaataaataattttacagcgattatcgctggaattttggcgccactgcaaccgcaggggtaaatgcattcagtgaagggcgaattgttgcattgaactcatgagctcacgtgaatgtgtgagtatgctgctctttttcgaggcaggaaatgctatcggcatcacgtcgatctccagccaaagatttatgggccaaagtatagaccgtagtctctatggctttctatgggtcaatgcgcccattaggaacgtagcctgcttctcaatggattcaattgatgcggtggcaatgcccaatgaatcttaccaaagtcactcagttggccttctgctgcggatgcctcccgcttgtagatgatgtggtgcgactcctccggattgggactcagttcgtgcggcaagggcttgatcaccaggtcgtgtccaatgctgccctcctgcaagaagaaaacgattgaaatgagtgagttggccaattaatcaggggcaaatacataatgagcggggatttaattatctagtgataaatagggtattctgttaccacggctggcataaaagtaatactagcaggcttaatggcattaaatttccatcgacatttgtcaaaccgctgacaccggcgaactccatttcgggcggagcatttagataatttattgaaatctttttttttttttttttttactcaacattcttggcctgcagtcggccgtatgagttgtgccatatgaatatgacttgcgtttgaatgacgctggccaagtcataaaaattagctgcgatttgcatagtggaacattttatgcaaataaaccgcgatctagataagctgtgtttctcggtctctcggttcgtttttatcgcccctgtaattgcaataattatttgagtgaaacagagcccgcagacgtaaccttgagaaaggttagaaacaaaattgttggctaaacttcaagactccaaaatactttcgattcccatttgcttgcgacttcgtttcagttttaattggccttttgtttatcgatcggcgtgcgagcacccacttggcactaggcgtgatcagggctaattaagtcgcggtgttaatgctataattaaaatattaccagtgagtcaagtcagctggacataaaagctactgcgataaatgaccaccagctgagatcatgtttaacatgaaacgcattaaggaaatggaactgtaattgttctcggtccgagttagctacaaatataaatttatctaatgctaattctgactggaatcggtgggaatgcactgcccatctgaagttcccaggcgaccaaatgggcacaaaacgaataacttaggcagcgaacttgattttgctctcaatatatttgagcacttatcgaaaatgccaaaaaccccaaaaccagcaccaaacggcaaagttcaatgtcctcgca

SEQ ID NO: 20888 - DNA, 2601 bp, DROSOPHILA
gagggcagcattggacacgacctggtgatcaagcccttgccgcacgaactgagtcccaatccggaggagtcgcaccacatcatctacaagcgggaggcatccgcagcagaaggccaactgagtgactttgccttcatggaacctgatgatctgctcgccagcgagaagctcgagcggttgcagcgccgccagcgtcgcagcagacgcagtgcacccagcagtcccgatttcgaggacctcaacgacgaggacgaaggcgccctggacggagagccccaagtggccgagtctcgcaccagatcccgccgtcaggctccctatatcatctatccggaggtcttggtcatcgtggactacgatggctatcggctccatggcggcgataatctgcaggtcaaacgctacttcatctcattctggaacggagtcgatctgcgctaccgcctactaaagggtcccagaatccgcatcagtatcgccggcataatcatttcgcggggtcgtgatgccactccctatctggaacgcaatcgagtgggtcgggatgccatcgattcggccgctgctctcacggacatgggaaagtatctgttccgggaacgccgacttccggtctacgacattgccgtggccataaccaagcttcgcttacgtcggcggcgcatgcgtggtgaacaagcgactggagaaggtgaacagcgtggccatcatcgaggacaccggcggcttcagcggcatcatcgtggctgcccacgaagttggacatctgttgggagcggtgcacgacggttcgccaccgcccagctacttgggcggaccgggcgcccagcggtgtcgctgggaggatggctacatcatgtccgatctgcgtcacacggagcggggtttccgatggtccgcctgcacggtgcagagcttccaccacttcctcaagacagcgccctgggtagatctctgccaggaaccctgctctcgctggacgcccagtgccgcagagatcggggaacgtatgcctgcttcaaggatgagcgagtgtgtgcccagctcttctgcttcgacgcccagacgggatactgtgtggcctacaggccagcggccgaaggatcggcctgcggaaatggttatcactgtctggatggtcgttgtacaccactgccctcgaacatcattcccgattacggacacaactatcgtttagtctacaataaaatcgacaacaagaaagatgcagctgaggatgttgagagtagtagtgaagaaaccgagtcccaagaggacgagactgagagtgttgaggatcaggatgagggcaccactagcagcgaggagcaggaggacaacaagatcgagcagagctctgccgctggcggcgctgctgcgcagtcgaccacaaccgccagaagcacgacgacaaccactgtgcgcaccacatccacaaccacaaccaccgccaagcccaagtccaagtcctttggctatctgcatcgcagccttcccgagcgacagtggatgcaggacaatggcgtgctggtcacgacgcgaatcagcagcagcgtcagcagcagcagcagcggtagcagcagcggtgaagccgcagcaacatcgacacgcaggccaacaacaacaaccaccacacaaacaccgaaccttttccaaatctatacacacgaactacgcaaacaaatcgaatactacttacacatgctacagacacaacaacatgccaccaaatttcaaccagaacaacagcaacagcagtcacaacaacaacagtcgatagtcgaaatccccttggttcaaaaaagccttacaaattatagtgtaaccagcagcagcagcagcaccagcaacggggcaaagcaacagccaccgagcaacaaggacgagaatcagagacagcagcagcagcagcaacaggcgcagcagcaactacaggatgggctgcccgatgaagagaacgaggcgactgccggcattcagagcaatgaagcgattgagcggcaaaaacgtaagttccccacaacacccacagcagcaacaagtgctgcgcagaaatcagcaacaccagcaacaccagcaacatcggcaacatcagcaagacccacaccaaccaccgccaaaccgataaccacatcatcatttctcgacgcgtactttaaaaaactgcaagccttgcatgacgctggatcggccagcagcagcaccaccaccaccaccaccacctccgtgtcgtcgtccgtcagctccgcaacaagcagcaagcagcagcatccgcagcaacagcagcagcagcaagtgcaacaaattgcggatggcagtcactttctgaaacgtacgccccatcggagtagtcttaaggcatacaaaactagtagtagcagtagtaataacagcagtagtcagacccagcagcagcagcagcagcagcagcagcagtatgcgacaaactacattggcgacaccacaaacaatcagccagcggtgttggacaacagcggcagtgcgtcgagcaccacggagaccgccaagaaacccaaaatcaagacacaaaaactaatacgccgcacacgagtcatgcaaacgcaaacgcaaacgatctga

SEQ ID NO: 20889 - protein, 821 aa, DROSOPHILA
MEPDDLLASEKLERLQRRQRRSRRSAPSSPDFEDLNDEDEGALDGEPQVAESRTRSRRQAPYIIYPEVLVIVDYDGYRLHGGDNLQVKRYFISFWNGVDLRYRLLKGPRIRISIAGIIISRGRDATPYLERNRVGRDAIDSAAALTDMGKYLFRERRLPVYDIAVAITKLRLRRRRMRGEQATGEGEQRGHHRGHRRLQRHHRGCPRSWTSVGSGARRFATAQLLGRTGRPAVSLGGWLHHVRSASHGAGFPMVRLHGAELPPLPQDSALGRSLPGTLLSLDAQCRRDRGTYACFKDERVCAQLFCFDAQTGYCVAYRPAAEGSACGNGYHCLDGRCTPLPSNIIPDYGHNYRLVYNKIDNKKDAAEDVESSSEETESQEDETESVEDQDEGTTSSEEQEDNKIEQSSAAGGAAAQSTTTARSTTTTTVRTTSTTTTTAKPKSKSFGYLHRSLPERQWMQDNGVLVTTRISSSVSSSSSGSSSGEAAATSTRRPTTTTTTQTPNLFQIYTHELRKQIEYYLHMLQTQQHATKFQPEQQQQQSQQQQSIVEIPLVQKSLTNYSVTSSSSSTSNGAKQQPPSNKDENQRQQQQQQQAQQQLQDGLPDEENEATAGIQSNEAIERQKRKFPTTPTAATSAAQKSATPATPATSATSARPTPTTAKPITTSSFLDAYFKKLQALHDAGSASSSTTTTTTTSVSSSVSSATSSKQQHPQQQQQQQVQQIADGSHFLKRTPHRSSLKAYKTSSSSSNNSSSQTQQQQQQQQQQYATNYIGDTTNNQPAVLDNSGSASSTTETAKKPKIKTQKLIRRTRVMQTQTQTI

SEQ ID NO: 20890 - DNA, 2747 bp, DROSOPHILA
gcacatggcgcgctcgctgtcgcgcggatatcccttttttatccagcgtatcttggcatagccgctgacggtgacgtggatgcctgcaaggatgccccacccgctgtgaataagaattgccaaattgaattgcaagtggagaccgctgagcagcgactcatcgaatttacaggcggcctacttaaagtagggatatatggcaatgtgaataatctaaatctataaatgaatcttttttgtcaaaaaatttgggtgtaacaagacggaaatttataaaatagacttgcttaaattaaatgcagtaggtatggcctttgcttagaataaatgtattataaagttgtacaatgcctatatatttaaatgatagtttaaaaagagtacaaaatattcaaagttagtctaaactcaaaagtctgagcgactattttgcgagtgtaaacgaatttccacaaaagggaaagctaacaaataaccacgcctttaacgagttcatggataactgaaaatggcggcatgccaagagcagcacaacaactgcaggatattccacagtgacagtcacaacagccacatatttttgggggcagggcgccaagagcaacgattaatagtggagcacgttcgaatcggcgtccggggggagatacattttaatattgccattagctcgtggccttcgtgcatttaaatgcaccgagtcgccacaccgcaccgaaatgccaagtgaccgcatcactcatacgccccgtgagtcatggacaccgttttcgtagtatacgttagggggctcacctttaatgcgcttcgtggcgtcgacgctgagatcaacaacgccggatagctcctgtccggcatagtagacaccttgtggattattatcaaatgatataaggcactcaatgggcatatattgctatatagttgtcgtttgtgtttgtgcgtccgcttgttcccccgcccgtctgtccgtctgtccgtccgaccgttcgtccgtctgtgttagtggtgtctttgtgtatgtgtgtgagtttgttactgtggcctgtgcaaaaatcagaccacagatgtataaatatcacttttcccctgctggctggagagtatgaattgaagaaattgggaaatgggctgtttcgttcatttgctatatgtcatcatgccatttgctctttgcctttgtcgcctttgtggcactcgcactgcattttctcggcaccgagcggcctacacacatgcacacgaagaatttgtgaacgctttccacgagccaccgaccgtccgacctcaaaattccttccgccgtaacctacttttctctgcacgcactcaaccgacggggcaatcacttatggaaattggtaactattcgcagcattaacacagccgtggcatattaattatatttggtgttttcatgtggccccctgattgtcagtctgtctgtccgctcgtccgcctgtcgcaacgatttctggtttgagcttcctttttttagcttttcggtttctttcgattcgattcgatttaactcgctcgcagctcacggctaacacgtccagcagccgttcgtgttggatttactctatccgcatgtcatcatgtcgcaagggtacaagcccagagccgagcgtatgatatacgtactcgggtcgctcgggagatccgacaggacctgcggctcaccaaaacaacaaccccctcctgagaaagccaccgagctgagagtcacgcacacgtgctgccgctgtctgtttttgtatacatttttcgcaatgccagggttgacaagacttcgaatcgaatagtattttttgagcttggcgtttaggcaattttataggcgtttcaaaaatgcaagccacaaggaacagaattccggcaagaaacacaacttcttaaagttgtatatttatatttatatttattataagttgtgcatatatttaaaatctctttaagactcgcaaggtaacctatgcgacacctatggacaaaatactagtttctgggcgacacctaacgataaaattcatattcccaagcgcaccatctattgtcaaattactatttccccagtggtgccatctagcaacaaaacagttcatcgccacctattgaggatttcataaaatgccacgtggcgacacctggtgctaaatccaaaagtaccacaacactagcgccatctagctctgttaaccagcttccagataacatactattaacattgctacttgcgcacggagtaaccgtgtttgtatacccaaaaaataccgttaaaaagcggttttaatcacacaaggtgggactggctacactaagcgcaaacaagtcttgcattttgcaataaattctctaaccggttttgttattgttttggtgctcaagtaccgcagaaaagctcatatctgaccttgaataagtacgtgtaaatcttatctgcgaaatcggcaataatcagtaggtaaaccccacaaaaacagtgaagttgctgcaaacaattcgaaggatgagccaaggtgcctcggaggtgccactttcgggtaagtaacattaataacctaatattatgttgtaataaatggcctgctggtaactctgtggaactagcacttcgtctgaagtactgtgagcgcaaggacgccttcctggaggataacatcaaggtgaagaatcccttctgtgtattccgagactggctggagttggcgctgaaaaccccggagatcttggagcccaatgcc

SEQ ID NO: 20891 - DNA, 747 bp, DROSOPHILA
tgttagtggtgtctttgtgtatgtgtgtgagtttgttactgtggcctgtgcaaaaatcagaccacagatgtataaatatcacttttcccctgctggctggagagtatgaattgaagaaattgggaaatgggctgtttcgttcatttgctatatgtcatcatgccatttgctctttgcctttgtcgcctttgtggcactcgcactgcattttctcggcaccgagcggcctacacacatgcacacgaagaatttgtgaacgctttccacgagccaccgaccgtccgacctcaaaattccttccgccgtaacctacttttctctgcacgcactcaaccgacggggcaatcacttatggaaattggtaactattcgcagcattaacacagccgtggcatattaattatatttggtgttttcatgtggccccctgattgtcagtctgtctgtccgctcgtccgcctgtcgcaacgatttctggtttgagcttcctttttttagcttttcggtttctttcgattcgattcgatttaactcgctcgcagctcacggctaacacgtccagcagccgttcgtgttggatttactctatccgcatgtcatcatgtcgcaagggtacaagcccagagccgagcgtatgatatacgtactcgggtcgctcgggagatccgacaggacctgcggctcaccaaaacaacaaccccctcctgagaaagccaccgagctgagagtcacgcacacgtgctgccg

SEQ ID NO: 20892 - protein, 84 aa, DROSOPHILA
MGCFVHLLYVIMPFALCLCRLCGTRTAFSRHRAAYTHAHEEFVNAFHEPPTVRPQNSFRRNLLFSARTQPTGQSLMEIGNYSQH

SEQ ID NO: 20893 - DNA, 2557 bp, DROSOPHILA
ttataaattatttgccactgtccctctaataaatcgtaaatctaaattatcaatatccaataggatcataatttttaaaacaatttttaatccaatattaatgtatgggtcacctgtttggggtagatgtgctcaaactcatatcaaaaaacttcaaatatgccaaaacaagctgttaaaattaataatgaacttaccttattacacaaacactaagtacctacatataaaagcaggtgtacaaaaagttcaacaaaaaatacaatattaacaatcttttgtttcaagtcttagtttttaagttagttgtaagtcaattaaggtttttcttctcccttgttttccttaataaataataaatattgttacacaaaaaactaaaaacaggtcaactagacataattaataaatatttcagatgaaagccttagctaaacactgtaaatacctaattataccattagctttaatgaaatgtacatatatatataagggataaagcacaaataaattaattaaattaattaataaaaaaaggtcttttgctcggatgggctgactgggatggatgattggagaagatgctattattttgattctatatattttgatcagaaatacttttcgagttggtctttttatcgtacttcttgctcattaccatcaataagacaacatcagtgaccatcgcctggccaaattccaaggctatcatcgcttatagagtactcttttgtctccatataatttcagctggctatagctatccggtggactggtggtcacttggagtcgtcgcctacgaaatgcggggaaacatccgacccttcgttgtgcactcgaacaccccactagcggagatcaagaatatattgaacacccccgtgcactatccgcgctactggagcagcaacttcgtcgatctgctgcagagggtgggttggatcgcactgttttaacacactaacacacactttatgactattgtagttactttccacctatccgggtgctaggatcagtacaaggcaggagctgcatcaaacgcccatgttgcgcaacattgacttccagagggtgctcgagaagaagatcaaacccatctataaacctcccgaagaccacctcaactgtgatccttgcctagaactggaggaaatgattgtagaatcgcggcccttgcataaaaagaagaagcgcctggccaagcagaggtcagcacaacgcgacagcgatccagagactgcactggtcaaagagttcatcgtttacaaccgctacaaggagttgaagcgcaaagccatggaacaaaaggaaaacgactggcagcgcgaactggaactggccatggccaactccatcgtgaacagcttggcccccatccaagagaaacccgccgcctgcgttgtgcacgacggcgactgtgcgaccgcatcatccgcagtcgcccagttaaagggcgagagtattgagttcattgatcgcactccttcaccgcagattaaagaatcggctggcagcagacttgacatgccgcagagtccgtttcaaaaataaaacctaggacgcggttgataagcaacaggtttcaaactgcacaagaaccagacccacttgcgcaacgatgacttgtcagccatccatccataaagaccagaacctatttttcgaactcctgtaaacttcattttgtgtacatgcgcatattatatacagaactatgacattttataacttttaaataaaataggtctaagctacctttgtacatattagatttaagtctaaaagcaaaataaacgggtaattttcggtcaagtttatttttacgatttttttaatttttatttcaagttatatttcattcatgtttcatattttttttttgtaatgccttttgtgtataaaaaaagggtaaataattatgttctgccttgtataattatgttctgcattgtataattcttgctttcacacatttcttgttcttctgttaaaaatattattaaatttattgatgtttgcggtgaaagttggaaaagactaaccaaatgcaacatgtaaatattttgttaattcattttttcttactcgcggtatttctcatttatagggcattcctattagtattacattttagaacattacttcaacttcaacgcactcaacttcaagccctattactagcagctcaactgcttaacagagatacagcaaaacgatcttattgctgaggtgtgaaatcaaattaacaaatattcagaagttctaattcagaattgtaacaagtcacaagaagttagtaaaaggattatttagaagaaatggtgttccactttgcatttgtggaacgagtatttctgcaatcgttttaattttcttaggcaaaaaacaaatgcaattgtttagaaaaagcgtcaatgatttgtgttctcgttagaaagagttgcgtttgattttcttgttggttagaataatgacggagaagaagaaactacaagctgcaaaacatgatattcagtgtatgcacaagtgtaattgccagcgtgtatttagt

SEQ ID NO: 20894 - DNA, 887 bp, DROSOPHILA
aaatacttttcgagttggtctttttatcgtacttcttgctcattaccatcaataagacaacatcagtgaccatcgcctggccaaattccaaggctatcatcgcttatagagtactcttttgtctccatataatttcagctggctatagctatccggtggactggtggtcacttggagtcgtcgcctacgaaatgcggggaaacatccgacccttcgttgtgcactcgaacaccccactagcggagatcaagaatatattgaacacccccgtgcactatccgcgctactggagcagcaacttcgtcgatctgctgcagaggttactttccacctatccgggtgctaggatcagtacaaggcaggagctgcatcaaacgcccatgttgcgcaacattgacttccagagggtgctcgagaagaagatcaaacccatctataaacctcccgaagaccacctcaactgtgatccttgcctagaactggaggaaatgattgtagaatcgcggcccttgcataaaaagaagaagcgcctggccaagcagaggtcagcacaacgcgacagcgatccagagactgcactggtcaaagagttcatcgtttacaaccgctacaaggagttgaagcgcaaagccatggaacaaaaggaaaacgactggcagcgcgaactggaactggccatggccaactccatcgtgaacagcttggcccccatccaagagaaacccgccgcctgcgttgtgcacgacggcgactgtgcgaccgcatcatccgcagtcgcccagttaaagggcgagagtattgagttcattgatcgcactccttcaccgcagattaaagaatcggctggcagcagacttgacatgccgcagagtccgtttcaaaaataa

SEQ ID NO: 20895 - protein, 231 aa, DROSOPHILA
MRGNIRPFVVHSNTPLAEIKNILNTPVHYPRYWSSNFVDLLQRLLSTYPGARISTRQELHQTPMLRNIDFQRVLEKKIKPIYKPPEDHLNCDPCLELEEMIVESRPLHKKKKRLAKQRSAQRDSDPETALVKEFIVYNRYKELKRKAMEQKENDWQRELELAMANSIVNSLAPIQEKPAACVVHDGDCATASSAVAQLKGESIEFIDRTPSPQIKESAGSRLDMPQSPFQK

SEQ ID NO: 20896 - DNA, 3153 bp, DROSOPHILA
aaatgtcagtctggaattgtgtagtgtgctggtgtcgtactacttccactcggcgtgctttgtctcacagaatctacatttccattttgctttctcacttggcgtgtttagcttttgtctcgtgtcctccatatttaggaggcactacataacccaattttgcgaactcgattttgccactttataaccacacgtaaccagtgtgtccgtggtgatggactgcaacttatcggctcagtcgttaggagtacccctggcaaagggctatcgaaatatatatctttaaatttataaggaagtccattcaaataattgttttattttaattgtttggacacaacatacgttcacctttttgaaattggctatttgcagaaattgatatcgattgacacattaggggtgcttagcaaagaatagctaactgaagacttcataagagaaaacgtaatactctaataatagaaaagcactcagattacgtaacaactaataaaatattttatgtgcatatatataaaacgatttatcaaaagaacctggctttgtcaaaaaatcgatatttcatagtggtgtacatttttaaggactttcacaaataatacgctgagtacacttatattattgttatattatcccaaatattgggcagcacgattttttgaaatctgggtgacatcgattactatatgaaaagggtattcctgcttatcagtatttgcagagaaaaggaattatgaataatatttacctcaaaagctataaattagataaagtcataataatttactttactatttattaactatattaatttactatatattaatttactattttaataaaatatcttttaatgccctcgtcgataccaataggtattgtgaacggtcgatagtatcgacagagcggcactgcctgccgtcggttcatccctaacgccataagaattagtttgtttttttttgcaacaaacatttatattagttatgcgtgcgtggccaaaatgctaatcgcctggttagtgcttgccgccactttgagccgatccatcagagccagcaccacgatatcgataccgatcacaacgcaggacataatagcgggtgacgtgttttttgaaatcctgtccccctcggaactggaatacacgtaccggctgcgcccggccaaggactttggatccgccttctcggagcgactggagggtgtgccgctagtgattacagatccccccggcgcctgccaggagatccggaacgccagagatctgaatgggggcgtcgcactcattgatcgagggtgagagccttaagaacccctacaaagcttatcttagctattgaaagatggtcatagccacggccactttttatcagtggtcttagacgaaccatagacgaactgtagccatagttccatgcttcttatcacaaatgtcagaacctggttacgtgcgtccggagtgtccgtttaaagtcttattaacaaaatctatcaattttccgaatgaaacctttctttacaataggaatacaaaagatcgatacgggaaagcgatatagatatttcatatcagatatagatagatattgattcttgtcttcgtaaactaacaatgtcatttttcagggagtgttccttcctcacgaagacacttcgagcggaggcagctggcgcattggctgcaatcatcactgagtacaatcccagctctccagagtttgagcactacatcgagatgatacatgacaactcccaacaggacgccaacataccggccggctttcttctcgggaagaatggcgtcatcatccggtcgacgctgcagcggctgaagagggtgcacgccctgatcaacataccggtcaacctcacctttaccccgccatctaagattaatcatccgccgtggctgggctggtgacgtgatcggattacatgcagctcaaaggactcgtgtgaaagagacacacacgatctgaaaccaaagtgcatactcgtaggctgagacgtcgagaccgcaactgagactatactttagagtaccaataagtagctaattcgtagacggcagccataaactgtaaataaatagcttagcagccaaagagtcaggtcgccaagttgtaatctagacaatactataattcttaatttttatagacaaatgacaacgagttatattatattttccccagtgctgtgagatttaggcacatgcccagcgtgagaatcacaatgaccaccacaaggatggcgaagcacaagtagtttggctggatgggcattcgaaagagtttggcggacatgtccagcgaggcggcgaacagcaacgtcgagttgagatcttccgctgaggtattgtggtaaacaaatggacgaacccgtatctggtgtccattagcttgagcattctggcacactcgagtcaccgatgatgccacgaaaaagggcagcaatcccaaaaatagccacagcatcacgttcgcaatatttagcaggacgagcttcagggcgcagtagtggaaatcaaagtccttaaataggtacaccaatcccgcgaaggcgtacgccagattcattacaatcaggaagcacactggaatagacacgtgctgattcaagcgctccagcagcttgcggaattcgaggacttccctcatccaatcgagcgagtcgatggagtgcataagcagcttgtgcgacagcgtttccagatgcatccttagcaaataacactcgatgtagtagttgctcagtatgataatctccaccagatcctgcagcagtatggtgaacaagagacccactcgcagccacatctcccagtcgcttaggatttccgctagccaggacaccttgacgatctggctgggctgcatcatcaccacacaacaggcgtagccgaatagcaaaatcagcagggccagtgcaatggccagaaaaagccacagcattcggcagagcctcttcggcttggcagacatcaggaaaaccctctcgatgaggttttgcagctgctcgtggtcgatcaccttgcataccaacactgccgacacgaaggccaagaggttaaagccactgggcactatgaacccaaacagaagttctcctatggtgttcggggtcgtagctccgccatctgtacca

SEQ ID NO: 20897 - DNA, 823 bp, DROSOPHILA
gccaaaatgctaatcgcctggttagtgcttgccgccactttgagccgatccatcagagccagcaccacgatatcgataccgatcacaacgcaggacataatagcgggtgacgtgttttttgaaatcctgtccccctcggaactggaatacacgtaccggctgcgcccggccaaggactttggatccgccttctcggagcgactggagggtgtgccgctagtgattacagatccccccggcgcctgccaggagatccggaacgccagagatctgaatgggggcgtcgcactcattgatcgaggggagtgttccttcctcacgaagacacttcgagcggaggcagctggcgcattggctgcaatcatcactgagtacaatcccagctctccagagtttgagcactacatcgagatgatacatgacaactcccaacaggacgccaacataccggccggctttcttctcgggaagaatggcgtcatcatccggtcgacgctgcagcggctgaagagggtgcacgccctgatcaacataccggtcaacctcacctttaccccgccatctaagattaatcatccgccgtggctgggctggtgacgtgatcggattacatgcagctcaaaggactcgtgtgaaagagacacacacgatctgaaaccaaagtgcatactcgtaggctgagacgtcgagaccgcaactgagactatactttagagtaccaataagtagctaattcgtagacggcagccataaactgtaaataaatagcttagcagccaaagagtcaggtcgccaagttgtaatctagacaatactataattc

SEQ ID NO: 20898 - protein, 196 aa, DROSOPHILA
MLIAWLVLAATLSRSIRASTTISIPITTQDIIAGDVFFEILSPSELEYTYRLRPAKDFGSAFSERLEGVPLVITDPPGACQEIRNARDLNGGVALIDRGECSFLTKTLRAEAAGALAAIITEYNPSSPEFEHYIEMIHDNSQQDANIPAGFLLGKNGVIIRSTLQRLKRVHALINIPVNLTFTPPSKINHPPWLGW

SEQ ID NO: 20899 - DNA, 2984 bp, DROSOPHILA
atccatgtttcgcgtgcggccaaagtggagctcgccgatctgccgaagcaagtgcccgaggatcatgcacgataccacctcttcctgtttcggcacacgcacgagggcgactactttgagtcgtacgtgttcgtctactccatgcctggatattcctgctccgtgcgcgagcgcatgatgtactcaagctgtaaggctccttttctcgacgagctcgcggcccttggcgtggaggttgttaagaaggtgagttgatatgaatgcgagtgggtgtggctgcgctaatagcactaaagattagggctataaaaagcaaaagcagggtatatattgtttgtgatttatttattgctttcaaatcgccacattcactatacttttgattcacgatctctagaaatattttgaatcataattagggcgaatgtctcacttttcacttgaaatagaaatctgtaaatcataaataatgagtaattttaaatcatactaaatctgattcatgtttctaacaacgttttacatttcagcttgaaatcgacagcggcagcgagctgaccgaagccttcttgcaggacgagctgcacccaaagaagattctacaccgaccggcttttgccaagcccaaggggccaccaaaccgaggcgccaagcgcctcacgcgtcccaccgcagaggactaagtctgaatcccgatcccaccgagtcaattctgtttatcgcccttctacgtactgtttcctagcagagcatttaatttattgtatccaatcgtttatttcttttgtgttgtgtctatcccgtgtctatatgtgtccgtacgtcagtcgatatctttagaggcactaggcatcaactgaaacatcgcatagcagccgccaaagtgggcttccttaaatgtattcttgtctatgtaactttagatggacatatatgcaatttatttaaattaaaaaaagtaactaagttcacactggcgtcttctttaagtcctcaggactcacttgatcgtgtccagcgatacatgttcggatgttttctcgtcgtgggccttgaaaagctctgggttttcgtcctctgtcagttttttgaacgcctgttgaatgttttcgtcgcgatcgagtcgccatttgtactgccagtagcgaacctcttccatcgaggtccctgatgctttcatcagcagcagcgacgtcacaccagccacgccgcccaagaaacctccaatgattccacctgccgccatgccccgcagaccaagactcactttgtaaagcgagccggtgatggaaccagcggccaagtattcgtagattgaggattttccacggtacaccgacatacaagtgatgatgccgctgtaaggaacacatttttgtatcacacagatacagatttgaattcgtgttgctgaacttacaagtaggatgtggtaaaaagtcccactcgccagccccatttgaagccgcctttggcaaagttgactgtgaattgatcttgcagctttttctgtaattatgattaaaaacttgattataacatatttaaatgataatacgtagatacctaccttggcatcaaagtgcgatttaaatgctgtggcctggttgttctccatgaaattcatgtaggccacgcgcgattgtgtaactccgccgtaaatagctccaataaggaatcctaggaagccggcctggtaaaccgagttaagctcggaggatatgctgccaaactcgctatttaaatgtttatgtacggtcagtagattttagtataaatggaattcttagttttcctactcgattgtaaacatttgcttgaggcgctccagtcctgtttcctctggtggtttactggccagaaaggccttgtatgttttgttttccttatcgactatttcatctgcggcgccttcgaatgttggcaggatgcctgcgatcagaaaccggcgtcctttccacagaaaattcattttttaagcgtgttaaataaccaagtaaaacgagtacaacaatctcagctgtttgccggtctgttagtgttggaaagtgtgcgtgtcattggtgttggcaaactctcggtttaattgtttttaatttaaatgcgtttgttattaataaaattatattattataataatttaagttacatactcatttagttgttcatatatttttttcttatatcattcacacttttaaatttattttgttgccaaaaacaattttattgtgtttacaagtatttgctataactttatgaactgcaccttgtgctttgcttttgccgtttaccaacacagcacaacgccgctaatcgcgttgtcggcaaacatttgttgtgaaattttctacgtttttacaatttaattcattgcaaatccaatttattgttatttacttgaacgcataaagtgcttctgcactttagaaaactgaaatcatgatgtacgacaacgaggaaggtgagtaaaatgaattgcgaaaatttgtgcatgcacgttggcgtgtaccaaaattaatatggcggctggagcgctagggctccgcattgttagcaatgaatttcaatggtcaaataacatcttgcagaactgtacgaggaggagaatgccgaggagatctctcacgagctgtggcaggaagcctgctggatcgtgattaacgcgtacttcgacgagaagggcttggtgcggcagcagctggacagtttcgatgagttcattcagatgtcggtgcagcgcattgtggaggattcccccgccattgagttgcaggcggaagcgcagcacacatccggagaggtggaaaccccgcccagattctcgctgaaattcgagcaaatctatctttccaagccaacacattgggaaaaggatggttcgcccagtcctatgatgccgaacgaggcccgcctgcgaaatctaacttactccgctcctctctacgtggacattacgaaaaccaagaatgtcgagggcctgg

SEQ ID NO: 20900 - DNA, 798 bp, DROSOPHILA
cacgcttaaaaaatgaattttctgtggaaaggacgccggtttctgatcgcaggcatcctgccaacattcgaaggcgccgcagatgaaatagtcgataaggaaaacaaaacatacaaggcctttctggccagtaaaccaccagaggaaacaggactggagcgcctcaagcaaatgtttacaatcgacgagtttggcagcatatcctccgagcttaactcggtttaccaggccggcttcctaggattccttattggagctatttacggcggagttacacaatcgcgcgtggcctacatgaatttcatggagaacaaccaggccacagcatttaaatcgcactttgatgccaagaaaaagctgcaagatcaattcacagtcaactttgccaaaggcggcttcaaatggggctggcgagtgggactttttaccacatcctacttcggcatcatcacttgtatgtcggtgtaccgtggaaaatcctcaatctacgaatacttggccgctggttccatcaccggctcgctttacaaagtgagtcttggtctgcggggcatggcggcaggtggaatcattggaggtttcttgggcggcgtggctggtgtgacgtcgctgctgctgatgaaagcatcagggacctcgatggaagaggttcgctactggcagtacaaatggcgactcgatcgcgacgaaaacattcaacaggcgttcaaaaaactgacagaggacgaaaacccagagcttttcaaggcccacgacgagaaaacatccgaacatgtatcgctggacacgatcaagtga

SEQ ID NO: 20901 - protein, 261 aa, DROSOPHILA
MNFLWKGRRFLIAGILPTFEGAADEIVDKENKTYKAFLASKPPEETGLERLKQMFTIDEFGSISSELNSVYQAGFLGFLIGAIYGGVTQSRVAYMNFMENNQATAFKSHFDAKKKLQDQFTVNFAKGGFKWGWRVGLFTTSYFGIITCMSVYRGKSSIYEYLAAGSITGSLYKVSLGLRGMAAGGIIGGFLGGVAGVTSLLLMKASGTSMEEVRYWQYKWRLDRDENIQQAFKKLTEDENPELFKAHDEKTSEHVSLDTIK

SEQ ID NO: 20902 - DNA, 8353 bp, DROSOPHILA
agaattaacaatgaaatacccaaatgtcgctgacaaaagttgcacttcagtttcagtttcccaaaccgaaccgttctggcccggatttactcttaaaagcacattcatgtttcaaacgtcgagtcgagaagccccccacctccatcaccacccacatcgaatggcacgtgcattgggaatcagttaaccttgcacattatactaattgaaaacaggaagagccacgaacccagtagccaggctagaaaggagtgccaggatggatggcgataatgactttgcggttgcgtttgcggttgcggttacacattaattgcaacatcgagtatgcaaacaggacagggctgatccctttgattgaaaattcaggtccgacgagaatcgttacggagttaatgcgtttggaatgcaattagtgaggctcgttttttcgggtggccatggtctaccccttactgcctgattttgtctatcctgtggcaagagttcacttagctgtcacaacaaagcgcacattgtgagacttatgacatcaacgctataacttacaccatcacttccatttacagttcagaggtcgtttcaaccaatgacattggcttgtcaactggtcattgtcaacgtcctccaactaagtcatctgcacttgcataacccggctgacatggtatgcttgatttattgtactcatccggcacccttttgggtgcagaaagttaattagaaagtcttattaagctcgggcattaaaattaatggtaaaaaaaaaacaaagtcataacatcaccttgcatacaaaattcgttaagtcatagagggaaaaaactggaaaaagcgaacataaaatattttagaagaacatgttccccataaattaggcaaggctaccggaacaacgaagcattagaatcataatccgctaaggtaactttgaaggtcggttatatttgttttgtgggagggtgtgtggtcgccgtgtggctatgggtggtctatgtctatgggatgtctatgcgtgagccacttggacgagcttatacggcggtttgtcctacttacgggcttggcacatgacctcaagcctttggctggtccatttgttcgcgtattatcattaacatgagcagcattagcatattaatgagcccaccaaaatacataataaacccccatttgattacacaactaataagctgaccgcggtaggtaaccttgttccagcgaatgtgggttcataatgcgaaattactttggcaaaaaattaccaactataataaacaagttttttgtgaatgcttttcacttgggttttatattccttgtaaatttcattagcatatcctacaaagatttgccttatttcgaaaaaaatattttactaaatacaatcaaatgaaatgatctacttttcatatttcaaattttccattaagttgactgaaactggaatgggatatttaaaatttaaaaaggaataataataaaatattttaataatttcaagtgaatataaaatgttactaacagtatgcattgtttaataataataataatgtaattttattttgatgacgagtacacttttcttgccatatccctattgcccaggacacaacgcattaaatattaacctcaattttttttattacccacagataatcacacccactcgttcgctggtgctctgcgccgagtcccgccgcgaaatggaggattggctgggcagccttaaaacggcgacggcgccgcagaggcctcgtggtgacagctttcttatcgagcagcacgacatcctgtccaaccaccaccactggtacgccacctcccacgcccgccccacctactgcaatgtgtgcagggacgccctctccggcgtcacttcccacggactcagctgcgaggtgtgcaagtgcaaggtgcacaagcggtgtgcggccaagtcgatagccaactgcaagtggacaacgctagctagtgtgggcaaggacatcatcgagcaggcggacggcatcataatgccgcatcagtggatggagggcaacctgccggtgtcctccatgtgtgccgtctgcaaaaagacctgcgggtccgtgctaagactccaggattggcggtgcctgtggtgtcgggccaccgtccatgtggcctgtcgtccccaaatggctgtggcctgtccaatcggacctgccaagttgtctgtggttcctccaaccagcgtccactccatcagcaccgatgacgcctgggatgtggccagtcccaagggcaacttttcgcccctgctggtcttcgtgaactccaagtctggagacaatcaaggagtgaagttcctgcggcgctttaagcagctattgaatcctgcacaagtctttgatctaatctctactggtccgagtctaggattacggctcttccgacacttcgagatgtttcgaatcctggtgtgctccggtgacggatccgtaggctgggttcttagcgagatcgatcgctttaacatgcatgtaagtttttatatgtataaaaatacactatacactgcctctccctcttggaaaagtattagtaaagacacattttacaaaatagcaagtcacagactggattaattttacatatgtattttataaaatattattttcttctctaaacgaacagaaacaatgtcaggtggccgtgatgcctttagggacgggcaacgatctggccagggttttgggttggggctccagctgcgacgacgacacccacctgccgcagattctagagcggtacgagtcggccagcaccaagatgttggatcgctggagcatcatggtcttcgaaaaggctattcccgtgcccaaaacacccaagatgtccatcagcactgagcaggaagcgatgctcactggcatggtgacatcggccaaccatcacctgcgcttcatagtggaaaccaatgacacccagaccctgatccgctccacgaggaatctctgcgacaccgttgacgacttggtgtgccggatctcggaacaccacaaggatgacgaacagctggccgtgaagtgtgacattctcaggcagaagcttaacatgctgctggatgctctgcaggaggaggaaatcggtgcccacagtggcgacgatttgatagccaccatcaggagccttattgcgagaagtattccggtgacaccaggatccaacgcctacctgctgtaagtaactatacgaattttaatcaaaaatcaactcaatattcaatcaaatttaatatcaatttataattggacattattatctataacccctcactaccagcaatccaaacatatcaatcgaaaagacggaaaaggatcaaattaatacaaaggagcgcagaaatagtcgatcccttcgctctagcgagaaagaggctctccagtgccgtgccaatagcgtcaagcgagccatctacaatgttgtagagcactcggaaccaggacgtcctaaacgctaccagcgaaagttgtccatcacaccgtttgaggccctgaagctccctaccgcatccggagaatcaacgccctgcacctcccccttaccgataattccacccattaatattatttctcccaccatggaaacctcacgtctcacctgcatttcccctctgcctgatacccgacgagattccgttgatgagaacttctttaacagcatcaatttgccggctccgcgacaatttgcggatagtcgtagaagctctggtgtggaagtgatccaggagatcgaggagggcgccaatggggagaccgtgtatcgaaaaagtcgcatgtccctgaccggtggagctaatatcgacgatgccggtaatcgtttgtcaccatgcagcgatgcaggcgaaaatacgccaaccgagcgcaaagtggactttctgagggtcccgattcacactggcgaacctatagtagaccccttatgcgactatcgtccccacgaggttttcgagcgtacctactacatgacccgggaaatggacaaaggcaaggaaaaggacaaggagaaggacaaacccgtggagatcgacaaggaaaaggatacatgtgtggagaaggagggcagcatgcccgccgaaaagctggtgcatacatgcaaccttcaggtacccggagttgtcgttaccccaaacccccaaaatgtttactcaagcgccagcattacaatcattgacaccgatgcacagaccactaccgtacgtgtctcattgtcgagatgtgatcgccgcaccatgatcgactaattctttctaatccttacaggagcaatcctcttccgatgatctgggtggcgaagccagcgatgtcctttctgccattagcaatgaggagtgcagcgtggcttctgaaatatttgacaagcaggacgcaggacaaaccgtgggtgatatcattcaggtgagaataggtatactttgttaaaatgcaattacattatttaaaatgtttaatcgggttaagcactgcaatttttaagtaaataacaatcaagaatatgggtcccacccggagcgccatttattttatccaaccttgttctttctacttttataacattctctttaatccagaatatggatgccagcaactttacgcacatcgactccccagagacaagtgatgaaacggaggcgatgcctggcgagagcatcatggacgacataagctcggtactgggtcacgatataacctatgcccttcaggacaacacacttaccgacgacaccaccactctctgctcagagcatgcgggaccaccgaaacctcctcgcaaaaagtcattgagcgccctaagccgaacccaggctcatccgcggcggcgcaactcttctccaccgagaatggcgcgattggcgcgaatggacagcgatgataatccccagcaattcggatttgaaaatattgttttcgagatagacaacagatgtgacgaccagaagatgcgggagccaccgcgctactgcagcctggcgcagttcgtggaaggtaacgatatagcgcgtcaaagcttcaaggtaggtatagccgatcaagttggattagctgtatgtctagtttgtaaatagcgtatagagtatctagagttgttctgtatggttgtcggcagtgatgagatatggccacttatggtaaactctttgttgctctacgtttgcttctttcttaaacttttctttttcggctgttcaatcgaatcaaccaacatctaacaaaatattaacccgtccaaaatcgaactaacaaaaccaaaccaaaccgaactataaccaatcctgcaatgtacaaaaaccatcgactacttactataatcccgctcccgctgaagcgtcccaaaaagcgcacctcactgaaaaaaccgaaaccaactacaaccactgaaatcgtatctcaacagcagcttatgctagaacaacatcgaggtggagacaacgatagcgattatccggagcacgagcaaactccaacgaataaaggggccaatttactggccaccaccagcgaggacgagctgtccacgcagacggccatcaaaatagaaatacaagacattgatgccactgtgcgcaacctcaacagcagcatgaagcccaatacgatcttgaccacgtcgacatcgcccacgaagaaatcgggccatggacaagatgtaaagcgcattacttttgatgagtcgtgtaagaaagaatcctttgatgatgtaaatcccaactatccacagattagtgttgttgtgaggccgccgacgccgttgcgcggcgactgcatcaagcccacggtatcgctcctgccggtctcctccggcggagccatgaccgtgtccatgacctgctccggaatgctgggggtgcgagccatgaacgcctctgagatcaggcgccactcgagccacgcccccggtctggctgtccgcgagttcgacaaggacaaggaccgccggcactccggtttcaatcccaaccagttgacactcgatcctgagcacgcccgcttcctcagcagctcgccggcggctagtcgcaggatcagctgcggcagcctcttcaaggtgagtctacgagcaaaccacctcctcctcagcgtctctctataaccagtcccctatattgcacgcctttaacaaaagtggcacaacatatttttttcaaacattctacaataattaaagaaataccattataaagaaaagaattaaaacaatttttaaggaatattatcctcaggcaacttgtaaaaaaaacgaacatcttatgaatttgaatttaacactgaaacggataaacaaaatattattacaatttggattaatccttttcaagatgatatttacagcacattcatagtgtgcatttttataatcagcctcatataaaaatcgagttgtgccactttagttgagtgcgtgccacacgttcgatccaaattggctccgcatcgtcggcaattgccaagttcttgagttttgattgtgtcagtcgagcaattggtgtcaagtgcaagtgcactaacaacagcgactgtaggtaatggttcgttcaaataattcccagtcaaccacctaccaccagggagttttgaaaaaaaatctggattcagttccaggtattcacgtacttttagtttgcagtttatacagtatgtatttattaggaaacattttgtgcgagtacaatctattctttgcagccttcttagttattttttattagttaattagggaatttggtttgttccgataaaacatcaaggtatattagattgcagacaatttatacaatctacaaccgtaccaagtgttttttatcggttaatttttatgttttccacattattgagttactttagttcaaatagacagttaacagttaaccaccacaaaatattacgaagtaaaacaaccatgttctatatgatttacataagcacaaaaacaattggtacgtatttcaaaattcattaacctatatgagcttatgttttagatattcttaaccaaatcttaaactccataccaaaacgacactgttctactccatacatgtaattaattgtaattatcaacacactgtaaatgaaaaacattgaaaactaaacacgatttataaaagaagtcattataaatgcattttcttagaagaaaaacaaaaagatcggcaccaagcgcagctacggattgttcagcgttcggttctttgtggtggccgagccagattttcgcctggccaccctggcgctgatcaggccactaattcctctggtaagccagtccaaaattccgggacgcggtctcaggtgctcgggctccggaccctccccactccctctgttctgatcccaaaaccgtttctgcgtttcttcgttcgttcgatgtgtaagcttcccagcaagtcccaatatccggatctaccaacttatcgagtaatagcttcgggctcaccgaaaaaaacctatgacaaatgatggcgtaacttaatcatttattttgaaacaaatttacaaaatgtcttgtcttgtccgtgctcaaatttgaacatataattttttttttaatttttatctaatctttatgaataagccaattctgtcatgggtgtccaaccaaagacactagaataacaagatgcgtaacggccatacattggtttggcactatgcagccacttttttggtgacggccaaaattactctctttcggctcactcccgctgagagcgtaagaaatctaaaaatataatttgcttgcttgtgtgagtaaaaacaagagacgagaacgcgtataagtgtgcgtgttgtgctagaagacagattttctggccgaaatcaattctgatcgaagaaacgaatttacattgtacatattagggtagtttttgccaatttcctagcaatatgataaaataaaaaaaatttaaaaaattcgcgccctgactattataattttaaagctttttaaatttgtttgttaaaatcgccgctcgaattagctaccgtttacacatttatatttatgtttaattctaatttgtctctcatctgccaattttttaaaagcgaaatattttttttgaaaccacttttaatgttaatgttaccatcatattaagtcaaatgatttaataaatatactaaataattaaatatggcaattaaattaaaatgcaaaagtaatatcaaagacaatagaattattctagtgtctttgctttgttcatatcttgaggcacgaagtgcggacacaagcactcaacaatcattgccttattaatttttcacacgccgcaagatgaatactctaatgacaaatattcttatataaagtcatttttgaaata

SEQ ID NO: 20903 - DNA, 3906 bp, DROSOPHILA
atgggatgtctatgcgtgagccacttggacgagcttatacggcggtttgtcctacttacgggcttggcacatgacctcaagcctttggctggtccatttgttcgcataatcacacccactcgttcgctggtgctctgcgccgagtcccgccgcgaaatggaggattggctgggcagccttaaaacggcgacggcgccgcagaggcctcgtggtgacagctttcttatcgagcagcacgacatcctgtccaaccaccaccactggtacgccacctcccacgcccgccccacctactgcaatgtgtgcagggacgccctctccggcgtcacttcccacggactcagctgcgaggtgtgcaagtgcaaggtgcacaagcggtgtgcggccaagtcgatagccaactgcaagtggacaacgctagctagtgtgggcaaggacatcatcgagcaggcggacggcatcataatgccgcatcagtggatggagggcaacctgccggtgtcctccatgtgtgccgtctgcaaaaagacctgcgggtccgtgctaagactccaggattggcggtgcctgtggtgtcgggccaccgtccatgtggcctgtcgtccccaaatggctgtggcctgtccaatcggacctgccaagttgtctgtggttcctccaaccagcgtccactccatcagcaccgatgacgcctgggatgtggccagtcccaagggcaacttttcgcccctgctggtcttcgtgaactccaagtctggagacaatcaaggagtgaagttcctgcggcgctttaagcagctattgaatcctgcacaagtctttgatctaatctctactggtccgagtctaggattacggctcttccgacacttcgagatgtttcgaatcctggtgtgctccggtgacggatccgtaggctgggttcttagcgagatcgatcgctttaacatgcataaacaatgtcaggtggccgtgatgcctttagggacgggcaacgatctggccagggttttgggttggggctccagctgcgacgacgacacccacctgccgcagattctagagcggtacgagtcggccagcaccaagatgttggatcgctggagcatcatggtcttcgaaaaggctattcccgtgcccaaaacacccaagatgtccatcagcactgagcaggaagcgatgctcactggcatggtgacatcggccaaccatcacctgcgcttcatagtggaaaccaatgacacccagaccctgatccgctccacgaggaatctctgcgacaccgttgacgacttggtgtgccggatctcggaacaccacaaggatgacgaacagctggccgtgaagtgtgacattctcaggcagaagcttaacatgctgctggatgctctgcaggaggaggaaatcggtgcccacagtggcgacgatttgatagccaccatcaggagccttattgcgagaagtattccggtgacaccaggatccaacgcctacctgctcaatccaaacatatcaatcgaaaagacggaaaaggatcaaattaatacaaaggagcgcagaaatagtcgatcccttcgctctagcgagaaagaggctctccagtgccgtgccaatagcgtcaagcgagccatctacaatgttgtagagcactcggaaccaggacgtcctaaacgctaccagcgaaagttgtccatcacaccgtttgaggccctgaagctccctaccgcatccggagaatcaacgccctgcacctcccccttaccgataattccacccattaatattatttctcccaccatggaaacctcacgtctcacctgcatttcccctctgcctgatacccgacgagattccgttgatgagaacttctttaacagcatcaatttgccggctccgcgacaatttgcggatagtcgtagaagctctggtgtggaagtgatccaggagatcgaggagggcgccaatggggagaccgtgtatcgaaaaagtcgcatgtccctgaccggtggagctaatatcgacgatgccggtaatcgtttgtcaccatgcagcgatgcaggcgaaaatacgccaaccgagcgcaaagtggactttctgagggtcccgattcacactggcgaacctatagtagaccccttatgcgactatcgtccccacgaggttttcgagcgtacctactacatgacccgggaaatggacaaaggcaaggaaaaggacaaggagaaggacaaacccgtggagatcgacaaggaaaaggatacatgtgtggagaaggagggcagcatgcccgccgaaaagctggtgcatacatgcaaccttcaggtacccggagttgtcgttaccccaaacccccaaaatgtttactcaagcgccagcattacaatcattgacaccgatgcacagaccactaccgagcaatcctcttccgatgatctgggtggcgaagccagcgatgtcctttctgccattagcaatgaggagtgcagcgtggcttctgaaatatttgacaagcaggacgcaggacaaaccgtgggtgatatcattcagaatatggatgccagcaactttacgcacatcgactccccagagacaagtgatgaaacggaggcgatgcctggcgagagcatcatggacgacataagctcggtactgggtcacgatataacctatgcccttcaggacaacacacttaccgacgacaccaccactctctgctcagagcatgcgggaccaccgaaacctcctcgcaaaaagtcattgagcgccctaagccgaacccaggctcatccgcggcggcgcaactcttctccaccgagaatggcgcgattggcgcgaatggacagcgatgataatccccagcaattcggatttgaaaatattgttttcgagatagacaacagatgtgacgaccagaagatgcgggagccaccgcgctactgcagcctggcgcagttcgtggaaggtaacgatatagcgcgtcaaagcttcaagcgtcccaaaaagcgcacctcactgaaaaaaccgaaaccaactacaaccactgaaatcgtatctcaacagcagcttatgctagaacaacatcgaggtggagacaacgatagcgattatccggagcacgagcaaactccaacgaataaaggggccaatttactggccaccaccagcgaggacgagctgtccacgcagacggccatcaaaatagaaatacaagacattgatgccactgtgcgcaacctcaacagcagcatgaagcccaatacgatcttgaccacgtcgacatcgcccacgaagaaatcgggccatggacaagatgtaaagcgcattacttttgatgagtcgtgtaagaaagaatcctttgatgatgtaaatcccaactatccacagattagtgttgttgtgaggccgccgacgccgttgcgcggcgactgcatcaagcccacggtatcgctcctgccggtctcctccggcggagccatgaccgtgtccatgacctgctccggaatgctgggggtgcgagccatgaacgcctctgagatcaggcgccactcgagccacgcccccggtctggctgtccgcgagttcgacaaggacaaggaccgccggcactccggtttcaatcccaaccagttgacactcgatcctgagcacgcccgcttcctcagcagctcgccggcggctagtcgcaggatcagctgcggcagcctcttcaagaaaaacaaaaagatcggcaccaagcgcagctacggattgttcagcgttcggttctttgtggtggccgagccagattttcgcctggccaccctggcgctgatcaggccactaattcctctggtaagccagtccaaaattccgggacgcggtctcaggtgctcgggctccggaccctccccactccctctgttctga

SEQ ID NO: 20904 - protein, 1301 aa, DROSOPHILA
MGCLCVSHLDELIRRFVLLTGLAHDLKPLAGPFVRIITPTRSLVLCAESRREMEDWLGSLKTATAPQRPRGDSFLIEQHDILSNHHHWYATSHARPTYCNVCRDALSGVTSHGLSCEVCKCKVHKRCAAKSIANCKWTTLASVGKDIIEQADGIIMPHQWMEGNLPVSSMCAVCKKTCGSVLRLQDWRCLWCRATVHVACRPQMAVACPIGPAKLSVVPPTSVHSISTDDAWDVASPKGNFSPLLVFVNSKSGDNQGVKFLRRFKQLLNPAQVFDLISTGPSLGLRLFRHFEMFRILVCSGDGSVGWVLSEIDRFNMHKQCQVAVMPLGTGNDLARVLGWGSSCDDDTHLPQILERYESASTKMLDRWSIMVFEKAIPVPKTPKMSISTEQEAMLTGMVTSANHHLRFIVETNDTQTLIRSTRNLCDTVDDLVCRISEHHKDDEQLAVKCDILRQKLNMLLDALQEEEIGAHSGDDLIATIRSLIARSIPVTPGSNAYLLNPNISIEKTEKDQINTKERRNSRSLRSSEKEALQCRANSVKRAIYNVVEHSEPGRPKRYQRKLSITPFEALKLPTASGESTPCTSPLPIIPPINIISPTMETSRLTCISPLPDTRRDSVDENFFNSINLPAPRQFADSRRSSGVEVIQEIEEGANGETVYRKSRMSLTGGANIDDAGNRLSPCSDAGENTPTERKVDFLRVPIHTGEPIVDPLCDYRPHEVFERTYYMTREMDKGKEKDKEKDKPVEIDKEKDTCVEKEGSMPAEKLVHTCNLQVPGVVVTPNPQNVYSSASITIIDTDAQTTTEQSSSDDLGGEASDVLSAISNEECSVASEIFDKQDAGQTVGDIIQNMDASNFTHIDSPETSDETEAMPGESIMDDISSVLGHDITYALQDNTLTDDTTTLCSEHAGPPKPPRKKSLSALSRTQAHPRRRNSSPPRMARLARMDSDDNPQQFGFENIVFEIDNRCDDQKMREPPRYCSLAQFVEGNDIARQSFKRPKKRTSLKKPKPTTTTEIVSQQQLMLEQHRGGDNDSDYPEHEQTPTNKGANLLATTSEDELSTQTAIKIEIQDIDATVRNLNSSMKPNTILTTSTSPTKKSGHGQDVKRITFDESCKKESFDDVNPNYPQISVVVRPPTPLRGDCIKPTVSLLPVSSGGAMTVSMTCSGMLGVRAMNASEIRRHSSHAPGLAVREFDKDKDRRHSGFNPNQLTLDPEHARFLSSSPAASRRISCGSLFKKNKKIGTKRSYGLFSVRFFVVAEPDFRLATLALIRPLIPLVSQSKIPGRGLRCSGSGPSPLPLF

SEQ ID NO: 20905 - DNA, 3259 bp, DROSOPHILA
ggtctgtcccccagcggcgtctcctgctgtcccaggcgttcctccaaatgggtgacaagcgaaaagattccgaagaaccgcgcctcctccaaaacacccaacacactgatgttcgaatcgcatacgaattgtccgtggcggaggtagttgatgatcggctcgaaatatcgaggacttcgatcaatcaggtatgctccctgctcgtcacgctcgctgggcttcatgctgccattttgcaggaacatcctagcaagcattgaatccggttctctgcccaccagagtgtcgatggtagtggcgtagatttgtccacccacgttcagtttgacccaacgattgggagcgaatccgctagcggcgacgaaatcgccggctgccggtgcggcgtcgtcttttctggctccggaaccactctccttcagatcactattcatttgattgggaagtttaaaaaatttccacaatgcctggcaattctcagctgctttatcttcccgttcttcccccgtcattccattaaagtcgtcgattagggctgttcacacgaggccgcaacagcagcagcgttacatttaatagttgtgtgaattatgagatattggtgaatttagctaataatttaaattaataatttaacgaagagaagaaatagctcaaataaacaattatcagaaaactggatatgtcttatcttattactgtccattagctacaaaacatattattatttgaaatttaatattcatataacgatgatttaatattcatataagatggtataaaataacaagcgaattgaattatgaagaaccaattttcagatgtgaaaataaaaatatttgtggacattggacattgcaagcagaaaactattaaaaccataaaaggtgttttacgaatgcattttaaattaccaattgattggttagaagtgtaaaccctcaatttttgttttgacattgggcgcctgtgcaaagagtgttatagttggcaatcgacaccgatagtttgtcatcgggaagctggtatatgtaaatacaaaataaattataaaaattggcttccacataattgagaaggtcgctgaaagcgtacgaataaaccccgcaaataaccaaatgtctgccgccgagacaggtccaatagccagcggcagtgcggtgtccactggacagcgcggtgtcagccgagtacttgccaagttgtcccagtctctggcaggaggagaattctatgaagcgcacatgatgtataggacgctgtattttcggtagactatttgtataatccgtgcaaggaaatgcaatccaataagaaattcgattccttaggtatacggcgcagaaacgctatcaggactgcctggaactgctctttgatggagcacagcagcttattgccaaggaacaggaaagcagcgccgcggacctatgtctccttctggtggacacgttagagaagcgaggaccacaggcggaagataccgacaacttcctgtgggttccacgcctaggggctttgatccgcggccttaactccgcgactgtagagcgcgaaacccttattgtgagtctttgacattattaaacgcgacttataccggcaatgaaattttttttcctttagcaacggaccattaagtggagcacggccttgcatggccagtatggccacccagtgctccataagttaattgcgcacgtgttttggaccgagggcaacattgagtcggctcgtcaccactatctactctgccaggatggcagcctatgtgggcgagtgctaattgaaatcagccagagcaggggcttccagggcgagatggacttgtttctggtacaagctgtgctgcagcagctatcccttaaggatcggaaaactgcagaggacacgttcactgagtacacacgctaccacgccaagctgcttaagcatgagttcccctataaggaaccgctggtcaacttcttgtacttcctattccgtcttattgacgcgaagcgtgtggctgggtttcgggccttacgcaagctttacgatccatccctaaagcgcgacacgtcttttctaaagtacgtagccaagattggggtgctgtatttcgacgagcatccggaggctgctcattctggcccgcccgggttgggcggaatgtttggtgacatattcaatcgccttatggcgggctttgaggaagatgatgcggacgatcatgacacgaccctgaggcggcaaaacgagaataacgaactggaatagcatgtatgcattaatgaagcataccgaagagggatcctttgttgctggtctttttggttgctcaaagtcaatgaagttctttgccacaaaatcatcgggctattttgttataactttaaattgctgtatgctaaataattttaaataagcgtatggtcttgattatgcaaattataaaaaaatagttattcaaacaaaaatcactatgacaagttctcaaaaatcttgttttgggaatatcttttgaactggtaattggatttttgtgcttttgtagtgcttgcctcctacgcacaatatccgggtgcgcttcgtcacaacgtgaaaatacatcgcgatacatcccatagtcgacatttcgaggatgcaattaaaatgggaaaaaattgtaaagaaaaattaattaattgaaatatttgaaaagttttataattttataacatttgtatttccaaaaataaataaccagcatcgaaagtcgacattgaatatgcgggatcaacccggcttgtaacataaaagcagaatcccttatttaggtgtagtataatttgttctcatttccctccgtttttgtgttattctgtattggcggaagaattcagaaaagttgtttttccaaatttaaattatgtatattttaagtcagtagtggactaggtagtagaattcgaatacgtgtgaatatttcgtaagtaggtcaatcgtttttaaaaattatacaatgtatctaacttgtccttctggaatcgacggcttaaaaataatacgacgaaatcccaaaaaaatatttatgttgcgatataagtgtgaccagcacaagggtaagttagcgtcgacctggaaaatacaatctgagatctggtccgtccgaaaaatcattgaaagtgccctggtagaataaatcagattgggtttatttagttagttttattttcgttgaaccacccaaaataagagtaaagttgagaaacgctcagaattaaagccacaaccttta

SEQ ID NO: 20906 - DNA, 1138 bp, DROSOPHILA
ccgatagtttgtcatcgggaagctggtatatgtaaatacaaaataaattataaaaattggcttccacataattgagaaggtcgctgaaagcgtacgaataaaccccgcaaataaccaaatgtctgccgccgagacaggtccaatagccagcggcagtgcggtgtccactggacagcgcggtgtcagccgagtacttgccaagttgtcccagtctctggcaggaggagaattctatgaagcgcacatgatgtataggacgctgtattttcggtatacggcgcagaaacgctatcaggactgcctggaactgctctttgatggagcacagcagcttattgccaaggaacaggaaagcagcgccgcggacctatgtctccttctggtggacacgttagagaagcgaggaccacaggcggaagataccgacaacttcctgtgggttccacgcctaggggctttgatccgcggccttaactccgcgactgtagagcgcgaaacccttattcaacggaccattaagtggagcacggccttgcatggccagtatggccacccagtgctccataagttaattgcgcacgtgttttggaccgagggcaacattgagtcggctcgtcaccactatctactctgccaggatggcagcctatgtgggcgagtgctaattgaaatcagccagagcaggggcttccagggcgagatggacttgtttctggtacaagctgtgctgcagcagctatcccttaaggatcggaaaactgcagaggacacgttcactgagtacacacgctaccacgccaagctgcttaagcatgagttcccctataaggaaccgctggtcaacttcttgtacttcctattccgtcttattgacgcgaagcgtgtggctgggtttcgggccttacgcaagctttacgatccatccctaaagcgcgacacgtcttttctaaagtacgtagccaagattggggtgctgtatttcgacgagcatccggaggctgctcattctggcccgcccgggttgggcggaatgtttggtgacatattcaatcgccttatggcgggctttgaggaagatgatgcggacgatcatgacacgaccctgaggcggcaaaacgagaataacgaactggaatag

SEQ ID NO: 20907 - protein, 339 aa, DROSOPHILA
MSAAETGPIASGSAVSTGQRGVSRVLAKLSQSLAGGEFYEAHMMYRTLYFRYTAQKRYQDCLELLFDGAQQLIAKEQESSAADLCLLLVDTLEKRGPQAEDTDNFLWVPRLGALIRGLNSATVERETLIQRTIKWSTALHGQYGHPVLHKLIAHVFWTEGNIESARHHYLLCQDGSLCGRVLIEISQSRGFQGEMDLFLVQAVLQQLSLKDRKTAEDTFTEYTRYHAKLLKHEFPYKEPLVNFLYFLFRLIDAKRVAGFRALRKLYDPSLKRDTSFLKYVAKIGVLYFDEHPEAAHSGPPGLGGMFGDIFNRLMAGFEEDDADDHDTTLRRQNENNELE

SEQ ID NO: 20908 - DNA, 7062 bp, DROSOPHILA
gggaaagtggctgcaagggggtaagctccattagttatggaaatgtgaacatatgcagctctgagaaattcacaagtcactgttgccgttgccgaagaagaagcctccaccatgaatccagaccatcacgggtaaaggagtccgcgtacttttgactttaggtgcatatacattaaggaaaaggcagtcctcggagccggccacctccaaagtaaacggatctcgctggtaagacacgttgccctccttgctgcagtccagctcctgcttttgaaagcgctccaatggccgcgggctctgacattccaggtacgaaattagttacatgtgcatctcaaagattatcgtaaacttacgcggaaacgaagctctcccactggtggttccgcgtagggaacacccaggaaactgttgtactccaatccattgaccagcttcttttgccggcccaccaaaacgccttgtttcactggcactttcacctacaaacaagtaattgaacaattttgttgcgatttggaagcgcactcattaccttcatgctgctgcaaaacctggtaaagattagtcttccacacggacgaagaagcattgtgaaatcagcccgttacgggtttccttaacaatctaatcggcaattattcggcaatctcaaaacctgaatctgaaacactgaactttgttcgtcgaaatcagctgtttgaggcgcttaacccttagctggtgctgcatgagtgattttcgacgtcaattagttcaagttgtaaatagaaaatataaacatttaatttactttaacttaaagctctaattaaaagatgtaattttgagtactggagaatttcttgttaatgtcaaaaaagtaactcatcgcaatttccctttacttaaaaacgttaagaacaacaaaataaaactgccaactttacacattaaggttacatttaaaatgtttctaatttttatttgactagttccattgcataaacttaaatacatgttcatttatgggtttccattttacttatcgaatttttatcttgtgttttaaatgaactcgtgtccgtattttggtccacgtccggcggtcgagctgtccgcttgggattggagaaattggtgtttagtcagaaggacccagggaaggatccaacttgagaaaggtttgagctttctccgcctccaagcaggatgcacaactcaccgaggggcgtcgacgaacgtcgcgagtcatatatagatgcgcatctttatggtaaggtatggttttggtaaggtaaggtagggtataataattgttaattaactttagtttaagcatagttcacaccaaaagtcggaaacatttacacttatgtacacatttaacacacatacatccaacacttaataaacatttatatatatgtagaatatgtggtaatagtaatatttagaaaacattgaaagcattccgtcaatcctccttcggagaatgccatcatattccattttcgagactcttttagccatggtttcttgttttacttgttgcttgtccgtcgcggttgctttcattaaaataagggccacaaaaattgtgattacaaatagtaaattggtgttttgttcttcatctccatcgttttgtcgtcaaaaagttgttgatcatggttttcgctcgcttttaaaatcgcctcaacgccagtgtgcgtttcaggtagaggcaaatggcccgatggatgagctcatactgctccgagttctggaccatcccgccccgctgcaggcgaagattgcaaacgatgcccaggacgtccacgaaaatgtccggcatcttgggcagacggtcaaaggatggcggcgtcttaaccgcctccgcatcgcgatgatccagaatgtggctgatgtgccggatggtgttgcaagtaaaactgctgtcgctgtccgttgggttatggtactcctctgtcgagctgctggtcagcgatttggtgagcattcctgtcagcgagtaggccaacgactgccgcaactggcgcactgcattcaggatggccgtgaagcaaccggtgcgcccaattccagccgagcagtggatgacgggaaggggctggactgcattgaagatgtcctgctggtagatctccagccgctgagcagccaggtgggcattcctctcgctcctggtgtcatcgtagatgtcaaactccgactcacactttccaaggttgagtacatgcaagcaggtgtccagcagcgtgttgatgtcccgaggcgagtgatgatccggccagtcgggataccaatagtggtagcagtagattttctgcaggtggtagctagcactctgtggcacacgaatgcaatagagcagcaccagctttctcaccgagtaaccatttcttcgcacaatgccgacgtttttaatgaggaagaagcttccctgggcgggcaaagcctccagcagatccccttccagcgtcaccttcaccgactccacgcctatgtgccggccacttatctcatagtcgatcgcatccgaggaagccaccacagtgtccggcacaaaggtgggcgttaaataccgatcgaagtaatcccgggcagccgcactcagctgaaacacttcacacttggcggccaccgcgaagatctcattcaattcgatggggaagtagacggcgcacttctgccggttcgcttccgtgaagtttgtgagcatgacaatcttctggaagtactgctgcaggatttgctccctgtcaacgtgaggactgctgctgctgcctccatccacgcaccgtcttatgtagcgctgcgtgttctggtatatcataagccagaactcgaagattgtattgggcagtggaccctgcgtggccacatagcacttcgacacgtagtcgggtccctgaaatgaaggaaatatatacattactttcattggatttgcgcttagttccattaccttgatgtaattggcattaatgtagggcaagtcctcgctagcggtcacggagctggtccgttttatttcccccagcaagctagtcagctcgctggactcggattcgagtagcacgcgagagttctcgtttggcaagatagtcttgtagcgattttttgtctgcgagccgaagaccattggcttctcttggtgattgagcggcaggtcccagaactccttgtgcagatcccgaaagattctcttttgttcgttttctttcagttccggtattggttgcgccatcctactaaccactgtctggtaggacgcgagcagttcactgtcctccgagctcgggggcaccatatccgtgggtgtctccacatcccgtgcgttggagcccagcaccggcggctgctctatgatgttcctattcgtctggtagctgtgatcgaacacgtagttcagccggataagatcaaactgattaagtggattggaggcgctctgcagcatctgtatgctggccaagtagatcttgaactcctcgctagtcgtttggggcgacagaggacgggtcataatgttgcgtacggtgccagcgcaagtgcacgtcgcgccaatggcctgatcttccctcaccgaatcctgctgaggattgggttgcaagtccgaggcggatccgaaacatacctgcccgaagaacttttggctattggctttactgctgttcaagttctcagtgctaaagaatttgcgctgatgcggggcttggttggcggcagcacaactgcaaaccgtgactttcggttgcacgatgtccgtcatctggatctcggtacctgctgctcctcccagtatgctgcccatgttgagagtgaggctttgattggagccacgacgttctaaaagtcctcgtttcggagtaggtacattggatccagagcccgatcccgagccggtggaattggttcgcatattgagtcggttgtacttttccgcacttaacattgcctgttgctgttggagctgctgcatggagtttagatctccacacgatgttgtagtgtgccccgtcttcagggtgatactgtgatttgatccccgcctcctgaacaacccctgccgactaccctggctgcttcccagcagatgtgactgtggcaattgatccgctcgaatttggctggcggttcccgcatccaaattgcagctggacttggagttgagtattgagcccaggctatagttggaatgacttagtccactgttcattaggttgccacaagagctgtgcaggttgagcgttaaactgtgattggatccccgacgctgaaggagattcatcgatgatgtagacactgtggtctttgcctggagtgtcggcatcggcaaatccattgacttctgcttgaaaggcgattccttaggaccaccgccagaggaggagaactccaccagggtaaggcactcgggaagcgtttttaaatttgtgctggacgagtgcagtaactgattgtgcttgtgggcgcttctcggcgctaggcttgcgcctattccaaacttcgagccaccgtccacgctacaggcggacttcagttcaaagtcccccaaactgggggttaaactggcgtccgagtccaaggagctttgtgtcgtggagctgcagtgtgtcggttgcacctgatatgggttctgcttgcggtggtacataagccagtcagtggtgttgattcctggtgactttctgcgcggcgttcgtctttgattggccaagcttaggtgactatccagtcgcgagagcgatgttgagtggatagcggatgcgggctgttgaagatgaaggtgatggtggataacacttgtcgatggctggctctgtcctgtctccatgtcatcacaactgccatgagattcggttatgttgtgcaccacgattgacagttccgattcgttggcagccgagtccagcgagcgggccttctccttggtgctcttgatagtcggtgtcttgggcttgggcaatggtgatggctggctcgagttttttatgggcacgtccgtgatgcgaatggtgagattatttttattcttgcggttctttcgcccttccgatttttgttgctgctgctccggcggctcggccaacgcaggactacgatcccgacgtgtagcttcctctaaacagactgtatccatgggcgcatcctgcacgacatgatcgatctcggggaagcgaaagaagttgccgttcttgtagccggccgagttaataatgttcaggggtgaaccggacacgtttaggttgttgatggaggatagtagtttcggggagtagcttaggcgactggcctccagtcccggcgtcgtggaggactcatccttaaacaggatggtgggtgagttgtgctcgctcttcgacaagtacaagctgttctctaggtcttggtcgactgacccgcccttgggcatagtgttctccttgtcgatgccacggccactgacccgctcctcgccgctggaggtattaatatgcggcgagcaggatcggcgatcatactgtgataacctcttgaacttgcggcctaaagtgggagactgtgagctggatggatggtggacgtgggctgctggatgggggctggtaatggtgaactgccggggggtgaagacctcctcctcctgatcctcgtgctcgggaaagcccggaaccccgcccccaacctccaccgtgggcgacggaaactcgaaggacgtctgcaggtactcgaggggcgtaaagtagggtgtactcttgttgctctccgcatcctcgccagcttcaagtggggtcgtgtcggagggggccggcgtgggtgggacggggggtctgtgggtaggggtactcaatggtgcattctccttgttgttgtttcgtagcttgtccatgatacacacacacaattgctgaagcggggcgatcgcagcgcagtcgctccgcccgtttagtgtcttgtcctcactcgatcggcattataactatctcgcccgcacagttagcacttccgaattggacgcaaatcatggggaaaagagcgttttcttttcacaacattttcagagctaaagcatggagggctaccagaccgcgtatgtaatcgatccggcaatgccttcattgcttaccgtgctgccaggccgcagactaactgcaccaagacctggcaacgttgtacctaatttaaccgcatttttcaagtgtcttttaaaataaaaagaaagaataggttaacagatctagtgtttacatcaaggagttgcagaatttgtaatgcagatgttgtacacgggcgatagttaattcaatcgatcaactgagatggtatcagacaattatattttgcatgcatccagaaaaattgttgtaaaagatcacagacttagttctaaatagtatttcaacctacctgtatttttgtttatgaaatcactacaaagttgtgaacaatttagaagcaacaacgtagtgttcctattaccaccgttccgtttacctcacagttgcacgttgctctttggcacgcttttatctgtgcatttgcttggaaataattaattgagttaggcatttaaatccttttgtgtactttagacttatttaaagaccttttagattggtttaatttgccgaaagacgaaaacaaacaaatttgtgcgacagctgacttcattatttcaacgacaatagcaaaaggccacactaattttgcgaaaagcgcgtggtatttaataccttatttatttgctttatttcgccattagaagtaagtttcgctgtgtcgaaaatctagcaaagaaagccactggatcaagacctagtgcatccaaaacccagtaattcatttcgatgtctgagggcagcggaagcgagaatgcggccgcagcagaggctgcggccgaggcagaggccgcgactgaagcggcactgatggctgaagctgtggctgtggcctaccagagcgacgaggaggagcagccagaagccgaggatatgccggagcaggctggcgataaccaggaagaggacgccgctgaacaacaggatgggggggaaccagaggccgacgaagacgctgatgctgacgacgccatga

SEQ ID NO: 20909 - DNA, 5005 bp, DROSOPHILA
atacgcggtctggtagccctccatgctttagctctgaaaatgttgtgaaaagaaaacgctcttttccccatgatttgcgtccaattcggaagtgctaactgtgcgggcgagatagttataatgccgatcgagtgaggacaagacactaaacgggcggagcgactgcgctgcgatcgccccgcttcagcaattgtgtgtgtgtatcatggacaagctacgaaacaacaacaaggagaatgcaccattgagtacccctacccacagaccccccgtcccacccacgccggccccctccgacacgaccccacttgaagctggcgaggatgcggagagcaacaagagtacaccctactttacgcccctcgagtacctgcagacgtccttcgagtttccgtcgcccacggtggaggttgggggcggggttccgggctttcccgagcacgaggatcaggaggaggaggtcttcaccccccggcagttcaccattaccagcccccatccagcagcccacgtccaccatccatccagctcacagtctcccactttaggccgcaagttcaagaggttatcacagtatgatcgccgatcctgctcgccgcatattaatacctccagcggcgaggagcgggtcagtggccgtggcatcgacaaggagaacactatgcccaagggcgggtcagtcgaccaagacctagagaacagcttgtacttgtcgaagagcgagcacaactcacccaccatcctgtttaaggatgagtcctccacgacgccgggactggaggccagtcgcctaagctactccccgaaactactatcctccatcaacaacctaaacgtgtccggttcacccctgaacattattaactcggccggctacaagaacggcaacttctttcgcttccccgagatcgatcatgtcgtgcaggatgcgcccatggatacagtctgtttagaggaagctacacgtcgggatcgtagtcctgcgttggccgagccgccggagcagcagcaacaaaaatcggaagggcgaaagaaccgcaagaataaaaataatctcaccattcgcatcacggacgtgcccataaaaaactcgagccagccatcaccattgcccaagcccaagacaccgactatcaagagcaccaaggagaaggcccgctcgctggactcggctgccaacgaatcggaactgtcaatcgtggtgcacaacataaccgaatctcatggcagttgtgatgacatggagacaggacagagccagccatcgacaagtgttatccaccatcaccttcatcttcaacagcccgcatccgctatccactcaacatcgctctcgcgactggatagtcacctaagcttggccaatcaaagacgaacgccgcgcagaaagtcaccaggaatcaacaccactgactggcttatgtaccaccgcaagcagaacccatatcaggtgcaaccgacacactgcagctccacgacacaaagctccttggactcggacgccagtttaacccccagtttgggggactttgaactgaagtccgcctgtagcgtggacggtggctcgaagtttggaataggcgcaagcctagcgccgagaagcgcccacaagcacaatcagttactgcactcgtccagcacaaatttaaaaacgcttcccgagtgccttaccctggtggagttctcctcctctggcggtggtcctaaggaatcgcctttcaagcagaagtcaatggatttgccgatgccgacactccaggcaaagaccacagtgtctacatcatcgatgaatctccttcagcgtcggggatccaatcacagtttaacgctcaacctgcacagctcttgtggcaacctaatgaacagtggactaagtcattccaactatagcctgggctcaatactcaactccaagtccagctgcaatttggatgcgggaaccgccagccaaattcgagcggatcaattgccacagtcacatctgctgggaagcagccagggtagtcggcaggggttgttcaggaggcggggatcaaatcacagtatcaccctgaagacggggcacactacaacatcgtgtggagatctaaactccatgcagcagctccaacagcaacaggcaatgttaagtgcggaaaagtacaaccgactcaatatgcgaaccaattccaccggctcgggatcgggctctggatccaatgtacctactccgaaacgaggacttttagaacgtcgtggctccaatcaaagcctcactctcaacatgggcagcatactgggaggagcagcaggtaccgagatccagatgacggacatcgtgcaaccgaaagtcacggtttgcagttgtgctgccgccaaccaagccccgcatcagcgcaaattctttagcactgagaacttgaacagcagtaaagccaatagccaaaagttcttcgggcaggtatgtttcggatccgcctcggacttgcaacccaatcctcagcaggattcggtgagggaagatcaggccattggcgcgacgtgcacttgcgctggcaccgtacgcaacattatgacccgtcctctgtcgccccaaacgactagcgaggagttcaagatctacttggccagcatacagatgctgcagagcgcctccaatccacttaatcagtttgatcttatccggctgaactacgtgttcgatcacagctaccagacgaataggaacatcatagagcagccgccggtgctgggctccaacgcacgggatgtggagacacccacggatatggtgcccccgagctcggaggacagtgaactgctcgcgtcctaccagacagtggttagtaggatggcgcaaccaataccggaactgaaagaaaacgaacaaaagagaatctttcgggatctgcacaaggagttctgggacctgccgctcaatcaccaagagaagccaatggtcttcggctcgcagacaaaaaatcgctacaagactatcttgccaaacgagaactctcgcgtgctactcgaatccgagtccagcgagctgactagcttgctgggggaaataaaacggaccagctccgtgaccgctagcgaggacttgccctacattaatgccaattacatcaagggacccgactacgtgtcgaagtgctatgtggccacgcagggtccactgcccaatacaatcttcgagttctggcttatgatataccagaacacgcagcgctacataagacggtgcgtggatggaggcagcagcagcagtcctcacgttgacagggagcaaatcctgcagcagtacttccagaagattgtcatgctcacaaacttcacggaagcgaaccggcagaagtgcgccgtctacttccccatcgaattgaatgagatcttcgcggtggccgccaagtgtgaagtgtttcagctgagtgcggctgcccgggattacttcgatcggtatttaacgcccacctttgtgccggacactgtggtggcttcctcggatgcgatcgactatgagataagtggccggcacataggcgtggagtcggtgaaggtgacgctggaaggggatctgctggaggctttgcccgcccagggaagcttcttcctcattaaaaacgtcggcattgtgcgaagaaatggttactcggtgagaaagctggtgctgctctattgcattcgtgtgccacagagtgctagctaccacctgcagaaaatctactgctaccactattggtatcccgactggccggatcatcactcgcctcgggacatcaacacgctgctggacacctgcttgcatgtactcaaccttggaaagtgtgagtcggagtttgacatctacgatgacaccaggagcgagaggaatgcccacctggctgctcagcggctggagatctaccagcaggacatcttcaatgcagtccagccccttcccgtcatccactgctcggctggaattgggcgcaccggttgcttcacggccatcctgaatgcagtgcgccagttgcggcagtcgttggcctactcgctgacaggaatgctcaccaaatcgctgaccagcagctcgacagaggagtaccataacccaacggacagcgacagcagttttacttgcaacaccatccggcacatcagccacattctggatcatcgcgatgcggaggcggttaagacgccgccatcctttgaccgtctgcccaagatgccggacattttcgtggacgtcctgggcatcgtttgcaatcttcgcctgcagcggggcgggatggtccagaactcggagcagtatgagctcatccatcgggccatttgcctctacctgaaacgcacactggcgttgaggcgattttaaaagcgagcgaaaaccatgatcaacaactttttgacgacaaaacgatggagatgaagaacaaaacaccaatttactatttgtaatcacaatttttgtggcccttattttaatgaaagcaaccgcgacggacaagcaacaagtaaaacaagaaaccatggctaaaagagtctcgaaaatggaatatgatggcattctccgaaggaggattgacggaatgctttcaatgttttctaaatattactattaccacatattctacatatatataaatgtttattaagtgttggatgtatgtgtgttaaatgtgtacataagtgtaaatgtttccgacttttggtgtgaactatgcttaaactaaagttaattaacaattattataccctaccttaccttaccaaaaccataccttaccataaagatgcgcatctatatatgactcgcgacgttcgtcgacgcccctcggtgagttgtgcatcctgcttggaggcggagaaagctcaaacctttctcaagttggatccttccctgggtccttctgactaaacaccaatttctccaatcccaagcggacagctcgaccgccggacgtggaccaaaatacggacacgagttcatttaaaacacaagataaaaattcgataagtaaaatggaaacccataaatgaa

SEQ ID NO: 20910 - protein, 1377 aa, DROSOPHILA
MDKLRNNNKENAPLSTPTHRPPVPPTPAPSDTTPLEAGEDAESNKSTPYFTPLEYLQTSFEFPSPTVEVGGGVPGFPEHEDQEEEVFTPRQFTITSPHPAAHVHHPSSSQSPTLGRKFKRLSQYDRRSCSPHINTSSGEERVSGRGIDKENTMPKGGSVDQDLENSLYLSKSEHNSPTILFKDESSTTPGLEASRLSYSPKLLSSINNLNVSGSPLNIINSAGYKNGNFFRFPEIDHVVQDAPMDTVCLEEATRRDRSPALAEPPEQQQQKSEGRKNRKNKNNLTIRITDVPIKNSSQPSPLPKPKTPTIKSTKEKARSLDSAANESELSIVVHNITESHGSCDDMETGQSQPSTSVIHHHLHLQQPASAIHSTSLSRLDSHLSLANQRRTPRRKSPGINTTDWLMYHRKQNPYQVQPTHCSSTTQSSLDSDASLTPSLGDFELKSACSVDGGSKFGIGASLAPRSAHKHNQLLHSSSTNLKTLPECLTLVEFSSSGGGPKESPFKQKSMDLPMPTLQAKTTVSTSSMNLLQRRGSNHSLTLNLHSSCGNLMNSGLSHSNYSLGSILNSKSSCNLDAGTASQIRADQLPQSHLLGSSQGSRQGLFRRRGSNHSITLKTGHTTTSCGDLNSMQQLQQQQAMLSAEKYNRLNMRTNSTGSGSGSGSNVPTPKRGLLERRGSNQSLTLNMGSILGGAAGTEIQMTDIVQPKVTVCSCAAANQAPHQRKFFSTENLNSSKANSQKFFGQVCFGSASDLQPNPQQDSVREDQAIGATCTCAGTVRNIMTRPLSPQTTSEEFKIYLASIQMLQSASNPLNQFDLIRLNYVFDHSYQTNRNIIEQPPVLGSNARDVETPTDMVPPSSEDSELLASYQTVVSRMAQPIPELKENEQKRIFRDLHKEFWDLPLNHQEKPMVFGSQTKNRYKTILPNENSRVLLESESSELTSLLGEIKRTSSVTASEDLPYINANYIKGPDYVSKCYVATQGPLPNTIFEFWLMIYQNTQRYIRRCVDGGSSSSPHVDREQILQQYFQKIVMLTNFTEANRQKCAVYFPIELNEIFAVAAKCEVFQLSAAARDYFDRYLTPTFVPDTVVASSDAIDYEISGRHIGVESVKVTLEGDLLEALPAQGSFFLIKNVGIVRRNGYSVRKLVLLYCIRVPQSASYHLQKIYCYHYWYPDWPDHHSPRDINTLLDTCLHVLNLGKCESEFDIYDDTRSERNAHLAAQRLEIYQQDIFNAVQPLPVIHCSAGIGRTGCFTAILNAVRQLRQSLAYSLTGMLTKSLTSSSTEEYHNPTDSDSSFTCNTIRHISHILDHRDAEAVKTPPSFDRLPKMPDIFVDVLGIVCNLRLQRGGMVQNSEQYELIHRAICLYLKRTLALRRF

SEQ ID NO: 20911 - DNA, 3512 bp, DROSOPHILA
cattctggcccgcccgggttgggcggaatgtttggtgacatattcaatcgccttatggcgggctttgaggaagatgatgcggacgatcatgacacgaccctgaggcggcaaaacgagaataacgaactggaatagcatgtatgcattaatgaagcataccgaagagggatcctttgttgctggtctttttggttgctcaaagtcaatgaagttctttgccacaaaatcatcgggctattttgttataactttaaattgctgtatgctaaataattttaaataagcgtatggtcttgattatgcaaattataaaaaaatagttattcaaacaaaaatcactatgacaagttctcaaaaatcttgttttgggaatatcttttgaactggtaattggatttttgtgcttttgtagtgcttgcctcctacgcacaatatccgggtgcgcttcgtcacaacgtgaaaatacatcgcgatacatcccatagtcgacatttcgaggatgcaattaaaatgggaaaaaattgtaaagaaaaattaattaattgaaatatttgaaaagttttataattttataacatttgtatttccaaaaataaataaccagcatcgaaagtcgacattgaatatgcgggatcaacccggcttgtaacataaaagcagaatcccttatttaggtgtagtataatttgttctcatttccctccgtttttgtgttattctgtattggcggaagaattcagaaaagttgtttttccaaatttaaattatgtatattttaagtcagtagtggactaggtagtagaattcgaatacgtgtgaatatttcgtaagtaggtcaatcgtttttaaaaattatacaatgtatctaacttgtccttctggaatcgacggcttaaaaataatacgacgaaatcccaaaaaaatatttatgttgcgatataagtgtgaccagcacaagggtaagttagcgtcgacctggaaaatacaatctgagatctggtccgtccgaaaaatcattgaaagtgccctggtagaataaatcagattgggtttatttagttagttttattttcgttgaaccacccaaaataagagtaaagttgagaaacgctcagaattaaagccacaacctttaaccgaaaaggccaatcaccgcacaacaaagccgagtgagagcaaagtaagcaggaccttaaggttgggcctctgtgcatcgataaacataggacattgtgttatactttcagcgaaatggccgacaaagctgcagcgccctctgtggactgtgcggcgccatctgtggactgtgcgacgcctgcaataccagccgtggaggatcacaccacgctgaccgttccacctgcttcagcgaacaaagccacggacgcttccacttccactgccgtccaagtggccgtcgatgggggggagccggaacgctgctgctggatctgcttcgccaccgatgaggacaaccgtctggcggcgtgggtgaagccctgtcagtgccgcggcaccaccaagtgggtgcaccagagctgcctctaccgctggatcgatgaaaaaacccagaagggtaacgctctacgcactgtatcgtgtccgcagtgccaaacggagtacatcatagtgttcccgcagatgggcaagcttggaggtgctttagaggcaatagataacctcatcaagcgcctgagccccttcctggcggctggtttcttcgtgggctccctctactggacagcagtaacttacggagcagtcacatttttacaggtacaacctatcatttttaatcagttgtcatgctaagagaattaattgtctgtagattgtcggacatgagcacggcatgtccataatggagtctggagatccgctcgttctccttattgggttgccggctattccagtggggcttgtgcttggtcgattgattcgctgggaggatgcattgttgcgtcttattcgaaaccgcgggacggtggtgcggaagtttccttttgtaagccttatttatccgaacctgtaagtgcatcaacaatgtcagggttagcagacttttattactttacatttaagcagcagccaggaagaggaacagcaaagcatcagcaatccggccacaccggctctctctgaccctgtctcagccacgagggtcttctgcggcgctctcttgctgcccaccatatcgtcgatcgtgggacgtattctctttgacacggttgataacacattgcatcgtactctgcttggaggtctgacctttataacggtcaagggaattctgaaaatttatttgaagcagaaacagtacggccgccgcaagaagcgccgaattgtggactacactgaggaaaatattcggaacttcatgcaccgcaacaataactcggcagcagcggcgcggcaggaaaggctgcccgagcagaggccagtgccaccagcggagcgaagggacgctgtaatcacacgtcaacgcggcgatagtggtggtagcgttgtctagaagtaattggattcaactgtagggccacttattttctacgagttatggtttgttttaagttaattgttttacctcttgcactttcaagacgctcacatcaccacctaatttaggtggacaaaaatttttaattgtctgcagataacaaagctaaatttattgttaaagtacactgtttaatggccggaaaataaatgtacattaaaacgctgacgctgactagccctggaaaataatttgtgaaaaatccgccatgtccttgcgtagatataacattgatatagaagataaaggatttatatatgtatatgcttccacacctttgaatttatacgttaccttttttataaattaaaaagttgcctctgtaaataaataataccctcggctgtgggtgaagtttaactatttagtatattgtacagaaaagctgtagtgatcattcattgctatccaaattggtggtgtcagttttgattgcaggtgctagttacgaaggtggaacaaatgaatgtgttaatgcgtttactaaatcccttaggccctcgccgctgctgagtcactaagattcttgacaatgaatccgcacagtaaccgcccggctgacaaagcttgtttttacatacgtagaagatgtgatttcttacatctggtcaagtttgtctgaatcatatacaacacatgtacccttcctttaacttggctgcgaagttcgaacgatcgagcgaatcaatatgggaaaaagcgttcagtttggcttatgcgtttagtagctaaagcgaagacaatatatactgttaaagaactgtccgaagtgaacgctccaaaaagcgatataatcatttataattgttagcaagtttttgtttgttttgtctatttgcgcttatcaccgggagcacaagtaagatacgtgtgtgcatttggtagatacgctgaagtgcgatgagtgatcacgattccgcgacaaagactgtcagatacccttccatgtatttac

SEQ ID NO: 20912 - DNA, 1333 bp, DROSOPHILA
tccgtccgaaaaatcattgaaagtgccctggtagaataaatcagattgggtttatttagttagttttattttcgttgaaccacccaaaataagagtaaagttgagaaacgctcagaattaaagccacaacctttaaccgaaaaggccaatcaccgcacaacaaagccgagtgagagcaaacgaaatggccgacaaagctgcagcgccctctgtggactgtgcggcgccatctgtggactgtgcgacgcctgcaataccagccgtggaggatcacaccacgctgaccgttccacctgcttcagcgaacaaagccacggacgcttccacttccactgccgtccaagtggccgtcgatgggggggagccggaacgctgctgctggatctgcttcgccaccgatgaggacaaccgtctggcggcgtgggtgaagccctgtcagtgccgcggcaccaccaagtgggtgcaccagagctgcctctaccgctggatcgatgaaaaaacccagaagggtaacgctctacgcactgtatcgtgtccgcagtgccaaacggagtacatcatagtgttcccgcagatgggcaagcttggaggtgctttagaggcaatagataacctcatcaagcgcctgagccccttcctggcggctggtttcttcgtgggctccctctactggacagcagtaacttacggagcagtcacatttttacagattgtcggacatgagcacggcatgtccataatggagtctggagatccgctcgttctccttattgggttgccggctattccagtggggcttgtgcttggtcgattgattcgctgggaggatgcattgttgcgtcttattcgaaaccgcgggacggtggtgcggaagtttccttttgtaagccttatttatccgaacctcagccaggaagaggaacagcaaagcatcagcaatccggccacaccggctctctctgaccctgtctcagccacgagggtcttctgcggcgctctcttgctgcccaccatatcgtcgatcgtgggacgtattctctttgacacggttgataacacattgcatcgtactctgcttggaggtctgacctttataacggtcaagggaattctgaaaatttatttgaagcagaaacagtacggccgccgcaagaagcgccgaattgtggactacactgaggaaaatattcggaacttcatgcaccgcaacaataactcggcagcagcggcgcggcaggaaaggctgcccgagcagaggccagtgccaccagcggagcgaagggacgctgtaatcacacgtcaacgcggcgatagtggtggtagcgttgtctag

SEQ ID NO: 20913 - protein, 382 aa, DROSOPHILA
MADKAAAPSVDCAAPSVDCATPAIPAVEDHTTLTVPPASANKATDASTSTAVQVAVDGGEPERCCWICFATDEDNRLAAWVKPCQCRGTTKWVHQSCLYRWIDEKTQKGNALRTVSCPQCQTEYIIVFPQMGKLGGALEAIDNLIKRLSPFLAAGFFVGSLYWTAVTYGAVTFLQIVGHEHGMSIMESGDPLVLLIGLPAIPVGLVLGRLIRWEDALLRLIRNRGTVVRKFPFVSLIYPNLSQEEEQQSISNPATPALSDPVSATRVFCGALLLPTISSIVGRILFDTVDNTLHRTLLGGLTFITVKGILKIYLKQKQYGRRKKRRIVDYTEENIRNFMHRNNNSAAAARQERLPEQRPVPPAERRDAVITRQRGDSGGSVV

SEQ ID NO: 20914 - DNA, 3949 bp, DROSOPHILA
tggcactccgagtgtgccgttagcaccatgcgcagctccaggggatcgcctagtatatgacgcgatcgatcgataaatatgtgcacgttgacgtcgcgatcacgctgatcgaagatcagacgtcccgccgggccatcaatggagatgtccgtgcaaatgcgttcgctgggcgagcgattgccgctgctgaactgaatgtagtcgatgcactccttggaaacggggtcgcgccgaaacttaagccgcgtaatgatagtgtaaatgccgcgtcgcggtcgctcgctggtcaccaccctaaactggcaatcgtacttaatcttgttggccgtatggccgtggggcagtgtcaaattccacatctgcgtcacgatcgctccggaggtgtcctcgaactccagccgcacagtcggatcgccacggaacggcttggccagcgtgtagaacagtttgtccgagcacatgttgtcctggagacgaactggatagtggaaaagctggttattagcatgcgcttgacaggaggatgcacgcactcaccgttcttgtaggcagtgcaaaaggccaccatcatggccagtggccagagtgacccaaatccgatgcagcacttgaccaacatgtcggcacctgacttttcgcgcgtcctcacgtcctgcgtgtatccttgctgttcccacgcgactgtgtccagctagattctcagcgtttgcatttgttgcaaaataagttagaaatttgtttattgcatttagtgtggtgtgaccgccgctggtctgcgcaaatataccaacattaagattattgataaaatataccgtacaggtctgaagactttttaaatacaaaatataccaaattattttgaaaaagtatgttttcaattttttctttatcacatatttttatatcttacaacttaatttaaccaaattcaaaacctgggaaaatgtttggaagcgagggagtattgctttatttagtttatcttagaaataatgagttaaagtttagctctcacagcttcgaaattttcgctcctgtatctccggtacatgctcctccaaaagtccattctttcgccatccggattgctgcacatcttcagctcccgatcgattagcaggcagtcgagttggatgggctcgccattgtgtggcttcttgactggtttccaaatgggcgaaggttttccatcgcgcgcgaagttcgcccacatttcacatagccgttccgtgaccatcaagtcatccctattcatctcggtctcgtcacctgccatctggaacaggtagcaaatatcatcggcatgagccactccacgcaggtcttcgttttggaagatcttcttgtacagattacgaccgcccacatagtccaagcgatagaagtacagaggagattgcgtttggcagctagcgtgaatctccactgcgcgctgcagatccatgctgaaatgatagtcggagaacaggtccaccaggttatccatgttttccttagacagcgcctgcccgttaaagaagaaggctcgtatgtcggaagcagcttcctgtgcctctggagcctgtggatctagcaccagattgcggggaaccaacctggccaagtcatcttcgtaggcctccagtttttgcttcgcctttactacaatagccaacccctcggcggagttgtaacccattatcactggcatactgccgaggcagtcttttttgtgcatcagctccatgatgtcctgctcaagaaaacgatccggactgctgctgtcctccactactggcttgaatgcaaagggcaggtgacgtcgtcgctcatcggggcttaagactttcaatgtgttagccaaaatggcagtgggtgttgccttctctgactgcaggaaggtcaaaagtgctttgctgtcgccgccaaaatcaccaccacccaggagttcagccagtcgtcgggtcttggcaggtgcctcgttctggaaaacccattccatgttcgctgttccactctgcatgatagccttgtggaatagtcgcttggcatgccgggcaaaagtgtgcagatgtactgaagaaccgcccgcactctcgccgaagagcgttacgttattcggatcgccattgaagctggctatgttctcctgcacccattcgagggccagacgttgatccttaagccccatattgccgtgtattccctcctcgggcagactaaggaaaccaagcgctccaagtcggtaattcagggtgaccacaatgacctcctgctccatgagcttggcgggaaagtggctgcaagggggtaagctccattagttatggaaatgtgaacatatgcagctctgagaaattcacaagtcactgttgccgttgccgaagaagaagcctccaccatgaatccagaccatcacgggtaaaggagtccgcgtacttttgactttaggtgcatatacattaaggaaaaggcagtcctcggagccggccacctccaaagtaaacggatctcgctggtaagacacgttgccctccttgctgcagtccagctcctgcttttgaaagcgctccaatggccgcgggctctgacattccaggtacgaaattagttacatgtgcatctcaaagattatcgtaaacttacgcggaaacgaagctctcccactggtggttccgcgtagggaacacccaggaaactgttgtactccaatccattgaccagcttcttttgccggcccaccaaaacgccttgtttcactggcactttcacctacaaacaagtaattgaacaattttgttgcgatttggaagcgcactcattaccttcatgctgctgcaaaacctggtaaagattagtcttccacacggacgaagaagcattgtgaaatcagcccgttacgggtttccttaacaatctaatcggcaattattcggcaatctcaaaacctgaatctgaaacactgaactttgttcgtcgaaatcagctgtttgaggcgcttaacccttagctggtgctgcatgagtgattttcgacgtcaattagttcaagttgtaaatagaaaatataaacatttaatttactttaacttaaagctctaattaaaagatgtaattttgagtactggagaatttcttgttaatgtcaaaaaagtaactcatcgcaatttccctttacttaaaaacgttaagaacaacaaaataaaactgccaactttacacattaaggttacatttaaaatgtttctaatttttatttgactagttccattgcataaacttaaatacatgttcatttatgggtttccattttacttatcgaatttttatcttgtgttttaaatgaactcgtgtccgtattttggtccacgtccggcggtcgagctgtccgcttgggattggagaaattggtgtttagtcagaaggacccagggaaggatccaacttgagaaaggtttgagctttctccgcctccaagcaggatgcacaactcaccgaggggcgtcgacgaacgtcgcgagtcatatatagatgcgcatctttatggtaaggtatggttttggtaaggtaaggtagggtataataattgttaattaactttagtttaagcatagttcacaccaaaagtcggaaacatttacacttatgtacacatttaacacacatacatccaacacttaataaacatttatatatatgtagaatatgtggtaatagtaatatttagaaaacattgaaagcattccgtcaatcctccttcggagaatgccatcatattccattttcgagactcttttagccatggtttcttgttttacttgttgcttgtccgtcgcggttgctttcattaaaataagggccacaaaaattgtgattacaaatagtaaattggtgttttgttcttcatctccatcgttttgtcgtcaaaaagttgttgatcatggttttcgctcgcttttaaaatcgcc

SEQ ID NO: 20915 - DNA, 1774 bp, DROSOPHILA
ttcagtgtttcagattcaggttttgagattgccgaataattgccgattagattgttaaggaaacccgtaacgggctgatttcacaatgcttcttcgtccgtgtggaagactaatctttaccaggttttgcagcagcatgaaggtgaaagtgccagtgaaacaaggcgttttggtgggccggcaaaagaagctggtcaatggattggagtacaacagtttcctgggtgttccctacgcggaaccaccagtgggagagcttcgtttccgcagcccgcggccattggagcgctttcaaaagcaggagctggactgcagcaaggagggcaacgtgtcttaccagcgagatccgtttactttggaggtggccggctccgaggactgccttttccttaatgtatatgcacctaaagtcaaaagtacgcggactcctttacccgtgatggtctggattcatggtggaggcttcttcttcggcaacggcaacagtgacttccactttcccgccaagctcatggagcaggaggtcattgtggtcaccctgaattaccgacttggagcgcttggtttccttagtctgcccgaggagggaatacacggcaatatggggcttaaggatcaacgtctggccctcgaatgggtgcaggagaacatagccagcttcaatggcgatccgaataacgtaacgctcttcggcgagagtgcgggcggttcttcagtacatctgcacacttttgcccggcatgccaagcgactattccacaaggctatcatgcagagtggaacagcgaacatggaatgggttttccagaacgaggcacctgccaagacccgacgactggctgaactcctgggtggtggtgattttggcggcgacagcaaagcacttttgaccttcctgcagtcagagaaggcaacacccactgccattttggctaacacattgaaagtcttaagccccgatgagcgacgacgtcacctgccctttgcattcaagccagtagtggaggacagcagcagtccggatcgttttcttgagcaggacatcatggagctgatgcacaaaaaagactgcctcggcagtatgccagtgataatgggttacaactccgccgaggggttggctattgtagtaaaggcgaagcaaaaactggaggcctacgaagatgacttggccaggttggttccccgcaatctggtgctagatccacaggctccagaggcacaggaagctgcttccgacatacgagccttcttctttaacgggcaggcgctgtctaaggaaaacatggataacctggtggacctgttctccgactatcatttcagcatggatctgcagcgcgcagtggagattcacgctagctgccaaacgcaatctcctctgtacttctatcgcttggactatgtgggcggtcgtaatctgtacaagaagatcttccaaaacgaagacctgcgtggagtggctcatgccgatgatatttgctacctgttccagatggcaggtgacgagaccgagatgaatagggatgacttgatggtcacggaacggctatgtgaaatgtgggcgaacttcgcgcgcgatggaaaaccttcgcccatttggaaaccagtcaagaagccacacaatggcgagcccatccaactcgactgcctgctaatcgatcgggagctgaagatgtgcagcaatccggatggcgaaagaatggacttttggaggagcatgtaccggagatacaggagcgaaaatttcgaagctgtgagagctaaactttaa

SEQ ID NO: 20916 - protein, 562 aa, DROSOPHILA
MLLRPCGRLIFTRFCSSMKVKVPVKQGVLVGRQKKLVNGLEYNSFLGVPYAEPPVGELRFRSPRPLERFQKQELDCSKEGNVSYQRDPFTLEVAGSEDCLFLNVYAPKVKSTRTPLPVMVWIHGGGFFFGNGNSDFHFPAKLMEQEVIVVTLNYRLGALGFLSLPEEGIHGNMGLKDQRLALEWVQENIASFNGDPNNVTLFGESAGGSSVHLHTFARHAKRLFHKAIMQSGTANMEWVFQNEAPAKTRRLAELLGGGDFGGDSKALLTFLQSEKATPTAILANTLKVLSPDERRRHLPFAFKPVVEDSSSPDRFLEQDIMELMHKKDCLGSMPVIMGYNSAEGLAIVVKAKQKLEAYEDDLARLVPRNLVLDPQAPEAQEAASDIRAFFFNGQALSKENMDNLVDLFSDYHFSMDLQRAVEIHASCQTQSPLYFYRLDYVGGRNLYKKIFQNEDLRGVAHADDICYLFQMAGDETEMNRDDLMVTERLCEMWANFARDGKPSPIWKPVKKPHNGEPIQLDCLLIDRELKMCSNPDGERMDFWRSMYRRYRSENFEAVRAKL

SEQ ID NO: 20917 - DNA, 2799 bp, DROSOPHILA
cagtccttgtactttataagattgatatagacttctggatactccgaacagccgcctttcgttataatgccgaccagtttgccattgtggaccacaggtgatcccatcgctaaagagcaggcttccttagcgaacttctcggtgcagaacaagtcatctgtaaaattctttttggaccaattgtttcgcgcccacagatctgtgcactggctagggccaagtagcttcacctcggccttctgcagcttgtaggcttcatcatccagacacttcttccaatacattgcccaccacctgaaggagggccacccgttggccgtgacctttgccccattagacggaagctggttggccaactgaattggctggatcgttttggaggcctcgagcggttcgcacaactttaatatggccacattgtgaaatactgtctggccggtgaacttttcgtgaactgtaatgttgcagactgctacttcgatgactccatcgctgcgcgtagtgctacccactcgtacacggatcaccttgttcaggaatccatccacacatttcccggctgtcacaatgtgactcagtttgtatatcgctccgtcgcacttggccttttgtttgatcgaaatggaagcaatccatggcgctgtggttatgttcacgggatgaccaccaagagtcgtccggttgcagtcgttttcgtcgtcctcttccgaatcttcacctgcacccgtgtcacttttggaaaggacaaagagtgcaaggaaaattggtagagatcgcagaagcatgatgccaaataaatgtgcatatagcaggctgtttaaattttatagtattggcacaaagcatagcaaattaatttgttttactttacggtgtgttaaaatttttctcactttaagccattgtgcaatgttctttattctgtgctttacaaattcaaatatagatctacagaaggcaaggtaatattatcattaaactattcacagcaagtaagatattaatccttcgtattcgagtccagccagttcgtgtgccccaggatatttgcatagacatcgggcttaatggagcagcccgctctggagaggatgcccacgagcttgttgtcgatgaccagaggcgaacccctgtctgtggagcaggctcccttgcccggcgacttggtgcagatggtcaggtctgagattcccttgagtaagtaaaatggtatgactttccagtcggcggcgcactgtttttggctaaggatccgcacttgagtgccgtgcaattggacaggcagctggaagcacttctcttctattccgctgctaatcctctaagtctaagataaggtcaaggaaattgcctgatctgccaccacagccagtcacattggctcgagaattatcatccggcactttgtcggccctctcaattggctttatttcatcggtggtgttgagtagctcgcaggttttcaagagagccaagttattgtcaaagcgccagctggagtactggctatgaactttgaccttacagattccagcaattgatccactagtgccgcagctgctggttcccaacctgacttgtatgctcctggcgctgtagccatccacacacttggcggcagtcaggatgtagttcttcgagataatggcaccaccgcacttgagcttcgaattgactatgatggaggcataccacggtgcatccttaatgttgacagtgtttccgtttatgatccgctgatctccgagagccaaccaaggcagagccacaatctgcaggaggattagtggggctaacattctctttaactgactttcgtgaagggcgtgctcctctttttatgggattctttgttaattaaacggaatagctttggaatactcttcttatctacctttcgaagaatctattttgtaatgtaagaagaatatgtattacaatgtattacaatccatattggcatttgaaacattttgaatgataaatacgccctgtgcgcaatcgattgaatataaaaccgaactattatacgttcaattgccaattggggtaatccacatatatgcccaaattataaagtataatttaagcagccgcatcgattcttttcgcttagagcggctttgtacccgtcctccgatttgagacaaaactcaccagccattacactaagccgcttaaatatttgaataattcctgcagagtaaaaaaaacgtgggtgactgaaatatagctggacatttccatcaagcgatatttgcatgtatttatgcaattttacatgaatgcagatttaaatctgggcaatgtttagcaaaatgtcgaaataaatactttcatggaggaaagtggcaggagagagctggcgaggggcaaggggcatggggcatggggcaagtaaacaaacattttgatgattcgccatgtcaagtgggtcggtttcgcagccaggcaggcggattaaaatggattacaactgaattatttgataatgtcccagcagatgcaacacatcgcattgctttcgccccgaatcgcatttaatttttatcaatgtgaaaatcatttttggttgctgggttttttattaccattttattgggttttttcggcgggctgaatcgtgttttcaatttgcccctggatctacgttttcttttgtcaaatattgtttgggtgtgctttttttagctctatttaattgattttatttacgcaaaatcaggaaagcttgctcgctttatacgaggctttaattaatttagttaatgggatatattcgcgtactattcatgatct

SEQ ID NO: 20918 - DNA, 744 bp, DROSOPHILA
atgttagccccactaatcctcctgcagattgtggctctgccttggttggctctcggagatcagcggatcataaacggaaacactgtcaacattaaggatgcaccgtggtatgcctccatcatagtcaattcgaagctcaagtgcggtggtgccattatctcgaagaactacatcctgactgccgccaagtgtgtggatggctacagcgccaggagcatacaagtcaggttgggaaccagcagctgcggcactagtggatcaattgctggaatctgtaaggtcaaagttcatagccagtactccagctggcgctttgacaataacttggctctcttgaaaacctgcgagctactcaacaccaccgatgaaataaagccaattgagagggccgacaaagtgccggatgataattctcgagccaataggattagcagcggaatagaagagaagtgcttccagctgcctgtccaattgcacggcactcaagtgcggatccttagccaaaaacagtgcgccgccgactggaaagtcataccattttacttactcaagggaatctcagacctgaccatctgcaccaagtcgccgggcaagggagcctgctccacagacaggggttcgcctctggtcatcgacaacaagctcgtgggcatcctctccagagcgggctgctccattaagcccgatgtctatgcaaatatcctggggcacacgaactggctggactcgaatacgaaggattaa

SEQ ID NO: 20919 - protein, 247 aa, DROSOPHILA
MLAPLILLQIVALPWLALGDQRIINGNTVNIKDAPWYASIIVNSKLKCGGAIISKNYILTAAKCVDGYSARSIQVRLGTSSCGTSGSIAGICKVKVHSQYSSWRFDNNLALLKTCELLNTTDEIKPIERADKVPDDNSRANRISSGIEEKCFQLPVQLHGTQVRILSQKQCAADWKVIPFYLLKGISDLTICTKSPGKGACSTDRGSPLVIDNKLVGILSRAGCSIKPDVYANILGHTNWLDSNTKD

SEQ ID NO: 20920 - DNA, 4097 bp, DROSOPHILA
catgccacgggtcaattattgtcaatgttgcttcatcactgccgcaaaactctgacgtcgccaatgccattcgacactttcgtggcacgaaattaaattggcgacgaaagtgtttaaatttgatttagttatgcattttgatttgactaaacggggcactcacgtgccggttttcgagtgccgagcggtacgtgcttataaaatttcaacaagtgcattgcacgcagataatgccaaaaagcactctcgaccgatatgaaaaatgcgcaaaaaaattcacggctaattctaaatagaccgttacacgtgcaagttaacaacaatcgcggctatcacattcgaaatagagctgaattaatggatgtcgcttatttactatataacaatgttaacagattgttgaagttatctggttgttgcatttaatgaacggaaatgtgtatttgaacttatattaaattgtatctttattgtcagttagatgacagtgctaactaagcagccgattaagttatctgtttttttagatgaaataagtttttcagccaaaaaagcaagttttcaagttttcagtaagtttgcaagcatttataataatttagagctgcaaatatagtacttacttaataatagtgataaattgctttttaaaaaccattattcatttccttaacctaatagagcaaaaacaaattaaaagcaaatcaataatgagtttggacaacgggtatccgaaacgtatatgtacatttattaaaattgatctagtgtttccgaaaatagccctgaatgattcggcatttttagcctcaataatttaattcaataaattcacaaatattttgcattttagcgaatgtgtggggaaatacccgcactcgtttgtacgtaaagtgatctgcatccgaagatgtggctaaccaaccgattcctgttgttttcttcgtttttcagctgacaagcgacgcgaggctacggagccataacaaaagccgccgaaatggccttcatgccgtgctgtaagtacccaaatatattatggccacacgctcggaattgtcgtcaataaggcctcacgtgatgatcttcgatcggagcaccgacatccccgaaatccccgacatgatatccatcacaaatattgaaatttgcgcatgcgcagcccattagaaatctgtgacccgtccccaaaaaaaaacgggaatggggagatcttttcgatccgctaattgatctaacgtgttgcgaggggcctgcctgtacctctattcataaattgaataacgatccgttggtcaataatcaatatttgctgtcgttcgcagtctatgtgcccaagcggattaacctggcgatcatgctcttcatggcctgcctcctcagctacatgatgcgagtgaatctctcgatcaacatcatcgccatggtggaggacacgagcagccacgagaatggaacggaggtggaggcactgcccgatgtgagtttaatcaatgggaatcaggatactagggattatcctctatcgattctatctaatccattttgttttttggcatattccacttagtatggaccgcgctacaactggacgcaatcggatcaggctctgctgctgggtgcctatttctatggctatatgatcacctcactgcccgccggcactttggccgagatgctgggagccagaaatgtggcaggttacagttgcctggtggccggcatcctgacagctctaactccggcggcagctgcctgggacaaatatgcggtgtttgccgtgcgtttcttgatcggcttcctcaacggtgtcgtgtatccgtgttgccacagccttgtttccaagtggtcgcctccggatgagaagggcaagtttgtggcctcgctgatgggtggcacttttggcaccgtcatcacatggcccattagcggtgtgatcatcgagaatctgggctgggattgggccttctacattgtgggcatattcgtgctggtggtggtcgctatatggttctaccttgtggcagatactcctgcccagcacagtacgatcagtctgaaggagcgggagtatatcgaaagcagcttgggcgacactctgagcaacaagaaggtatgttggtccataaaaagcaactaggacttatttacacatttgttgcaacctttgtagaagtggccaccatacaaggagctcgtcctgtcgctgcccttctggtcgctcatgatgctccactacggcagcatgtggggtctgttcttcctgattaccgccacgcccaagttcttgagcgaggtcctgggcttcaatctctcgtccgctggcttcctgtccagcctgccacatgtggcacgtctgctctgcgccttcggttttggcgccgtggcggattggatacgtcgacgtggctggttgtcggtgacccgcatgcgcaaggccttctgcctgccctgtaagtgtgcctatattattctacatttgattatactatagccatacgatttaactttgattagctcacatcttgcccggcgtcatgctgatcatcctggcctactttggtcgcgatccctatgtgtgcgttgccattatgaccatttcgctgggcttcaacggagctgccaccgcctccaatttggccaactcacaggatctggcgcccaactatgcgggcacgctgtacggcatcattaactgtgttggcaccacgcccggaatcttttcgcctctgattgtggccgcctttacaaagaacgaggtttgtggcgattctctagaaatcccgaatatccatcccattcatgaattttccatactccatagaacacaatcgatcagtggcactgggtgtttatcattggagccgctgcctacatattgcctgcgctgtttttctgggtcttcggatcgggtaaaatccagaagtggaacgaggttcagaccaccgagtcgcgagaggatattgtcaacacaaagttgtagtttgtgccctggcaatcacctgtgattatgtactttaagtattatgccataacgacgatgtgtacttctttatggagagagtcctattaaaactttagccgtgtatttattattaaccaatatggtttcatttcgcgcacgtgaattctgaatcacgagtcagttgagatcgaaaccagtttctcttagattggcataacgaccttaacctggtcggggaatatactctggcgaactggttgggggctctttgcagagtttgtttgctgattaggaactcatggttgaagaaacggaattgacacccgtaattagtcaaatgctaatcaaatttgaggacacttttagccaacaaattgccgtttttaattgcgtattaacgtcatgcccaacaagttgatagtaggttagcggcgaagtcaaaaacgcaatttataaggtgtgaaaattcattttaaaatcaaaattaaaagatttagtcatagaaattgagggaaataccagttactcaaaatatttattatatccacacatctcagagtattataattaatggttatagtgtacaagttaattaattcgaccaataaacttttagaatagttaacatacggctaatggtcacaagttagtcactccattaacctataattagcacccattattccaggcattaaggacactagcctggcctataaaagcaaggaagttgagcaccagctgcagacagtacaaaatgatagaatcgggaaagtggccaacgccaggaaaaaagaactccaaaggcgatgggagcagaaagcgtggaaaggatccaagtttgattaggacagccatattggccactttctgggagtacacggagcggaccaaggtgagcggcatgtggcttatgcgtcggaatcgtacctacggtctgtcccggttcatctggtcctcggtactgctgcagttgctcctgctgagcatctacctcaccctgctgctgtggctgaagttctactcctaccccattctaaacaccatctccaatgatctttccatcacggatgtcgcatttccgggcgttaccatctgcagtccgaaggtggtcaactcggagcgggtcgatcga

SEQ ID NO: 20921 - DNA, 1512 bp, DROSOPHILA
atggccttcatgccgtgcttctatgtgcccaagcggattaacctggcgatcatgctcttcatggcctgcctcctcagctacatgatgcgagtgaatctctcgatcaacatcatcgccatggtggaggacacgagcagccacgagaatggaacggaggtggaggcactgcccgattatggaccgcgctacaactggacgcaatcggatcaggctctgctgctgggtgcctatttctatggctatatgatcacctcactgcccgccggcactttggccgagatgctgggagccagaaatgtggcaggttacagttgcctggtggccggcatcctgacagctctaactccggcggcagctgcctgggacaaatatgcggtgtttgccgtgcgtttcttgatcggcttcctcaacggtgtcgtgtatccgtgttgccacagccttgtttccaagtggtcgcctccggatgagaagggcaagtttgtggcctcgctgatgggtggcacttttggcaccgtcatcacatggcccattagcggtgtgatcatcgagaatctgggctgggattgggccttctacattgtgggcatattcgtgctggtggtggtcgctatatggttctaccttgtggcagatactcctgcccagcacagtacgatcagtctgaaggagcgggagtatatcgaaagcagcttgggcgacactctgagcaacaagaagaagtggccaccatacaaggagctcgtcctgtcgctgcccttctggtcgctcatgatgctccactacggcagcatgtggggtctgttcttcctgattaccgccacgcccaagttcttgagcgaggtcctgggcttcaatctctcgtccgctggcttcctgtccagcctgccacatgtggcacgtctgctctgcgccttcggttttggcgccgtggcggattggatacgtcgacgtggctggttgtcggtgacccgcatgcgcaaggccttctgcctgccctctcacatcttgcccggcgtcatgctgatcatcctggcctactttggtcgcgatccctatgtgtgcgttgccattatgaccatttcgctgggcttcaacggagctgccaccgcctccaatttggccaactcacaggatctggcgcccaactatgcgggcacgctgtacggcatcattaactgtgttggcaccacgcccggaatcttttcgcctctgattgtggccgcctttacaaagaacgagaacacaatcgatcagtggcactgggtgtttatcattggagccgctgcctacatattgcctgcgctgtttttctgggtcttcggatcgggtaaaatccagaagtggaacgaggttcagaccaccgagtcgcgagaggatattgtcaacacaaagttgtagtttgtgccctggcaatcacctgtgattatgtactttaagtattatgccataacgacgatgtgtacttctttatggagagagtcctattaaaactttagccgtgtatttattatt

SEQ ID NO: 20922 - protein, 465 aa, DROSOPHILA
MAFMPCFYVPKRINLAIMLFMACLLSYMMRVNLSINIIAMVEDTSSHENGTEVEALPDYGPRYNWTQSDQALLLGAYFYGYMITSLPAGTLAEMLGARNVAGYSCLVAGILTALTPAAAAWDKYAVFAVRFLIGFLNGVVYPCCHSLVSKWSPPDEKGKFVASLMGGTFGTVITWPISGVIIENLGWDWAFYIVGIFVLVVVAIWFYLVADTPAQHSTISLKEREYIESSLGDTLSNKKKWPPYKELVLSLPFWSLMMLHYGSMWGLFFLITATPKFLSEVLGFNLSSAGFLSSLPHVARLLCAFGFGAVADWIRRRGWLSVTRMRKAFCLPSHILPGVMLIILAYFGRDPYVCVAIMTISLGFNGAATASNLANSQDLAPNYAGTLYGIINCVGTTPGIFSPLIVAAFTKNENTIDQWHWVFIIGAAAYILPALFFWVFGSGKIQKWNEVQTTESREDIVNTKL

SEQ ID NO: 20923 - DNA, 2408 bp, DROSOPHILA
catagcaattatttggaattaatcatagacttatttgcatgactgttgatccgcaagtggcaacgtgtcgtatgcgcaatgcttgctcttgctgggtctgcgatgattcagaggggactctagtaccgcccaacgcataaatatgaatgaggaaatcgaagcagcttgccacttgggcttagcccagactggattttccagaattccattgaacttattactgaccgacacgatccatataaaaacgaaagaaattgcatctggctatgcagttgccggcggtgcattgatcagcatgatgagccgcatcatatcattgcttctcctattcggaatcatttgtgctgctctaattgccggccatccgcacgaccttattgaagatccggaaggtaccaatgatgctttggaggaatctggcagtggatacaacagtgccgaagagttcatgaatgcaatggacgagctgatcagacgctggcaggagaacgatgcagctcatgagaactcaactgactatccaagtcttgatgacgatgagacgactttggattttatggatattaccaccgaaccggctacttaatatggaattatttagtagtgctgtaatgctaagtcatgctatcctattgtctgtaaataatctagttcttcaataataattattaagggaaataaaagaaagtttttagaaattttaaaatgaaatcaatcaagagagaatcaagagatcttcattttttgataatgaatgttgcctactccgcaatttcgattttaagtacgcattaaatactagtcatagattgaatttaatagctcgtttagtatatcaattaagcttgtggtaagctgtgttgctgttaagctggaatttcccgcactcacctctgtctaaaagtatacatatcacctttaaaccaaccacttagaactgctgataacccagggcaaggctataaaagcccagctcaagagccgactgacattcagtcaactgtagccagagctaatcgaaagaaaaatgcaatccattctccgactgctggtgctgtttggattaatctataccgcgatcggtgcatcgggtatatttcagaatataaacctcggtggcgaaggaggaagaacacgatcttcaggtggcaacttggactggagcgatagtgttcacagttctgatgacgataggactctgaagctactggaatcgttggataacagtggcaatgatagaaataattggggcaacgatgcggtgaggaattctggattcgataccgatagatccgcaggagactcaaaggaagacgctcgcggattccagtttatacacataggataaatgttacgatgttaaaatactcaatttaaataaaagaatttttaaaagattaagaaataagcattataaaatgctttagattttattacttaacaaacgtatttattattttatgaactgatcttatctaacaaatccaatgggccttgacccatttcgaaatcagttccgcctgtttcatcattgagaatttttcacttttactgtcgatttaaaatagcacccctctctaaatatctttaatcatacagcttatgctaattaggtgaataataagtagaaaaaaaagaaaccaattttgagcttagaataccattacgatgaaaacgaaaacaaaaagaaattagcatatttatgcgattttatggttaaaccaacgttctgtgttaatagccgaatttcagtcttcagcatagcgttaaccagttatacataactataactaaatgaaggctatcgagagaaattaaatcgatttccgcatcatgaatacattttaagcagtgctaatcagaagaaaatgttgcgcaagacctaagcaaacttacctccgaaagtagttaaatttttcttctgccctttgaacaaaatggaataatagaaaatatttgtttgtaaacatacaacagatctaaatttaattaccaccattaaagcgtaatttctatctcggcaaatcaatcaaaaacaaacatcgagcggaacaatcaattatttcgattacaatgcaatcaattactatgcaaattctcttcgcacacagcaatgactgaattcgtataattaaacaattttacgtttaaattttgacttaaatttaaatgattgcttttgctaattatttaccccgttcaaataacaattacagcagcgaattcgaggtgtaaataatggaaaccgcacaattgtgctgcgtttttgccgcaggacgagcagcaggtttctcttttaaaattgcaattatatttaaacgtttcccgtattaaacgcaccccattttccacgcactttattaaagacccagagttttctcagccacatttaacgcatataatcagtg

SEQ ID NO: 20924 - DNA, 408 bp, DROSOPHILA
ctgtagccagagctaatcgaaagaaaaatgcaatccattctccgactgctggtgctgtttggattaatctataccgcgatcggtgcatcgggtatatttcagaatataaacctcggtggcgaaggaggaagaacacgatcttcaggtggcaacttggactggagcgatagtgttcacagttctgatgacgataggactctgaagctactggaatcgttggataacagtggcaatgatagaaataattggggcaacgatgcggtgaggaattctggattcgataccgatagatccgcaggagactcaaaggaagacgctcgcggattccagtttatacacataggataaatgttacgatgttaaaatactcaatttaaataaaagaatttttaaaagattaagaaataa

SEQ ID NO: 20925 - protein, 106 aa, DROSOPHILA
MQSILRLLVLFGLIYTAIGASGIFQNINLGGEGGRTRSSGGNLDWSDSVHSSDDDRTLKLLESLDNSGNDRNNWGNDAVRNSGFDTDRSAGDSKEDARGFQFIHIG

SEQ ID NO: 20926 - DNA, 5017 bp, DROSOPHILA
tttccgtcacgggaaactgggtgaccgactgaaccttttcgatgatcgtctccgtctttccggtgcgatgcttcaccttcatctcctttgtggtgatgtcggtgatcgctatatactcgggctcgcattcgtccatctcgtccgtttgaacgccgacttcgtgggttatgcaacaacatggtctggtccagtttggacaaggcggctgaaagcagttctgtcgattttgttggccacaacgagaaacacaaggagattgttgcgaacactgctgagaatattcttgggaaaattgctgagaatggtcgggcagagctcgcattggaggttgatgtccacagaaacagttttgaggatgctggaaactccaactctgaacagattcctgagaaagtatttgaggatttctttgggaaaaattctgaaaaacttcccgaggatctggtctgttctgccagcgaggacgtagatccgaaccacacatcagatatttctccgggaaacatttctcttggcagggcatcggctgattgggcaaacgaagttcataccgacaccgtggacattggcaggattcattcatcgctctgtagtccatcgtcctgaatcacaggatttgaatagcaattccggacaagaaatcatcgaacaacgttcaaataggattctaggcacccagcacacacaattttttcagtaaaacatcgaaatggttgttgttgttctttgtttacaaggcatacttcgctagttttcagaaaaacactttaaataaacataaaccagataaaagatatagctacatccacattttaatgcagaatggggatttaataggattaaaacaattacaggttatatagaatcgctttgattttattccatttaaaatcgaaaaataaattcaacaaattattcaatcatatctacctttgacatcaatattagttataaagctccacacgaaatccagttttttgtgaccacatgtctgactaagatcctgtttttttttttttattaacaattttctagaaaataaaattatagagtaaaaaattccgccacatagtgaatagccatgagtttccagaataagctggatgagtacaccaggaacttggacctggccaagtggtatatgggaatctcggcgaaacaggaggccacgatgtccacaatgtccgagagcctccgggatgacttcgagcagggaacaggggaaaagatgttcaaggcactgatatccctgggcctccagccggtgatatccaaaaagaagatcagccggatcgtgcagttgagcaggaacaacatactggccttcctgttctttgtgatggagggctactacaagacgaaacaaacggatggcgtttacagcattaatgagcagctgctaatgaatgccattgccaagatcgacatgttgcccaccattcgtgctctggacattgtgctgccccagcctccggtcaaaaaaccggatcctcaaactcaatcgttagcttccctgaccacggagcgtccacaaaagaaaccctccaagaagtcgccctactttctaaggcaaccgaagccggttcaaaggacctcccgtctgacagcgaagattcccgagtttgtcgtgtcattcaacttttggcccaccaatggaccgcccgaatatggcactgaggaagaggagccttggtatgcgctgtaccgactgaatcccggccagcgactgatcaagaaaaccctctccgagaccctggagcgttactttaaattggcagcagttgaggggaagcaggatgcggaggaaacccaacaaagtcgggagcccgaagccaacatgtgcttggtgcacaagggtcaggtgttgcaggcccagctcctgagggatgaactggcggtcaaggcgagggatcgctgcctggaactcctcgatgtgaacgagccatacgccaagcttcgaaaggccagaatcgtggcccagttggagcacgacatcgacgtaataatggcccgccaccgaaacgcgatgcactgcgaccagaccaaggtgctgaccatcgagaattttgactgcgtgctgtgccagcagatgctggtatcgcaaccctggccggaaaccaagggtcagattggtcgggctctggtgggcgaggattgtaccgtggctcatactactgcattcgatacttaccgcggaaaaaggctggagggtggtgcggaaaagccggtaagttgagaattatcaaatacatacattctatacctaatatccaattaaagaaaaaaaaggatggcacagtagcccgtaccagtggaatcgatacttgtcgcggaaaaaggctggagggaggtgcagagaagacggtatgtttgaaattaccaaatatatttacattttccatacccacttttatttttctattgaacaaaattaaggattccacagtaccccaaccgcctgcagaaaagggccgcggaaagaggctaaagggtggtggaggaaagccggtgagtggaaaattaccaaatagattaactttcattacaatctttctgtattgaagaaaaaagacaagaaggggaaaaaggagaaaaaggctaaagtagtggaaccggaaccagaaaatccgaagaagccgaaggtatcgccctggaagccaccgcctcgcaaactcgttagcggccccttccgtatccacaacatcgacttcaacgagtacacacaggtgtgtacgcaagtagttggtccttcggagtgcgagcttcctccggctcccaaaaagtcggccgtatcttttatcctggccaagggaaagatcgaagggaatgcacacaagtgcgatatgcgcatgcccaataacaggcatgtgaaaactaggttcttccggggaccccgttcgaacaagccgtaccagttcaaataccatcgggtcttccaatccggccaaccgaaaccctttgatctcagtcatattatggccaagtcttttgtgaaggcgctggatcagtcggatggggacgaagccgatccgtgttactttagggagcttttgtcggagatggtgattgaggacgaggcgcctccggattccaagtctgaaggccttcccgaaaccgagccggagaagaaatcgaagcaggacagccagcccccgttggaaatctttagtgacctggatcagactagaatctccgacagtcgagagaccttggatcgttcgagcaaccacagtggtcgcagccatgtgaactacaaggcggagatcgtggatgcagtagtgagatgtgccaaggcggtttggcagaagcgtaccctaataaagcgggccgagatggagcgcatgggcagaatgacgccgcgcaaggcactgacccataaggatacggaatcattcgatccgaacgatgccgcccagatggacaagttgctaaaggatggcatgcgagtactcaggaaggagccccgctatgtgctggcctgtctgccagacgcccacaagctgccagtgctgcgggagtgggtcaagaggaggtacggcaaaacctacagccagaaggagctcgaggagagtatagccgagtcgagcaggatattcgagctggtcaccatcctccagagcagtcccgccagtcccgatcttatgggcattgatcgcctgcccagatccaaggagaactttaacttctataagcagattaagaatacggtatatatatatatatatatgtacatatattttactatactaaaactatatttttcaggctgccctggctaagcaaacatatcacgatcagttgaatgcccgctacctaagcatcgtgagctccgcctggtacgccatgggcaactatctggtgcccggaggacctcctcggaagacctttttcgcttacatagcttccaatccgctggagatcatgcgtaacaagacgtggaatggggatttccggaactaccgctccatgcgcgacaagagaaaggagcaggagaagcttttgggcaaaaaggactagattacaataaattaaaactctttttcaatctgaaactcaattatatttgggcttggtgcgggccactcttttgccggtgaaccccttgctggccaaataatcacggatgccgcgtttggtgtgcaccttcagtttgcagatgtcgaactccagctccttgttgcagtactcggcgccctccatgcgttgaatgaaatggatgacgtggagcagcacctcgccgtccagctgctgaatcttggcgtgcagatcaaggtcctcctcggttgtaaagggctcctgctgctccgaagtttccaaagttgccggcggagtccaatcgggggtcggagtacattcggtggttggagtacatgaggggggcgcacccattatggagggggacacctccgagccgttcacctcgtcctccggcgatgatgagtccgattcatccgaggagctctcttcctcggcacgcactttactgccgctggagcagatgtagagctgcacctgggagtacatctcctcaaagatgatctgcagctgtttggccatgtggtagcacaggtgatcgggattcgtgtacagataggtgttgtagaaaatcagccttatgtctttggcgaaatccgcggcactgagatagcaacccgtattcaaacgatgcctcacggtggacagatccatgggttcccggacaatctcatggtaatcgtggaggcccagcagttgcggatccagtggctcgtagaaaacccaagcaatattcttataggtactggaaaacaaccttttaataatcaccttgcaggcattaatttccggcgaggaccgttcagtttcttgttttgcagccatttcagaaaaatatcttcgatatcgactatcggaaaattctattataatttctatcgttttgacaacttgaacgcaatacaactgacaatattcacactccgggttgccctgtacgatgatatttttagcttatgaaaacttttaggattgccacctc

SEQ ID NO: 20927 - DNA, 2778 bp, DROSOPHILA
atcctgtttttttttttttattaacaattttctagaaaataaaattatagagtaaaaaattccgccacatagtgaatagccatgagtttccagaataagctggatgagtacaccaggaacttggacctggccaagtggtatatgggaatctcggcgaaacaggaggccacgatgtccacaatgtccgagagcctccgggatgacttcgagcagggaacaggggaaaagatgttcaaggcactgatatccctgggcctccagccggtgatatccaaaaagaagatcagccggatcgtgcagttgagcaggaacaacatactggccttcctgttctttgtgatggagggctactacaagacgaaacaaacggatggcgtttacagcattaatgagcagctgctaatgaatgccattgccaagatcgacatgttgcccaccattcgtgctctggacattgtgctgccccagcctccggtcaaaaaaccggatcctcaaactcaatcgttagcttccctgaccacggagcgtccacaaaagaaaccctccaagaagtcgccctactttctaaggcaaccgaagccggttcaaaggacctcccgtctgacagcgaagattcccgagtttgtcgtgtcattcaacttttggcccaccaatggaccgcccgaatatggcactgaggaagaggagccttggtatgcgctgtaccgactgaatcccggccagcgactgatcaagaaaaccctctccgagaccctggagcgttactttaaattggcagcagttgaggggaagcaggatgcggaggaaacccaacaaagtcgggagcccgaagccaacatgtgcttggtgcacaagggtcaggtgttgcaggcccagctcctgagggatgaactggcggtcaaggcgagggatcgctgcctggaactcctcgatgtgaacgagccatacgccaagcttcgaaaggccagaatcgtggcccagttggagcacgacatcgacgtaataatggcccgccaccgaaacgcgatgcactgcgaccagaccaaggtgctgaccatcgagaattttgactgcgtgctgtgccagcagatgctggtatcgcaaccctggccggaaaccaagggtcagattggtcgggctctggtgggcgaggattgtaccgtggctcatactactgcattcgatacttaccgcggaaaaaggctggagggtggtgcggaaaagccgaaaaaaaaggatggcacagtagcccgtaccagtggaatcgatacttgtcgcggaaaaaggctggagggaggtgcagagaagacggattccacagtaccccaaccgcctgcagaaaagggccgcggaaagaggctaaagggtggtggaggaaagccgaaaaaagacaagaaggggaaaaaggagaaaaaggctaaagtagtggaaccggaaccagaaaatccgaagaagccgaaggtatcgccctggaagccaccgcctcgcaaactcgttagcggccccttccgtatccacaacatcgacttcaacgagtacacacaggtgtgtacgcaagtagttggtccttcggagtgcgagcttcctccggctcccaaaaagtcggccgtatcttttatcctggccaagggaaagatcgaagggaatgcacacaagtgcgatatgcgcatgcccaataacaggcatgtgaaaactaggttcttccggggaccccgttcgaacaagccgtaccagttcaaataccatcgggtcttccaatccggccaaccgaaaccctttgatctcagtcatattatggccaagtcttttgtgaaggcgctggatcagtcggatggggacgaagccgatccgtgttactttagggagcttttgtcggagatggtgattgaggacgaggcgcctccggattccaagtctgaaggccttcccgaaaccgagccggagaagaaatcgaagcaggacagccagcccccgttggaaatctttagtgacctggatcagactagaatctccgacagtcgagagaccttggatcgttcgagcaaccacagtggtcgcagccatgtgaactacaaggcggagatcgtggatgcagtagtgagatgtgccaaggcggtttggcagaagcgtaccctaataaagcgggccgagatggagcgcatgggcagaatgacgccgcgcaaggcactgacccataaggatacggaatcattcgatccgaacgatgccgcccagatggacaagttgctaaaggatggcatgcgagtactcaggaaggagccccgctatgtgctggcctgtctgccagacgcccacaagctgccagtgctgcgggagtgggtcaagaggaggtacggcaaaacctacagccagaaggagctcgaggagagtatagccgagtcgagcaggatattcgagctggtcaccatcctccagagcagtcccgccagtcccgatcttatgggcattgatcgcctgcccagatccaaggagaactttaacttctataagcagattaagaatacggctgccctggctaagcaaacatatcacgatcagttgaatgcccgctacctaagcatcgtgagctccgcctggtacgccatgggcaactatctggtgcccggaggacctcctcggaagacctttttcgcttacatagcttccaatccgctggagatcatgcgtaacaagacgtggaatggggatttccggaactaccgctccatgcgcgacaagagaaaggagcaggagaagcttttgggcaaaaaggactag

SEQ ID NO: 20928 - protein, 898 aa, DROSOPHILA
MSFQNKLDEYTRNLDLAKWYMGISAKQEATMSTMSESLRDDFEQGTGEKMFKALISLGLQPVISKKKISRIVQLSRNNILAFLFFVMEGYYKTKQTDGVYSINEQLLMNAIAKIDMLPTIRALDIVLPQPPVKKPDPQTQSLASLTTERPQKKPSKKSPYFLRQPKPVQRTSRLTAKIPEFVVSFNFWPTNGPPEYGTEEEEPWYALYRLNPGQRLIKKTLSETLERYFKLAAVEGKQDAEETQQSREPEANMCLVHKGQVLQAQLLRDELAVKARDRCLELLDVNEPYAKLRKARIVAQLEHDIDVIMARHRNAMHCDQTKVLTIENFDCVLCQQMLVSQPWPETKGQIGRALVGEDCTVAHTTAFDTYRGKRLEGGAEKPKKKDGTVARTSGIDTCRGKRLEGGAEKTDSTVPQPPAEKGRGKRLKGGGGKPKKDKKGKKEKKAKVVEPEPENPKKPKVSPWKPPPRKLVSGPFRIHNIDFNEYTQVCTQVVGPSECELPPAPKKSAVSFILAKGKIEGNAHKCDMRMPNNRHVKTRFFRGPRSNKPYQFKYHRVFQSGQPKPFDLSHIMAKSFVKALDQSDGDEADPCYFRELLSEMVIEDEAPPDSKSEGLPETEPEKKSKQDSQPPLEIFSDLDQTRISDSRETLDRSSNHSGRSHVNYKAEIVDAVVRCAKAVWQKRTLIKRAEMERMGRMTPRKALTHKDTESFDPNDAAQMDKLLKDGMRVLRKEPRYVLACLPDAHKLPVLREWVKRRYGKTYSQKELEESIAESSRIFELVTILQSSPASPDLMGIDRLPRSKENFNFYKQIKNTAALAKQTYHDQLNARYLSIVSSAWYAMGNYLVPGGPPRKTFFAYIASNPLEIMRNKTWNGDFRNYRSMRDKRKEQEKLLGKKD

SEQ ID NO: 20929 - DNA, 3226 bp, DROSOPHILA
tatataaaatacacgcaaaacacatatttaagttaacgatcaaagagagaaacgctattaattatagatcctacaaatattactattacttattgtgtaactagagaattaaatgggaaatccaattatgtatattttcacttaagcacgtttataaattacaaatgttctacaaattgcaaaaatacctttactgaataaatgaatatggaaataattagcatttctccttttgaaaaaagtgtttggcgcgaaaagtgcgaggtgactgtggtgttttttagtcactccgtgtgatgcatcgataaatcagctttacaaacaaatcgtttactgctcatctctaagtcaactgtgcgtattttaacaattttattttttctgcgggttttttgttttattacggatatttaagcggttaatcagttagtaaatagcatttaaattatctgtgttcttagtagatacaattggctactgctagcaggccttgcagcttgtcaaacgtaaacattcttatgtaattattcagggctaggttaaacatatgatttttagcctggatgacactgatttttcctgatttccagtacagcaatgggcggacatcacggcgaaccctacacggtgccccacgcatcgacctacaaggtggagagtgtgccccaactcgtggaggtgaaggaggctctgggccgccagggattgaaggatccatggctgaggtgagccttcaaattgggattagactgcaccgtcgatctaaccggttgtcttcttgcaggaacgaagtctggcgctatgagcccaaggccttcggcacccacagatcccgcctgaacaccttccttttccgcggactcggcgtgggattctgcgctttcctggccaccgtcgccgtggagtacgcgctgggcattggcaagggtcagggcggccatggacatggccacggtcacgaggaacacggagataagggccaccattagatatactgaataaacccattgtgctatcgctccaattcactttattcgcaatacatgtacgcgtaggggttttcactaaagctaaagtagtcctccgatcagttaatgcgcggcttgagctcgtcgtagcacgagcgcagaaagatttggggcttcttggccgggttgaagtactcgtggcccttcgaccagtcgtagccgacggcgtacgcaaatatctggccgttggcgttaaatccgcatttggtaatggactgatccatggtctcgctggacttgagcttggtccgggcatccttgtcccagaaactgaaggtgccatctgagccaacggtcaccagggtgccgtgcacagggtggaatgcgatgtcatttactgcataaatatcctggtagcctgaggtgcccgtagtacggtggcacttgaaggtgaagttatcttttggattccccggattcacatactgaatggccacacggccctcaatgctgcccagcgcacagcctgtgggctcttttttcttgtcccggaaaatggaaatggcacggtgctggtacttcagcggactctcctgccgcttgtactcggttgggctattctgcagcgagtatatgatgagtcctctgttggccgtgcccaccacggccatcggatactccacatcggcgcagtagcaccgctcgggtagattgatggtcatcatgggattgggcgaacgggtgtcccagaactaaatggaaaacagttgtgaaaatgatcgtgcactttgttcggcttacctttagggtcttgtcccaggagccggtcatgaggcaggtgtacgtgggtcccttgaccatgtggcacgtcttaacgggaccgtcgtgggccgccacttgcatcacttgatcggaggcgaggtcccagagcttcacctgcttgtcgcaggaggcgacgaacactttgctgccgtcgtccgaccagcaaacgtccagcaccggtccgcccatggtcttcatcgacttgggcacagtggccccgttttgttccacctcccagcagcggaccgtgctgtcccagcttccggccaccaggaagttcttctgcaccgtgctggggctgaactccagcgccgagacggagtcgtccggcggcgaggcgacctcgaagtcgttcattcggttcgtcgattgtgtggcgccaaacattcttctgcttttgttgccgcaaaatgtttgtgtttgtattatttcgccaatgaagagtgcatagcagtgtcaccacaccccggcggaaaccgcgttgtatcgtttgattgcgacgataacgttctatcgatttgtatcggtcgcgccgctaatcggcggcaaataattcaaaaattaaaaaaatacctacagtctagttaatattaaaataaagttatttaagccattaactttagcatttgtagatttacaagtatgcaacatgtgatggttaaaaaaaaaatatctttgtgctcctgcttgcctttctattgaagaattttatattatatataaataaattataagaaatgaaaatataccattatatataaatctattattgtcttatataaatatgtataattttgccgttcgaatagtgtgctttaattagcgaccttcaaattgttgttgataacaattttcttaattaattaatcccaatcaaaagtaagaaattatctcaatcttaattgcactctgtatcttttcgagtttcccacagattaatgaggttgattgcaccctgagtttgcatctctcgaaattctttccggccattcgagtaaacagtgagtgtgagtgcaaaggtggcactcgtatttcggtaatgaattgttgctttgtataccaatgccaactgtcaactcgaaaaaaaaaatccccgggaattgatattcggcacctatagaaaagcaaaatatatttaattaatcagtacctgtatcggctagcgtcgggtgctttttccggtaacaatgaaaatgggtcagtgtccattgcatcagcatctcgatggtggtgattaattggtggttcttagaagttgtcaatggtacgacttgaccgcagatagtcgcgtacgcattatgctgaggaaagcacttatctgtgtagtttaccaagctccgaagaaaacgcaagttacgttgtctttgggggactttttgttcttttagcaagaaatgcaaagaaaaacgcagcaaacatatatatttagacatata

SEQ ID NO: 20930 - DNA, 1177 bp, DROSOPHILA
tggcgaaataatacaaacacaaacattttgcggcaacaaaagcagaagaatgtttggcgccacacaatcgacgaaccgaatgaacgacttcgaggtcgcctcgccgccggacgactccgtctcggcgctggagttcagccccagcacggtgcagaagaacttcctggtggccggaagctgggacagcacggtccgctgctgggaggtggaacaaaacggggccactgtgcccaagtcgatgaagaccatgggcggaccggtgctggacgtttgctggtcggacgacggcagcaaagtgttcgtcgcctcctgcgacaagcaggtgaagctctgggacctcgcctccgatcaagtgatgcaagtggcggcccacgacggtcccgttaagacgtgccacatggtcaagggacccacgtacacctgcctcatgaccggctcctgggacaagaccctaaagttctgggacacccgttcgcccaatcccatgatgaccatcaatctacccgagcggtgctactgcgccgatgtggagtatccgatggccgtggtgggcacggccaacagaggactcatcatatactcgctgcagaatagcccaaccgagtacaagcggcaggagagtccgctgaagtaccagcaccgtgccatttccattttccgggacaagaaaaaagagcccacaggctgtgcgctgggcagcattgagggccgtgtggccattcagtatgtgaatccggggaatccaaaagataacttcaccttcaagtgccaccgtactacgggcacctcaggctaccaggatatttatgcagtaaatgacatcgcattccaccctgtgcacggcaccctggtgaccgttggctcagatggcaccttcagtttctgggacaaggatgcccggaccaagctcaagtccagcgagaccatggatcagtccattaccaaatgcggatttaacgccaacggccagatatttgcgtacgccgtcggctacgactggtcgaagggccacgagtacttcaacccggccaagaagccccaaatctttctgcgctcgtgctacgacgagctcaagccgcgcattaactgatcggaggactactttagctttagtgaaaacccctacgcgtacatgtattgcgaataaagtgaattggagcgatagcacaatgggttt

SEQ ID NO: 20931 - protein, 346 aa, DROSOPHILA
MFGATQSTNRMNDFEVASPPDDSVSALEFSPSTVQKNFLVAGSWDSTVRCWEVEQNGATVPKSMKTMGGPVLDVCWSDDGSKVFVASCDKQVKLWDLASDQVMQVAAHDGPVKTCHMVKGPTYTCLMTGSWDKTLKFWDTRSPNPMMTINLPERCYCADVEYPMAVVGTANRGLIIYSLQNSPTEYKRQESPLKYQHRAISIFRDKKKEPTGCALGSIEGRVAIQYVNPGNPKDNFTFKCHRTTGTSGYQDIYAVNDIAFHPVHGTLVTVGSDGTFSFWDKDARTKLKSSETMDQSITKCGFNANGQIFAYAVGYDWSKGHEYFNPAKKPQIFLRSCYDELKPRIN

SEQ ID NO: 20932 - DNA, 7152 bp, DROSOPHILA
ccactcaatcccatgtattttttatgatagccaagggttatgttaaaggtcgccttccaggatggttcatcgaagcagggaaatgcctgcctggcaaatgtgggtgagaactgagtgaccgccaggtgactgaagtaccacaaaagttattcatttgtcccattaaatatgaattaaacaactcactgaacttccttggtaactatatccgtgtagttacttttatagtacccactttgggaatcatttagcccggctttgaagtgcatttccaacttgtagatctgatcctttaccaattcccgacccaagtgcaggatgtagaagttgtgcacctcattcacttcgattcgattaactccaaacttttcctggccagaaacaactgatgttcggttctcatctatctttaagtacgccgcatgcaaggtgatgttcttggtggtctcccgtgccagaagatctattgtcacagatccctcgaatctttgatcggtgctatttaggtgtgtgagaattcgcaggttgtagtgcaaaggctccacagatctgggcaaacgataatcctcgtagacagctctgatggaaggaacaaggattaagaagatccaccagatccagagacttggctgagcccgccacatgttgggatgctgagaagggaaagattaggtacggattggtatggatgaggtattagattaaaaagcttatgaatacccatgattaggcagtggcaaaaaaaggattataatagtactacaaatccaagctaagatgcaggtaggcctttgcttattcattattagtttcccaaattatttagataacagtgaatatgttttggaatatgttttcgaggttcctccgtggttcgtccacctctcaaattacgtgtttagtgcggggtggtggctgcaattcgaacacatcccaatcccagccacaccgcaatgtgagtcttttcacaggaagacaaccccactggaaactccgcgtgatgcagttcctcagtggcctgcgacaccggtactgcctgtggcgcctccgccgcctgctgggcgtggccttcgacgagggcggattccatgagggcactcgccaggcggcggtcaccatgatcgatgcagtgcgccaggcggactggccctgcatccggagttgctgcacggagcggggatcggccgacatctacggcttgtcccagatgaggagtccctactgcagtttggttcgctttcagaaggaacacctgcggcatgctcttcccgtgagggtggtgcgtcgctggatcgatggtcgctactatgtcatggtggacatgctctttgtcggcctgcgcaacctcctcgatctcggaacggagcaggaaaaggaggaaatgctccagcggattcagagcgttctggtgaactcccagatcgatgataagttcgaaccgagcaactgccgcctggccattgccgaaatagtgctcaccttctctatggaactgggcgatccccaggatcctcgggatatagaaagtgaagatcaggacagtggctggctggtggactcctacaaggtgcagcgcttcaagctgatcagcttcagtccgaaaacactgaaccttcgcgttattgactttctgaaaccggttcgacagaagtagcccacaaattctccgttccgaaggtgttgtcattggggcactcgagtaatttcagtcacgtgccgttctccggttcatcgatccctcgcattggcattacgttaaacccactttgtcagcgatctctatccaccgatcgtggcgcgactccgcttcgatgtgaactgatccgctgggagggttacctggtatatttatggcttggacaggtgtgtcgagaggcttaccaacactgtgattttcaaattgctgtgagtttttcaataaatgtttgtcagtttgtcttaccgtaaatggaagatacaaggaggtcttcaattagtagctaaggagtaaaggtcttacatcttactgaacataaatatatactatttaaattattcggtaattaaaactgcaagagcacgctgccttttagttaaagccgcgaagtaagtgtaatttgtcaggctgcgggcttttagaccctgtacgcgcatttacactccagatggggtaagagttaactattaactactcgcagccagagtccaaggatgccccagctccaccaacctcttccgcaggggtggcgagtggggctgggaaatcacggcgtgtcgctttcgaatggaacataaaaaattgagggcttaattaaaaagcaaaaatgtgctgcgattttccgcttttttaacgccaacagcagcaacttcggcccgtatttatatccgtaccccaacccgtggcccaaaaaaaaaaaacccagggaaaatgcgaatgcgaatgggaaaaacaacacattttccagggccagagagcgaagggaagggaggagtaaaaactacttgccgacgactttttatgtggcccatgttccttggaggcgaaggaagcactgccagcagttccatttgaaattttccgggcctcatgtgtctttttatttcgccttcccccccccccctgggctcctacaaattaagctttccctcgctttgttgcctcttttttggccagaccaggccaagaccatgacttttgttgttaattaaagtgacggctaaaaacatgaaactctcaagtgctcattaaaattgaaatgcgactgcaggaacaaaccaaatgtgtgccaaataatgacgtttggctcttaatgccactccatgttctcttcgcaaacaggatagttgcgttccctctgctgaatgcaggaatattaaagggctcaaatggaaatttaataggtaatcgtatggtgtgggttttgagctctttaaattaggtaatcttgattaataacaccacgagtatatactaacctatatagtagtacaagtggcattcatatccagctcttcgggtgctgcaaattccgccgcactccttcacaaatcatttgtttggccaagtccagttccaggagaccaggagtccacataaaccagcggcaatcccctcccgaaatcagggcgattgcagagctttaaagtgctccttggcaggccacataaataaatgtttgcacatttactttgccgggctgccctcctcctgagtccttctgctcctgcaggattgcgggtgttgtgttcgctcgcttcgttgctcccagcacgttcataactcaactcctgctcctgctcctgctcctgcaccagctccagccactgctccctcgccaaggatgcgattgtgcgaggatgtgccggaggtgttgctttccagacgctttatttacttgcaattcgatgctggcaatctcgatagtttcaatccgaggctacgccccgcattgttttccggcgctccgctagcgatgattctccggagagagattgccataactttgtatagtgtaatggcaatgcaattggatgaatttggcagcaggacgaactgcacccatcacgggcatcgaggccagttagtgggagctcaaattgcaagacaaagcagcgagcccaagtcaatttggccaagtctcacaggcggtcaaggtggcgcagtgatgcagtgatgcagtgggcccactgaatccaatgcaatcgctgcaatcacgtacccaatgggcatattactagctgactgcgatgtgaatggattaggttgacctggccgtggcagtgttcactaactgcaatctaattctgatctgggggtgtcacatttatcggcatgcttttctaaaagggtatccatcgcacggaggggtaacaagcttttctcaaacacttgaacatcctcaaatgtaattttctcgtttattaaataatattaatacatatagatcttttgccgctttgacatactaggtaactagaagtgggaaacaatgaatttcatttgcagctccttcaacattgtcctccaaactcctctgcttacttacttatttcgagtgaatctcagggtgcttggagcgttgatctggctatagggtcgtaagctgggccgacaatggccggtgcgagatgaggtcgggctccattttcagggcagttagcacaatgtcacgtagcaaatgcgacagcgtggtcaacataatgaacggggcggccacccgctcctcctgaccccggccacgccccccgcccatctgctcctttgggataaagagtgcagcatgttgcaggttgcagacggcgagtacttcgcgcagaaccagtgctgtccggttgactatttttcttgggctttgccattccggaattacaaaaaaaagaatattttcttaaaagtacagagttttgtcttctaagaggtgagaaatacatcatattttttttagcctacatgagtcaccaccactttttacctgagagcgcctctggccaggactttggtggcttccaatcgtgtctggtgtccactgattgctctggcggcgattgcaataacctttgcccatgtcgaccatgtcacgacaactccgctcggttttcgggccaaaggaaccctcagacagttggctccgaaaaatgtgtcgatgcacgtgacattcggatgcaatttgcaatttgattttgttccctggagaggcagtagacgggcggaggaggtgcccatcgccagcaggtcgcaagttgcaggttgcagattcagattcggcttgttgcctaagttcaaggatcaaattgattcccctttcggcagcagcaggtgtgagatgcgagatgtgagatgtgagctgcgtctttgcattgttacacttgaccaattcggattgcaattacacacctgactgtttaccgccccgccaccaccatcaccaccaccagtatcgccccaattttgaacctgactttatgtctggtgaggaagaaggcgctgctggactgtagttattcttgggggccagctgtggggctggctaaaatggccgagcaacgatttgtgtgggttttggcttgttttgcaatccgctttctttgttggcgccatcatccccaccacaccactacttagtctatagtttacgcgctccacaatttgggggaattgtttgtgggacaagtgggggggggggggagtccgtcgagtaggtgaaagacaggcaataagaagacagccgaatggacactggcttaattgaagtcctctttatgacagtggctttgtatcagtactattcaattcctctattgcaatctatcgatttgaagacacttccaaagtgttttttaaagtatgcaaccacttgtgttcagatagcctccagcatactttcaggcagcggaacattcaggggaggctgtattaagttaaagggccagcatcaattaatgcccacttaagcccaaagcacctagtcagcaatccagactgcaagtttacttacatttgcactcaggtccgggtgttaatggcgcccttgttatcggatgtggatattccgttcgccccggatgcacaacatctcctcccgcgttcgccctctccaggtcgcctgattgaccttctatgagtggcaaatggtgttgggtgtcagtcaggcgaagcactccgcccaatttccacctccgtccggccaatccgtgcgcttcgactaggtggcaaactaattggggaatcgaacctggcccggagaagactgtcggccgggttacattagtgtttcaatcacctcacattagacacgctgctttgtctactaccaagtcgagcgcaagatgaagaagtccggggacttgtgagcccaagccagtaggattagcacttcgatcgcctaacacccttttcctttcgccctagtctctccctgctcaacaatcgcgacctgctgaagactccgtccggcaactccattgtgaacttcctggtgaaaccgatgagcgtggaaatgaacacggcggacaatctgatcacgggtgccaggcgccagcgaatgatggagctcttccaggaggaccgcgcctgggaggccgccgagttgtcccgcttcggactgagctgcatcaaggccccggactgctatccctgctgcactcctttcgagtgctccaaggccaagttctaggactaattgatacgtcttttattgtatgtgtgtgagaatcaaatccatacgtaaatcaacctttaaatttcatcctcacaatagaggattcgcatagaaagctggccatacatatttgatagccaacattttcccgattctctagaagattagaaaacagaccgtaatttcgtttaaatttatttattttatttgtcgtagggagcacctttcgcctgctcctgcggtcaactgtcggccgcgtaataaattgattcggtggccattaatctattttccggagcgggcggagggccacgcccccagcttgatgcgctactcattgtttagagaatggcaggcaaatttcggcgcctttgttcccagataaaacccttttgggcggatcgtgttttttcgggggccatgcccgcttttttttgtcctgcggcgaacaaaacacaactgattatggcggcaggacacttggccggattaattgaaagccgagaggcgaaatccgaaagcctaaaggccggctttttttgcccacttcagttgggcttcattttgcgctgggggattgggtgttgagaattgagaatcctccatcatcatttgtcattgtcagctaacggagtgtgatggccgccccatttggccatagatgagataagaggctgtgctcgggctcagcccggtttcgctcagtgcactcggctgcacttcccgcctgacttttgagcgtttgagcgtgattttcttttccgtgtgcactcagcgatgcgctaatcaaattataaatcgtgcccattggaaagtcgttcgatggcatcggtggcccccaggaggcgacattgtcaccatcagcccgggcaatcataactcgcacaaagggaaggccatcctgtatttttctacgccttccccaccatttccacttttcccactgcatctgcgacactttttcagcgcccattagagctgctgtggcgccaccataatggatgccggagcaagt

SEQ ID NO: 20933 - DNA, 1377 bp, DROSOPHILA
atgcagttcctcagtggcctgcgacaccggtactgcctgtggcgcctccgccgcctgctgggcgtggccttcgacgagggcggattccatgagggcactcgccaggcggcggtcaccatgatcgatgcagtgcgccaggcggactggccctgcatccggagttgctgcacggagcggggatcggccgacatctacggcttgtcccagatgaggagtccctactgcagtttggttcgctttcagaaggaacacctgcggcatgctcttcccgtgagggtggtgcgtcgctggatcgatggtcgctactatgtcatggtggacatgctctttgtcggcctgcgcaacctcctcgatctcggaacggagcaggaaaaggaggaaatgctccagcggattcagagcgttctggtgaactcccagatcgatgataagttcgaaccgagcaactgccgcctggccattgccgaaatagtgctcaccttctctatggaactgggcgatccccaggatcctcgggatatagaaagtgaagatcaggacagtggctggctggtggactcctacaaggtgcagcgcttcaagctgatcagcttcagtccgaaaacactgaaccttcgcgttattgactttctgaaaccggttcgacagaagattgcgggtgttgtgttcgctcgcttcgttgctcccagcacgttcataactcaactcctgctcctgctcctgctcctgcaccagctccagccactgctccctcgccaaggatgcgattgtgcgaggatgtgccggaggactttggtggcttccaatcgtgtctggtgtccactgattgctctggcggcgattgcaataacctttgcccatgtcgaccatgtcacgacaactccgctcggttttcgggccaaaggaaccctcagacagttggctccgaaaaatgtgtcgatgcacgtgacattcggatgcaatttgcaatttgattttgttccctggagaggcagtagacgggcggaggaggtgcccatcgccagcaggtcgcaagttgcaggttgcagattcagattcggcttgttgcctaagttcaaggatcaaattgattcccctttcggcagcagcagtctctccctgctcaacaatcgcgacctgctgaagactccgtccggcaactccattgtgaacttcctggtgaaaccgatgagcgtggaaatgaacacggcggacaatctgatcacgggtgccaggcgccagcgaatgatggagctcttccaggaggaccgcgcctgggaggccgccgagttgtcccgcttcggactgagctgcatcaaggccccggactgctatccctgctgcactcctttcgagtgctccaaggccaagttctag

SEQ ID NO: 20934 - protein, 458 aa, DROSOPHILA
MQFLSGLRHRYCLWRLRRLLGVAFDEGGFHEGTRQAAVTMIDAVRQADWPCIRSCCTERGSADIYGLSQMRSPYCSLVRFQKEHLRHALPVRVVRRWIDGRYYVMVDMLFVGLRNLLDLGTEQEKEEMLQRIQSVLVNSQIDDKFEPSNCRLAIAEIVLTFSMELGDPQDPRDIESEDQDSGWLVDSYKVQRFKLISFSPKTLNLRVIDFLKPVRQKIAGVVFARFVAPSTFITQLLLLLLLLHQLQPLLPRQGCDCARMCRRTLVASNRVWCPLIALAAIAITFAHVDHVTTTPLGFRAKGTLRQLAPKNVSMHVTFGCNLQFDFVPWRGSRRAEEVPIASRSQVAGCRFRFGLLPKFKDQIDSPFGSSSLSLLNNRDLLKTPSGNSIVNFLVKPMSVEMNTADNLITGARRQRMMELFQEDRAWEAAELSRFGLSCIKAPDCYPCCTPFECSKAKF

SEQ ID NO: 20935 - DNA, 4297 bp, DROSOPHILA
cttttactttaaatggtattattcgatttaaaaatttgtgacctgcatcagcaggtccaccctaatcaataaacatatggttgccattctctggaacactttcattatcaagctcaccactaatattgtgctttgcttgtgaacttttatgttgtgaaatagctgagtatttcgaatctttacaaaacaatccatctatttaactagtggcctctgaccaacacaactcagtattagcataaacattaaaagggacacattacaaaattctaaaaattataaccatggaatctgaagctcaagaacgtactgcacctgtatctgcaaacaaaagtgattcatcagcggcacctgtgctcaatatatccggaagggtcaagtcagaatggaatacaccccgtattaggggcaaaaagaagccgccggctgtcttggaagcacccaaagtgaatccgcacacatttccagcgatattaagcaggattctactgaagaccaatgctccgcctgcagctccaccgaagtttaatccagccgacggcacacagtacctttgcttcctgtgcctcgagaagccggagagtcgaaagcgcgtctatcacatgttcatcacgactgaaaaggagctgggaagcgactacgcgcacaccaggaagttgtacgagaatcgcaaggaattcatatacaccaataatatatccgtggaaacagtctgtgcacgagcactgtaccgtcgggttcaaaagaagttcacagatgtacagtggaacaagctgggcaacgttttcgagactgacatggtcggacgcagtgatgtctggggtatatctaatcgagtttacgctttgcgtatcgaggagcacgaaagactatttaattacattaagtttctgagctcaacgaagtgctaactaactacattcgattttaagtgccagtacgaattgtgatatcttgtgtttattttttatattaaatctctgctttgcggattgtttgattacagtaactttctgtagcttatcttaaattgtgtgaacccgtaatgactcaacagctgctccaaaatgtatccgttggtggcgaagaatacggctccttgcagtccaatccagtagaaggtgttccatgtgtggaactccagcaaataggccggcagcaaccacagcgcctgggcaagcagccagaggaacaggagaccgaagcaccttctccacgacagcatcttgaagttgttcaaacagagcggcagaatggccaagtaccaaatgaagtactgagaggttaccaccgagttataggtgacgatgacaaaggccacggcaaagatgcagaatggcagcgtctggcggaactgaccgaagctcaagcttaagtagaggatgagcaggaactgcggagccagcactagagtcttcaggatcgcagaaggttccgccacactcgacgcactgcccaggtactgtagaaggaactgcagcgagaagttgtgtcgcgggtccttgcgtacgaagtggtacaggtacgcttcatatatatattcccaaccgtacattgtgtagaaggtccaagtgaaggccactaggctgatcaatgttccacttatcaggcacagttgttgcttgttgggccgcaggatttggcacaggaagtcgaggggagtttgtgtcagccgcgttgatagcgataaatagtatgccaaactgaatagcaacggatacagacggaggtgtatcactagaccgtgagccaagcccgctccgaatataagccagtaactcctggtgacattgtgctcagattttaacagcaggtatatagttagtatcacgaagaagcttgagaagcaatcgccgcttccacgtgtggatattacagccgtcagcgggttgtataaccaaaagcaagcagaggcgcgggccaagttctctggatgacttcgctcatccagggcatccagcgattggtccgagtcccgtggcctgttgaacttgctaagcaggtgttgtacggtcttctggtactgactcttgatttccatgtgcaccagacggtaaataagtgtggcgatgagaagatcgaatgtcgcatacagtagtttaccccacgccggatgaagcaggatgttaaaagtctgcagatatgccatgattgggctatatcggtaagtatgcctggcgaagggtgtgtccccagccagaacttgacgggctccatcagtcaccaccttgtagtctatatcggtgtagggcacggcggactgactgtcgtgtaattgtccgtagcaaattaaagctattcgcagcagggcggatattagtagatgggtccgaaagctagtgtaaaggatgcggcgacccagtcgctgccatccagtggtcgcagcctttgtttgagtcatcgtgtttattgtttacgtttgtctaaagcttggtcttcatttccaaagcggtcttgcggatacagcttaggaactccttgaactcggtgtcgcagattttgtgctgcacgtttagatcacgcgacacgcaaaccgcatacgcagtggctttgtccgcgcacttgcttagcagaactggatagttgcggattctttggttggctttgcgcaccgattccatgccttagcttagcgcttgtgaggcggaactttgttctccggcggtggtaggggatcggcgataaagcagtcaaacaggggcttggagaagaagatcagaagtgagcctgtgatgaaggagatctggaacaggcgtggatttcgctgaatccacgtgcgtttgggtagcacagcggttcgcctgcgctgatttgcttgctgttgctccttttggtccagcaagtcttgaatttccttcggaggcctatactgcggtatggacattatttgttcctgcaaaacgagttgataatagtgtatatggaatagagaagttggctacaactcacgacttgccggttgcgttcttttccttggatgcgtctggtagataagtcttctccaaatcgattccactgcagcaaagcgattccttgtgccactttaaacagcactggcgcattgcctcaaggacatccaagcacttgtcctcctggtagtgattctctgtaaccgagtgcaagtcagcttacataaccatgaaaatggagtcaccggcggtgcttactggtcagacaggcttgtatgcggcaggcgttcggtttgcagggatccttgcgagtgtcagacatgtaatcctgcccagaattcttacgatattaaatcgctcttgcaatatgtgaaaagtacttggaagtgttctgcactcttcttcttcttggcggttgtagtcattcacagtgcacgatcaaggtagccagactgcgcgacggtcagctgtgtaggaaacctaatacatcaaagcaaaataaaaaacaatcacataaataacaacaaaaagaaataacatctcttataatgtacaaaaatttttaatctttcaaattttgatattaataccttttgcttccctgtgaataccccgcctgctgcgagagcaactgccattcacccatcgacgccgacagttgggcaccaaggaactgttcttgtgtgaaaaacacacacacatttgttttatttcactaggactcttgacgattacttcacaaatcggaaaatgccatcgaaaaagaaaaaatacaacgcacgctttccggcggtaagttgaaaccaccgattggcgacaggaaagctccagccatttggcggccgtgaacgccgaagatgggttatcagttttcgtgcatgtgtacatacatatgtacatacacgcctcgcataatcagaggctcaaaagaagtagaggagaaaccaaaccggtgcgagattataatgtttccaaaccattaccataaactccttgcagggtcgcatcaagaagatcatgcaaagcgacgaggaaatcgggaaggtggcccaggcggtgcctgttatcatctcacgcacgctggagctcttcgtggagtcgctgctgaccaagacgctgcgcatcacgaatgcgcgcaacgccaagacgctatcgccatcgcacatgaggcagtgtatcgtatccgagaaacgctttgacttcctcaaggagctggtccgcaacatacccgacatcagtgtggccgaggaggccgcctacaacgaggacgatgtgttacgcagctcgccagaggaacagtatccagattcagacacgccatatgatcttagcctgccatcgacgtcaatgcgctcgcaggcgaacggcacagctgcctacatgcgctc

SEQ ID NO: 20936 - DNA, 2180 bp, DROSOPHILA
acttccaagtacttttcacatattgcaagagcgatttaatatcgtaagaattctgggcaggattacatgtctgacactcgcaaggatccctgcaaaccgaacgcctgccgcatacaagcctgtctgaccaagaatcactaccaggaggacaagtgcttggatgtccttgaggcaatgcgccagtgctgtttaaagtggcacaaggaatcgctttgctgcagtggaatcgatttggagaagacttatctaccagacgcatccaaggaaaagaacgcaaccggcaagtcgaacaaataatgtccataccgcagtataggcctccgaaggaaattcaagacttgctggaccaaaaggagcaacagcaagcaaatcagcgcaggcgaaccgctgtgctacccaaacgcacgtggattcagcgaaatccacgcctgttccagatctccttcatcacaggctcacttctgatcttcttctccaagcccctgtttgactgctttatcgccgatcccctaccaccgccggagaacaaagttccgcctcacaagcgctaagctaaggcatggaatcggtgcgcaaagccaaccaaagaatccgcaactatccagttctgctaagcaagtgcgcggacaaagccactgcgtatgcggtttgcgtgtcgcgtgatctaaacgtgcagcacaaaatctgcgacaccgagttcaaggagttcctaagctgtatccgcaagaccgctttggaaatgaagaccaagctttagacaaacgtaaacaataaacacgatgactcaaacaaaggctgcgaccactggatggcagcgactgggtcgccgcatcctttacactagctttcggacccatctactaatatccgccctgctgcgaatagctttaatttgctacggacaattacacgacagtcagtccgccgtgccctacaccgatatagactacaaggtggtgactgatggagcccgtcaagttctggctggggacacacccttcgccaggcatacttaccgatatagcccaatcatggcatatctgcagacttttaacatcctgcttcatccggcgtggggtaaactactgtatgcgacattcgatcttctcatcgccacacttatttaccgtctggtgcacatggaaatcaagagtcagtaccagaagaccgtacaacacctgcttagcaagttcaacaggccacgggactcggaccaatcgctggatgccctggatgagcgaagtcatccagagaacttggcccgcgcctctgcttgcttttggttatacaacccgctgacggctgtaatatccacacgtggaagcggcgattgcttctcaagcttcttcgtgatactaactatatacctgctgttaaaatctgagcacaatgtcaccaggagttactggcttatattcggagcgggcttggctcacggtctagtgatacacctccgtctgtatccgttgctattcagtttggcatactatttatcgctatcaacgcggctgacacaaactcccctcgacttcctgtgccaaatcctgcggcccaacaagcaacaactgtgcctgataagtggaacattgatcagcctagtggccttcacttggaccttctacacaatgtacggttgggaatatatatatgaagcgtacctgtaccacttcgtacgcaaggacccgcgacacaacttctcgctgcagttccttctacagtacctgggcagtgcgtcgagtgtggcggaaccttctgcgatcctgaagactctagtgctggctccgcagttcctgctcatcctctacttaagcttgagcttcggtcagttccgccagacgctgccattctgcatctttgccgtggcctttgtcatcgtcacctataactcggtggtaacctctcagtacttcatttggtacttggccattctgccgctctgtttgaacaacttcaagatgctgtcgtggagaaggtgcttcggtctcctgttcctctggctgcttgcccaggcgctgtggttgctgccggcctatttgctggagttccacacatggaacaccttctactggattggactgcaaggagccgtattcttcgccaccaacggatacattttggagcagctgttgagtcattacgggttcacacaatttaagataagctacagaaagttactgtaa

SEQ ID NO: 20937 - protein, 466 aa, DROSOPHILA
MTQTKAATTGWQRLGRRILYTSFRTHLLISALLRIALICYGQLHDSQSAVPYTDIDYKVVTDGARQVLAGDTPFARHTYRYSPIMAYLQTFNILLHPAWGKLLYATFDLLIATLIYRLVHMEIKSQYQKTVQHLLSKFNRPRDSDQSLDALDERSHPENLARASACFWLYNPLTAVISTRGSGDCFSSFFVILTIYLLLKSEHNVTRSYWLIFGAGLAHGLVIHLRLYPLLFSLAYYLSLSTRLTQTPLDFLCQILRPNKQQLCLISGTLISLVAFTWTFYTMYGWEYIYEAYLYHFVRKDPRHNFSLQFLLQYLGSASSVAEPSAILKTLVLAPQFLLILYLSLSFGQFRQTLPFCIFAVAFVIVTYNSVVTSQYFIWYLAILPLCLNNFKMLSWRRCFGLLFLWLLAQALWLLPAYLLEFHTWNTFYWIGLQGAVFFATNGYILEQLLSHYGFTQFKISYRKLL

SEQ ID NO: 20938 - DNA, 6284 bp, DROSOPHILA
ttatgagcgggataatgttattgtccatgttaattgttcgcgaaagaaatacctgtccgccagtgtggccgttcgccagcttagaaaacgcacactccgcgacacctaaataggtaatgcacttagatacaactacaattacttaattaattttaacacaataaaatattcttttaaattgtaacttatttattcggcacttatttaatcgttttagtgattatttgttttaaggatatctatagttgtgccgcataccgtagggattataaggttttaagcttcgatagatattgttagcgtgttcgtaaaccatttagaccgttattttaatacgaatttttgaatggcttcacactattccggacaatttatgttatttctgaccgacatggtcggcggatcccacatttcggctaaccacagccactgcactgttccttaccctttgccactgcaatgttccttacccagtgccgttgcctcgaaatctatcttccacttccacacacctgtgccagctcatgggatccatcagaacagtcgactatgccgttgcaggctaagctggtttccttcgctcgccggttactgttctcaacacatggaacataatcataacttgctcctcgtttggaggaagatatacacaatgaggcaacgctgggtctggagtataattgaacttaggcatgctcttgtatttaaaaagtttacagcgtgtataaataatgatttacgagtacctagcataatgcttagccacgaaaaataatatgtataattgttaaattaattagaataaacaaagaattacatacaatcaactaatagataactaaaagataattatcacttttaaaaaatgaagaattaatttaaaaaattattacaatttaatttagcattagagaagaggctgcacataatagcatggtattgtataaacatataactagggatgcgtgtccgcacatctgaccttccccatcggttcagatcagacgaagacgcgcatcaagtcgctgctggttggagtggagttgcctcccggattggaactgttccccttccagggaggattgctgttggcgctgggagtgttgctgctgttcaaattgctgatgttgttcatgttgctgatgttcatgttgctgctgctgtcggacaaggtgcgcagcagctgctttttgaggagctgctgtggcgagtggctctgactttggctggcgttgtggttgctctggagcggcagggtgaagctggggcggccgaggggctgcagctgctccagcttgccggccaacagtcggcggcgtttctcgtagaaactgaaggtcagcttgttgtcctcctccttgtcgcgttccttgtccttcgtcggctgctcgccgccatcctcgctatccggtggtggcttctcctccttcttcgcctttcccattagcagttcattcaaacgcttggctgtcatgactcccggcgatccgcttgatccaccaccagcttttcctcctaccagcgccctcttattgcacctcaggcgatcttgtgcaatgacattcgatcgctgagcgtaaatggttctgcccgaggcgggattcttacccggcagaccgttgcttaacgctggcgagggcggcggcggtgtgcgggccagctgaccgaccacgcccaggtgattacctcccgacagggatagcaaattgttgttcgccttccgcgtggtcaacagattcttgcggaaggtgacgcccaggccctggggcaacttcaccatgccaaacgtgttcatggccaagggacgaggcgctccggagtacagcatcacgttaaagtagctgtcctcgtggtatttggcattggccagcgatggatggtgattgatttgaggatttgttgtgggtggctggctggcggccttggcctccagcttaacagtctttacggtgtcgctaacagtctccagtttactgaactcaaagtcggccagttcatccgccagttggtttgcctccgttccagaactcaagttggtttgtatgccgcccgattgcacgacattcacgtccacattttcgtagcccgcgttggttaggaattcggctaagaccttctgctccagcatggaaacgggattcgactcggtgatctcgtatataatactgggcaggatcatgtgctcctccagctgctgttgctgtggattgaccattgcctcatccgtcagagacggcacgttgtagacgctgaactggcgctgctgctcgtgatcctgaagcttctgatcctgctgctgctgttgctgctgctcttgcagttgctgctgctcgagcatctgctgctgctggtaaatcagttgctgcaactgcatggcatcgatggtggtcagctcctgctgatgctcttcctcgccataaacctgctgaaccgcctgctgctggtacacggcgtaatcctcgccaatggttccgtcctcaaagcgcagccttttagtggcctgtgcgggatgcgatagcgatccattctgcgcttgctgttgtgactgctgttgcgatgtgtccagagcgctctcatcgaagttattcagaatctcgttgatcagcttgctgtccagcatttcgtcgagcgtctgcgaaatggagttctcgtcggaggtgttgggcaagggcagttcctcctcatcgggcgccacctgctcggcggaaaccgctcccgtgatggaagacactgcctggtccagttcgctgagcacttgctgctgctcgtaggaattcaccagagacttatctttgttcttctccttttccgcttttattcgatgatcgctggagcccttcaactgaagaggatttcggtaattgtatcattgagttattatagtcacaattatatgaaatacctttttctttggctgcagctcgggcagcttttccgcatccgtctgaagctgggcaggtgaatagttgacccccatcgccacctcgctggaggccgctcccaacgtgggagtgggcggtaagctgcaggatgagttgctggaggaggagaacatggttatggcagccggagcagcacccacagatggtggctcctccttaacaacagcagcgacgacgggaggagcggctatggccgaactcttcttcgatccctttgactccttgtgattggactccagcagggccggagctggcgaggagtggtggcggttctttgacgacttcgaacgcgacctacttccggcggaagtgctgctgctgcccttagacgaggaggaactgctacttttactgctgctgctcttgtgacgcgacgaagacgaagacgacgtggtgctggatgaacccgcagcagccggatgctgcagtgaagccgagctgctggacccgttcgagcaactggagagcgtcgaggccgaaagcgtatccgtgggcgaacttggcacgatagccccgccctcctgactgatttccgtggcagtgagacgagagtcgctggatatggctgtcccatttggattgggattcactttgctggatgtggcctcccagacgctaggatgctgcagcgcaatgtggtgctggaaacctgccttcgtgtaacatcccgagcaggaactacagagtactatatcgcgactggccagcttcggcgccagatcgtagtaggccatgtccgccgattgcagacgctggacctgcaccttcgcctgttgatctgcgccggcggaggagttctttccaccacgcagatacgtcttctcagccgttcgcagttgcttgatgaccttttccatgtcgaagacctgctgccacttttggccctgcaggctaaacagggatagtcccgccgatcccgagccggaattggagccggccgacgagtccggcttccacattcccgacaccttgtgcttggttccattttccggataagctccaccaccggcgggggccacatcgttcaggggcattccggatagaagctgtgctcgcgggatccggggattcggtacactcgagcaaaattgccccttaaagcacctgcaaaacaggattgatttattagttccagagaaactttgatagtgacagcttttaactgatactgcaattcatcgctgataaaaaacacaaaatctggggctatgcaccatgaaccccggaccacggaatccctacgaaatgcccatgttaaaatcatcactagttttcatacaataaattcgtatattctattacatatacatatgtacgtggtttgaatcaccaccaggcgtgtttaaccctaaaactcaaatttaatcttataagtatatctcaagaagattacaactttattagatttagatttaaggtaaattaaaacaagaataatcatttagaattaattatttattttttctttatttttttatattataattaaaattttttggtgcacgttaggattaacataaacagaaccatcgttataattaaatgaatagatatcagcagaacccacttatacatatacaacatatccattgaccacaggaccctgaccctgaatacatacatacatacatatatagattttattagcaacggaaaagtattggacactgcacaaaccacttgtggagggtgtgaagactgtacgtcttggagtatttctatgcgtatattgccatttttgaatgaatctcgaaatttaacaaactgttgtttttgatatcgtaaattttcagcgaaagcttacaggtgagtgctgcccccgcccccgcgagcgccaacccctcggtacccgcaccccttggtctggatcagctgtttttgacaaccgctactcgagtggcgccgtctcgctcgcactgccgcacacatgcgcagccactcacaccgacgcacagcacactcacgcacttacccacaccaatgcaacacaaacaaagcacacgattgaaaatcacaaaataaaaatcacttaaaatgctcgcaggcaattttagtcgaatgccgaatgatatcggcattaaatgacacttacgtcgttaacacacttccatgttttgttgttttttttgtgggtttaggttaccgttctaccctacccgtggataaatcggatttttggccggcctccgtggaggaaaatgccaggtcaactcgaaaaagacgagttggttgtatagcctaattgattctgtaacgaaatcaattaaagctttctagtttgtctcgctttttcgagtttaaagattgatattatgaatatcgttgtatttgcttagggatggcaattcgcgtctcgttacgttacgttgtatttgttgcagctgcagattaagtgcgatatgttatcgatagtcgcacaggtattcgttgcatacgtagccgatatattaattacatgcatttccgctgaaaagtcagttgaatatatttatgaattaaaatctttttaaaggcgatagaaaactatacttaacatttcctatttttacaagcgtttatttgctggcacaaactataaccataattaaacgtaacattagtcatcttcatcactaagctcatcctcctcctttcttctggacttttgctccagttccttggcgtagagatccttgaaggcttcgtattccggcagggtgacgtggcaaatctttgtggcgaaactcttctcggaagtgtctgtaatctgatagagtttggggttcgtagtcggctcatttggatcggctttcggaggtcgtggcttaaagaggcccaaacgaagcaggaactggtggcgacaacgcagctcctcgaatgacaaggtaagggctgccgatttaaccaactccggcacttctatgcgcatcacgtctgtgatgaagttcagtttctcctcaatagatacctcggattgtgctatcaaatccggactgttcatcaaacacttccacacatttttgctggtggagacgcgactttgaaggaagccgatgtgggaaagtaactggtgggagtcgctaacgtccagtaactcggggtacttcgtaaggagcaggtgcagtagattctcgccgaattgacaggccctccagatttccaggcagcttattattttgtccggcgttcttttcaaaatcgcggggttaccggtaactattctaaggaaattcacggtttccaagccgtggttttgaaaagtttgatgggcccttcgccagatttcaggtgagaatacagctaacgtgggttctattttgatggcttcatcgatgtgaatttgttcaagctgcaatatcttgg

SEQ ID NO: 20939 - DNA, 3236 bp, DROSOPHILA
ccatccctaagcaaatacaacgatattcataatatcaatctttaaactcgaaaaagcgagacaaactagaaagctttaattgatttcgttacagaatcaattaggctatacaaccaactcgtctttttcgagttgacctggcattttcctccacggaggccggccaaaaatccgatttatccacgggtagggtagaacggtaacctaaacccacaaaaaaaacaacaaaacatggaagtgtgttaacgacgtgctttaaggggcaattttgctcgagtgtaccgaatccccggatcccgcgagcacagcttctatccggaatgcccctgaacgatgtggcccccgccggtggtggagcttatccggaaaatggaaccaagcacaaggtgtcgggaatgtggaagccggactcgtcggccggctccaattccggctcgggatcggcgggactatccctgtttagcctgcagggccaaaagtggcagcaggtcttcgacatggaaaaggtcatcaagcaactgcgaacggctgagaagacgtatctgcgtggtggaaagaactcctccgccggcgcagatcaacaggcgaaggtgcaggtccagcgtctgcaatcggcggacatggcctactacgatctggcgccgaagctggccagtcgcgatatagtactctgtagttcctgctcgggatgttacacgaaggcaggtttccagcaccacattgcgctgcagcatcctagcgtctgggaggccacatccagcaaagtgaatcccaatccaaatgggacagccatatccagcgactctcgtctcactgccacggaaatcagtcaggagggcggggctatcgtgccaagttcgcccacggatacgctttcggcctcgacgctctccagttgctcgaacgggtccagcagctcggcttcactgcagcatccggctgctgcgggttcatccagcaccacgtcgtcttcgtcttcgtcgcgtcacaagagcagcagcagtaaaagtagcagttcctcctcgtctaagggcagcagcagcacttccgccggaagtaggtcgcgttcgaagtcgtcaaagaaccgccaccactcctcgccagctccggccctgctggagtccaatcacaaggagtcaaagggatcgaagaagagttcggccatagccgctcctcccgtcgtcgctgctgttgttaaggaggagccaccatctgtgggtgctgctccggctgccataaccatgttctcctcctccagcaactcatcctgcagcttaccgcccactcccacgttgggagcggcctccagcgaggtggcgatgggggtcaactattcacctgcccagcttcagacggatgcggaaaagctgcccgagctgcagccaaagaaaaagttgaagggctccagcgatcatcgaataaaagcggaaaaggagaagaacaaagataagtctctggtgaattcctacgagcagcagcaagtgctcagcgaactggaccaggcagtgtcttccatcacgggagcggtttccgccgagcaggtggcgcccgatgaggaggaactgcccttgcccaacacctccgacgagaactccatttcgcagacgctcgacgaaatgctggacagcaagctgatcaacgagattctgaataacttcgatgagagcgctctggacacatcgcaacagcagtcacaacagcaagcgcagaatggatcgctatcgcatcccgcacaggccactaaaaggctgcgctttgaggacggaaccattggcgaggattacgccgtgtaccagcagcaggcggttcagcaggtttatggcgaggaagagcatcagcaggagctgaccaccatcgatgccatgcagttgcagcaactgatttaccagcagcagcagatgctcgagcagcagcaactgcaagagcagcagcaacagcagcagcaggatcagaagcttcaggatcacgagcagcagcgccagttcagcgtctacaacgtgccgtctctgacggatgaggcaatggtcaatccacagcaacagcagctggaggagcacatgatcctgcccagtattatatacgagatcaccgagtcgaatcccgtttccatgctggagcagaaggtcttagccgaattcctaaccaacgcgggctacgaaaatgtggacgtgaatgtcgtgcaatcgggcggcatacaaaccaacttgagttctggaacggaggcaaaccaactggcggatgaactggccgactttgagttcagtaaactggagactgttagcgacaccgtaaagactgttaagctggaggccaaggccgccagccagccacccacaacaaatcctcaaatcaatcaccatccatcgctggccaatgccaaataccacgaggacagctactttaacgtgatgctgtactccggagcgcctcgtcccttggccatgaacacgtttggcatggtgaagttgccccagggcctgggcgtcaccttccgcaagaatctgttgaccacgcggaaggcgaacaacaatttgctatccctgtcgggaggtaatcacctgggcgtggtcggtcagctggcccgcacaccgccgccgccctcgccagcgttaagcaacggtctgccgggtaagaatcccgcctcgggcagaaccatttacgctcagcgatcgaatgtcattgcacaagatcgcctgaggtgcaataagagggcgctggtaggaggaaaagctggtggtggatcaagcggatcgccgggagtcatgacagccaagcgtttgaatgaactgctaatgggaaaggcgaagaaggaggagaagccaccaccggatagcgaggatggcggcgagcagccgacgaaggacaaggaacgcgacaaggaggaggacaacaagctgaccttcagtttctacgagaaacgccgccgactgttggccggcaagctggagcagctgcagcccctcggccgccccagcttcaccctgccgctccagagcaaccacaacgccagccaaagtcagagccactcgccacagcagctcctcaaaaagcagctgctgcgcaccttgtccgacagcagcagcaacatgaacatcagcaacatgaacaacatcagcaatttgaacagcagcaacactcccagcgccaacagcaatcctccctggaaggggaacagttccaatccgggaggcaactccactccaaccagcagcgacttgatgcgcgtcttcgtctga

SEQ ID NO: 20940 - protein, 971 aa, DROSOPHILA
MPLNDVAPAGGGAYPENGTKHKVSGMWKPDSSAGSNSGSGSAGLSLFSLQGQKWQQVFDMEKVIKQLRTAEKTYLRGGKNSSAGADQQAKVQVQRLQSADMAYYDLAPKLASRDIVLCSSCSGCYTKAGFQHHIALQHPSVWEATSSKVNPNPNGTAISSDSRLTATEISQEGGAIVPSSPTDTLSASTLSSCSNGSSSSASLQHPAAAGSSSTTSSSSSSRHKSSSSKSSSSSSSKGSSSTSAGSRSRSKSSKNRHHSSPAPALLESNHKESKGSKKSSAIAAPPVVAAVVKEEPPSVGAAPAAITMFSSSSNSSCSLPPTPTLGAASSEVAMGVNYSPAQLQTDAEKLPELQPKKKLKGSSDHRIKAEKEKNKDKSLVNSYEQQQVLSELDQAVSSITGAVSAEQVAPDEEELPLPNTSDENSISQTLDEMLDSKLINEILNNFDESALDTSQQQSQQQAQNGSLSHPAQATKRLRFEDGTIGEDYAVYQQQAVQQVYGEEEHQQELTTIDAMQLQQLIYQQQQMLEQQQLQEQQQQQQQDQKLQDHEQQRQFSVYNVPSLTDEAMVNPQQQQLEEHMILPSIIYEITESNPVSMLEQKVLAEFLTNAGYENVDVNVVQSGGIQTNLSSGTEANQLADELADFEFSKLETVSDTVKTVKLEAKAASQPPTTNPQINHHPSLANAKYHEDSYFNVMLYSGAPRPLAMNTFGMVKLPQGLGVTFRKNLLTTRKANNNLLSLSGGNHLGVVGQLARTPPPPSPALSNGLPGKNPASGRTIYAQRSNVIAQDRLRCNKRALVGGKAGGGSSGSPGVMTAKRLNELLMGKAKKEEKPPPDSEDGGEQPTKDKERDKEEDNKLTFSFYEKRRRLLAGKLEQLQPLGRPSFTLPLQSNHNASQSQSHSPQQLLKKQLLRTLSDSSSNMNISNMNNISNLNSSNTPSANSNPPWKGNSSNPGGNSTPTSSDLMRVFV

SEQ ID NO: 20941 - DNA, 3865 bp, DROSOPHILA
acagactatagcagctgcccagcaatttcgtgaatcccagtatgaagaaggcattcaaatggcggccgtattccgtctcatcctggtgatagtcgatcaaagtgatgacaatggtgcgagcaagccctaggaccagcaacggaataacagatctccttagtttcttaagatcagtgatgctccgtgctcgatgtgaaaccaatcccatggtcaccacaaaaagcccaattcccatatccatgacagctgctccgaaagtccggcttttccggtaatccgtaggatacgaagggaaatccacagccagaatggcggcacaggttccactgtaggcagttgctctcagcagagtgaagactatgggtctcttaccgaccttatacacgaagtttggaggattgggagcgacatttccataaatatagaccagaacagctaaggaaaccaccagggagtatgtgtagctataggcactccccactgtaatcaatatcacggtgggtaatccgatcagaaacaactccaggagaaatctcctcgtggatagcatcggcaggtgtccgcagagcaggcgggaaagaacaaatcccaatatcgtgggcagaatggttagaaagctatctaaactttccttgatagatctccaggatttcaaatccacatcattaagttcgtgctctacgaagctggccacctcggcctccattatgttaaatttttattagacctcgggtttaagctaacgcataaaactataaattattacgaacttttaaagccggttgaaaaatgtaaacaaaaacaaatagtaatgtaagttagccgataaaatagccgattatgcagcagtcagctcttatctgttagcggaacagaagcgaaatcatttggtcacacttaaataaattcaaattgaaaatgcaatccttttgtataataccgatttattttgggtctggcataaagcaaaataaatgcatttaatcacaattgaggcaatctacagctcgttgcgctgcgttttggagggattttctgatgcccgtcgggggaattccttgtgggaaagaatttcctcggctgctccatcgacaagatgcacaaattccttcacatcaaagctataattggtaaacttggcgtgtgcgccgccctcgggatgatgaccctcgtcctgtgggtacaccaagtcccgctgctcccaagtgcggtagcgaacgccacgtaggcgagccaagtccttgtagcaattcggatcctcgcagttgtacagctcaaaaatgcaggcccagttgggcaggaagagcaagtgcgtcaggccagcgccatgcatgccgatgagtatgtccgtgttccgtgtgatggccaactggttggtaaaggggagcctgcggggggaactcattaaactgaagcccaaggagtgtatttaaacatttcttacctttcataggaaacacgctgtacatcgtacttatcgttggcctccaggggggccagcagctcgtcttcattcagcacttgccggtactttgtgcgacgcgatagatatgttattctgatcttttgctgtggcggcttgtagggaatctgcaggcggtgcagaatgaactcggagaaggcgcggaagagtccactattcgagcagccttggatctaaaagaagaacaccttagaaacatcgcgacacacgtttgcctccacttactatgggtgtattgtagaataagccaaagatcatcctgggcagcagcggcagcacaacgttcttgaagcatacccgcttgccctccacatcgctgagtgtccatactggtcgttgcgagaaggccttaaatgtgtccctgaagggcgaatcgtacggataggtctcccatataagtatctgcacatccgtgttgaaggccgccggatgcgactggttgacaaagagcgaggcatacaggttgaagaagtcgcagaaatgatgatacatgttgtacgtggcatcgattttcatgatgaaagtgggcgtattcaccaccacatcgcagagaccgctctccagaacgggatgtggtaagacatcaaaattacgcaactccggaccccaggactgcagagccgatccaatgtgctccatttcgcccgacagtcgagtccgattcaacttgcagtgccccagcagctgtcctggtcccagcacatccatatggtaacgaatgcgctcttcccgctgctccaagccccgaaagtcgaagagaagattccgcccacgacaaaagcgcaggtagtgcgtgcactctagcgaggaatcgcccaaataggttggcacgcattgcggcgtcagttgggagagctgctcctggatgtacccgaagtcggcctggttgtagaaggtcctaacctgtgcctccttgctcctggcccagccggtatgttccccagggcactggggcgtctggaagcggccagctggcgtgcagtcccgctcgtggccccagcaggcggatgaaatggtgcccttgccggtgagattcgtgggcagctgttgtttcagcttgggaaaggtgttcaggtaccggatgaggtgttccgacggcaggctgggcagggagaacccatcgaggtgcttggcgtcctccgccagggacaagtgtagtatcccaatgagtattggcaggattggcatcttgggttccgtttgatctacttaagtacttcgttgcgtgcgactttccagcgatttccctgcgacttctcacgctttccacggcagcatcttcaggtgcatttcacggccagcgatgatgatgatctcacctggccttaagcggctagaagacgattatgagcgggataatgttattgtccatgttaattgttcgcgaaagaaatacctgtccgccagtgtggccgttcgccagcttagaaaacgcacactccgcgacacctaaataggtaatgcacttagatacaactacaattacttaattaattttaacacaataaaatattcttttaaattgtaacttatttattcggcacttatttaatcgttttagtgattatttgttttaaggatatctatagttgtgccgcataccgtagggattataaggttttaagcttcgatagatattgttagcgtgttcgtaaaccatttagaccgttattttaatacgaatttttgaatggcttcacactattccggacaatttatgttatttctgaccgacatggtcggcggatcccacatttcggctaaccacagccactgcactgttccttaccctttgccactgcaatgttccttacccagtgccgttgcctcgaaatctatcttccacttccacacacctgtgccagctcatgggatccatcagaacagtcgactatgccgttgcaggctaagctggtttccttcgctcgccggttactgttctcaacacatggaacataatcataacttgctcctcgtttggaggaagatatacacaatgaggcaacgctgggtctggagtataattgaacttaggcatgctcttgtatttaaaaagtttacagcgtgtataaataatgatttacgagtacctagcataatgcttagccacgaaaaataatatgtataattgttaaattaattagaataaacaaagaattacatacaatcaactaatagataactaaaagataattatcacttttaaaaaatgaagaattaatttaaaaaattattacaatttaatttagcattagagaagaggctgcacataatagcatggtattgtataaacatataactagggatgcgtgtccgcacatctgaccttccccatcggttcagatcagacgaagacgcgcatcaagtcgctgctggttggag

SEQ ID NO: 20942 - DNA, 1757 bp, DROSOPHILA
aacaattaacatggacaataacattatcccgctcataatcgtcttctagccgcttaaggccaggtgagatcatcatcatcgctggccgtgaaatgcacctgaagatgctgccgtggaaagcgtgagaagtcgcagggaaatcgctggaaagtcgcacgcaacgaagtacttaagtagatcaaacggaacccaagatgccaatcctgccaatactcattgggatactacacttgtccctggcggaggacgccaagcacctcgatgggttctccctgcccagcctgccgtcggaacacctcatccggtacctgaacacctttcccaagctgaaacaacagctgcccacgaatctcaccggcaagggcaccatttcatccgcctgctggggccacgagcgggactgcacgccagctggccgcttccagacgccccagtgccctggggaacataccggctgggccaggagcaaggaggcacaggttaggaccttctacaaccaggccgacttcgggtacatccaggagcagctctcccaactgacgccgcaatgcgtgccaacctatttgggcgattcctcgctagagtgcacgcactacctgcgcttttgtcgtgggcggaatcttctcttcgactttcggggcttggagcagcgggaagagcgcattcgttaccatatggatgtgctgggaccaggacagctgctggggcactgcaagttgaatcggactcgactgtcgggcgaaatggagcacattggatcggctctgcagtcctggggtccggagttgcgtaattttgatgtcttaccacatcccgttctggagagcggtctctgcgatgtggtggtgaatacgcccactttcatcatgaaaatcgatgccacgtacaacatgtatcatcatttctgcgacttcttcaacctgtatgcctcgctctttgtcaaccagtcgcatccggcggccttcaacacggatgtgcagatacttatatgggagacctatccgtacgattcgcccttcagggacacatttaaggccttctcgcaacgaccagtatggacactcagcgatgtggagggcaagcgggtatgcttcaagaacgttgtgctgccgctgctgcccaggatgatctttggcttattctacaatacacccataatccaaggctgctcgaatagtggactcttccgcgccttctccgagttcattctgcaccgcctgcagattccctacaagccgccacagcaaaagatcagaataacatatctatcgcgtcgcacaaagtaccggcaagtgctgaatgaagacgagctgctggcccccctggaggccaacgataagtacgatgtacagcgtgtttcctatgaaaggctcccctttaccaaccagttggccatcacacggaacacggacatactcatcggcatgcatggcgctggcctgacgcacttgctcttcctgcccaactgggcctgcatttttgagctgtacaactgcgaggatccgaattgctacaaggacttggctcgcctacgtggcgttcgctaccgcacttgggagcagcgggacttggtgtacccacaggacgagggtcatcatcccgagggcggcgcacacgccaagtttaccaattatagctttgatgtgaaggaatttgtgcatcttgtcgatggagcagccgaggaaattctttcccacaaggaattcccccgacgggcatcagaaaatccctccaaaacgcagcgcaacgagctgtag

SEQ ID NO: 20943 - protein, 520 aa, DROSOPHILA
MPILPILIGILHLSLAEDAKHLDGFSLPSLPSEHLIRYLNTFPKLKQQLPTNLTGKGTISSACWGHERDCTPAGRFQTPQCPGEHTGWARSKEAQVRTFYNQADFGYIQEQLSQLTPQCVPTYLGDSSLECTHYLRFCRGRNLLFDFRGLEQREERIRYHMDVLGPGQLLGHCKLNRTRLSGEMEHIGSALQSWGPELRNFDVLPHPVLESGLCDVVVNTPTFIMKIDATYNMYHHFCDFFNLYASLFVNQSHPAAFNTDVQILIWETYPYDSPFRDTFKAFSQRPVWTLSDVEGKRVCFKNVVLPLLPRMIFGLFYNTPIIQGCSNSGLFRAFSEFILHRLQIPYKPPQQKIRITYLSRRTKYRQVLNEDELLAPLEANDKYDVQRVSYERLPFTNQLAITRNTDILIGMHGAGLTHLLFLPNWACIFELYNCEDPNCYKDLARLRGVRYRTWEQRDLVYPQDEGHHPEGGAHAKFTNYSFDVKEFVHLVDGAAEEILSHKEFPRRASENPSKTQRNEL

SEQ ID NO: 20944 - DNA, 3434 bp, DROSOPHILA
cgtaacgggaattttgaaatggaattcaggaataccccttgcagattcccacacaatgtgaccgcattccgtttgtttgcatcggcaaatgcgagttcagcactgcggtcacaccgaatctttctttattaaaataaaaaacacgacgtcaacttgcgaatttcatacaaattagccgtagaaaatgtcgcacctcgtgaaaatggaaaacggccagagccagaccatccaggagatgctgggctgcatcgagcggtaagaactgcacaaattcactcagttatgatgcttagtaaaaacataacctcgcttttgccgcagctacaacccagatcatctgaaaacactggagtcctatgtgcaggatcaggctaagaacaacacctacgacctggaggccaacctggccgtgctgaaactgtaccagttcaacccgcacatgctgaacttcgacatcacgtacaccattctgctgaagtcactgaccagcctgccgcacacggatttcgtgatggccaagtgcctgctgctgccccagcagatgaaggacgagaatgtgcagacaatcatcgacctcgccgacatactggagcgggcggacttcaccctcttctggcagcgggccgaggtgaaccgcaacatgttccgccacatcaccggcttccacgattcaattcgcaagttcgtctcgcatgtggtgggcaccacattccagacaattcgcaaggacctgcttaaggagctgctcggcggcatcgaggactcgacgctggagagctggatcaagcgcaatggctggaagaaccagggccagggactcgtcatcgtggccatgcaggacgacaaaatcaagacgaagaacattacggagaagatcgagttcgacaacgtgggcgccctgatggcccagtgcctgtaggaacctcattcgcgttcatagtccttgtctaaatttttacgaatagtaattaacggaaaaaaaataataataaaagcctgtccgtacagctaaattactttgtggtttattctcgatcggagctgctcgccaggctgctcccactcatatgatcagacttccagaactaccgaccttaaaacgtacacgtacagaactaataaagcgctatcctatttatgactgcttcttgaacttctttaaaatggggaatatcttgtcgaaggcatcgtagatctcctgccgcacctttgctccagtgagcaccacctttccggacacgaagatgaggagcacgattcgaggtcgcaccatacgatagattaagccgggaaatagctcaggctcgtagctgctgaagttgcaatgggtcagcaccaggccttccaagcgtatggggaacttgacatcgcaggagccgaccatgttttgaatcttaaagtcgaggaactttgcctgcgggagagaaagcgttagagattcgccgggaagagaaaggaaatgtaaagtcttgtcttacagggaaaccgagcttttggatgatgcgcgcatactttctcgctgccagtctggagtcgtcctcactctttgcccctgtgcacaccatcttgccggagctgaaaataagggcggtggtccggggctctcggattcgcataatcacagccgcaaatcgcttaggattgtactcggcgtttctcgcatgcaatgctattttcttgaggtccagtttgcagcacagattaaccgtggacacgatgttctgaagttgtggcacaataccgggatcagcggaacctggtgtggctggtgtcatcggcgtggaggggcccatcgtctggtggatgttgctcagggcatctccgccacctccggcccccgaaccgcccacactccgctcactcatgggcatcatgtgggccatcatgctctgcggcgtctgcggctgcatcatggactgcggagtgctcccaccgccgccgggcgcctgactctggagctgctgttgctgctgctgctgctgataggaggccgatggctggtaactctgcatttgtttgtgcgccagcgggagcgatggttcgtggccaaagagacctgatcccccactggcgtccgactgctgttgctgctgctggtgctgcacggaactggaaccgggtgccggcatcaacgaatccggctgcgatacagccggaggatggtacacaggattggccactatctgctggtccgcttccatctggtggagcggcgttccgatgctcggaatcgagaagttggggcttagcatttggtccatcttacagatggtttattgtggactccggtgaatttttcagtgactcaattcaagattgctgaacgggctcaactttgggttttaattgcatacccacagagcgggaaattaatttaatagtaataataataataatgtaatgcaaccgcgttcgtcgttgtacctgtggctcgttttgtgagaatggcaaagtcagcgctgcattttgccgcaactatcgatagctggctgggtcttacgtttatcgttacgttcttagcatttaagtatttcattgaaaatatgtatgaaaataattataacaataattatctttgattgtattttaatgtttagttaaaaatcacacttcaacgtttcaaatatttcttatacgttaaatctctcccttacgttgttgccaatcgataactaaaatggcgcacttttcaaaagaatcaagtatactttgttgtacttctgtttaatagctaaataatttgtgtataaggtgaacaaaagaaatagcgaataaataatagtgcataatacttagaaggaaaatggttattctcatctatgcagtttcagcaatagattttcgtgggcgtgaactgaaaaacgatgtgttaaaaattaattaattggaacttttgcacttggaaagtgcaattaaatggttattaaactaattagaaaaatgagaacgccgcccatgctgaaaccgaaggttgaataggccaaacttgtgacagttgccgttgaggaatgggtgtaagtatttccgtgctcatcggtgtaggaatgctgcccacttgagggtgagttttggaacgttcctcccatttcgggcactgtgtagggtccttcgttctgaccccgtatgtaaatgccgtttccaggtgtgccgaactcatggggaccatttcttccatcataattctgctgcgcatttgtcactggagaaaaatagagagagagtgttgaatggatgtggcggttctagtggttcccacacttgacttaccggcaaacaacagcgtgctcactatgaaaacaagtaaagtacacgatctcatgatgcagtttccagtcactgagctcaatttcaactgagagcggctcggtaatttacaatctatttatataaaccgatagaaagacgagctttttgccaattagcagctgagaatg

SEQ ID NO: 20945 - DNA, 1370 bp, DROSOPHILA
cgagccacaggtacaacgacgaacgcggttgcattacattattattattattactattaaattaatttcccgctctgtgggtatgcaattaaaacccaaagttgagcccgttcagcaatcttgaattgagtcactgaaaaattcaccggagtccacaataaaccatctgtaagatggaccaaatgctaagccccaacttctcgattccgagcatcggaacgccgctccaccagatggaagcggaccagcagatagtggccaatcctgtgtaccatcctccggctgtatcgcagccggattcgttgatgccggcacccggttccagttccgtgcagcaccagcagcagcaacagcagtcggacgccagtgggggatcaggtctctttggccacgaaccatcgctcccgctggcgcacaaacaaatgcagagttaccagccatcggcctcctatcagcagcagcagcagcaacagcagctccagagtcaggcgcccggcggcggtgggagcactccgcagtccatgatgcagccgcagacgccgcagagcatgatggcccacatgatgcccatgagtgagcggagtgtgggcggttcgggggccggaggtggcggagatgccctgagcaacatccaccagacgatgggcccctccacgccgatgacaccagccacaccaggttccgctgatcccggtattgtgccacaacttcagaacatcgtgtccacggttaatctgtgctgcaaactggacctcaagaaaatagcattgcatgcgagaaacgccgagtacaatcctaagcgatttgcggctgtgattatgcgaatccgagagccccggaccaccgcccttattttcagctccggcaagatggtgtgcacaggggcaaagagtgaggacgactccagactggcagcgagaaagtatgcgcgcatcatccaaaagctcggtttccctgcaaagttcctcgactttaagattcaaaacatggtcggctcctgcgatgtcaagttccccatacgcttggaaggcctggtgctgacccattgcaacttcagcagctacgagcctgagctatttcccggcttaatctatcgtatggtgcgacctcgaatcgtgctcctcatcttcgtgtccggaaaggtggtgctcactggagcaaaggtgcggcaggagatctacgatgccttcgacaagatattccccattttaaagaagttcaagaagcagtcataaataggatagcgctttattagttctgtacgtgtacgttttaaggtcggtagttctggaagtctgatcatatgagtgggagcagcctggcgagcagctccgatcgagaataaaccacaaagtaatttagctgtacgg

SEQ ID NO: 20946 - protein, 353 aa, DROSOPHILA
MDQMLSPNFSIPSIGTPLHQMEADQQIVANPVYHPPAVSQPDSLMPAPGSSSVQHQQQQQQSDASGGSGLFGHEPSLPLAHKQMQSYQPSASYQQQQQQQQLQSQAPGGGGSTPQSMMQPQTPQSMMAHMMPMSERSVGGSGAGGGGDALSNIHQTMGPSTPMTPATPGSADPGIVPQLQNIVSTVNLCCKLDLKKIALHARNAEYNPKRFAAVIMRIREPRTTALIFSSGKMVCTGAKSEDDSRLAARKYARIIQKLGFPAKFLDFKIQNMVGSCDVKFPIRLEGLVLTHCNFSSYEPELFPGLIYRMVRPRIVLLIFVSGKVVLTGAKVRQEIYDAFDKIFPILKKFKKQS

SEQ ID NO: 20947 - DNA, 3433 bp, DROSOPHILA
tatttataccaacactagcagacgaaaccatgaaatcctgttgtgccactcagacgacgcgttgtgagtgtccaacgggtctcagattggggaagaagccgcaggctccactcttcgacatgctgggcccgcatccagatgaggtcatcatgacgatcctggaccgcatcctctatctttcgggcgccacgaaaataattccattgctggagttgtcgaatgaaggtcagtaatcgaaggaagtaatataaatgcgtccatagataaaatatacccgtaggatcagcttttaagaaggaatcctgcccaccaccagcaccctgtgcaccaagcccttgcagttccggaagcagctcggcttatccatcttcatcggcctggagtacatgctgctccaagccgtcgactatctgttgttatcccaagccaacgagatgctgcgccagtccaaaagctccactagtgccctgcagtccaatggatactccgaaatcttcctgcttcaagaccgcgagtcggcttagttccgctgcctgttgtccccgccagcgtactcccagggtggacttcgatcacccggcggaggatattccgttgagaaataaggcgggcagcgccacgataagggaacagataagccgatcaatttccacctgctcggtggcctgtcaacagctgaaagacaagcttacatcccagattgcccaaggacacaaggaccaaaagtggttgtggacccgtttgattcgtggcaacgatgggtgcatggtgtacgaggtgtacaaggattccgatgtagacaactctccctctaagatcgggtcggaggcacccatcatcctttttctagtcatgccgaatggttgcatcatgccctttgagtctatttgtggtccttaggaagatggtactcgttttgtatactttttagcctgtggtcagttaaaaataaactttcacccgtactttgtattttgctatttaatttatacaacaaatactaagctacacgtatgcctttttttagcataaggaagaccactccagcacaaacaaacatatagatggacagtataacaacagactccagatcacttcgatgacccgggttcagggacatgttgaccattcccgtaaggaaattggagatcatgaagtgagtcagaccgttcatgttcagactttcaacaaaggtgggcaaggatatgttcttttgcccgtcatctctaattgactttttagaacaaatatctggccgtacgagtttcagctcaaagaagaacgcgtagatcacaattaggcttagggagacagcgaaaatccagattacatagccaaaactaaaagttacacgtgctatgcccgttagaaaagaacttataaaaaccaatttccaacagagaatggccacgaaaagaatactctttaactttcttattagtccttgataagtcaggctatcacgggaagtataccacttggcaaagtaaatgctgagcaaatagagagccacacatccgtgtagggaacttaagccttcccgattggcactgaaaaacccctcatggggtgcagaagacatgacgaattcggagagtcccagttggagcaccacttcgtgaaggaatagcaaacctaaaatcgtaggaaattaaaatttattgcattattattttttctggacctacctattgcaagtgccaggagctgttcatcagagtttaccaacagactatagcagctgcccagcaatttcgtgaatcccagtatgaagaaggcattcaaatggcggccgtattccgtctcatcctggtgatagtcgatcaaagtgatgacaatggtgcgagcaagccctaggaccagcaacggaataacagatctccttagtttcttaagatcagtgatgctccgtgctcgatgtgaaaccaatcccatggtcaccacaaaaagcccaattcccatatccatgacagctgctccgaaagtccggcttttccggtaatccgtaggatacgaagggaaatccacagccagaatggcggcacaggttccactgtaggcagttgctctcagcagagtgaagactatgggtctcttaccgaccttatacacgaagtttggaggattgggagcgacatttccataaatatagaccagaacagctaaggaaaccaccagggagtatgtgtagctataggcactccccactgtaatcaatatcacggtgggtaatccgatcagaaacaactccaggagaaatctcctcgtggatagcatcggcaggtgtccgcagagcaggcgggaaagaacaaatcccaatatcgtgggcagaatggttagaaagctatctaaactttccttgatagatctccaggatttcaaatccacatcattaagttcgtgctctacgaagctggccacctcggcctccattatgttaaatttttattagacctcgggtttaagctaacgcataaaactataaattattacgaacttttaaagccggttgaaaaatgtaaacaaaaacaaatagtaatgtaagttagccgataaaatagccgattatgcagcagtcagctcttatctgttagcggaacagaagcgaaatcatttggtcacacttaaataaattcaaattgaaaatgcaatccttttgtataataccgatttattttgggtctggcataaagcaaaataaatgcatttaatcacaattgaggcaatctacagctcgttgcgctgcgttttggagggattttctgatgcccgtcgggggaattccttgtgggaaagaatttcctcggctgctccatcgacaagatgcacaaattccttcacatcaaagctataattggtaaacttggcgtgtgcgccgccctcgggatgatgaccctcgtcctgtgggtacaccaagtcccgctgctcccaagtgcggtagcgaacgccacgtaggcgagccaagtccttgtagcaattcggatcctcgcagttgtacagctcaaaaatgcaggcccagttgggcaggaagagcaagtgcgtcaggccagcgccatgcatgccgatgagtatgtccgtgttccgtgtgatggccaactggttggtaaaggggagcctgcggggggaactcattaaactgaagcccaaggagtgtatttaaacatttcttacctttcataggaaacacgctgtacatcgtacttatcgttggcctccaggggggccagcagctcgtcttcattcagcacttgccggtactttgtgcgacgcgatagatatgttattctgatcttttgctgtggcggcttgtagggaatctgcaggcggtgcagaatgaactcggagaaggcgcggaagagtccactattcgagcagccttggatctaaaagaagaacaccttagaaacatcgcgacacacgtttgcctccactt

SEQ ID NO: 20948 - DNA, 1206 bp, DROSOPHILA
atggaggccgaggtggccagcttcgtagagcacgaacttaatgatgtggatttgaaatcctggagatctatcaaggaaagtttagatagctttctaaccattctgcccacgatattgggatttgttctttcccgcctgctctgcggacacctgccgatgctatccacgaggagatttctcctggagttgtttctgatcggattacccaccgtgatattgattacagtggggagtgcctatagctacacatactccctggtggtttccttagctgttctggtctatatttatggaaatgtcgctcccaatcctccaaacttcgtgtataaggtcggtaagagacccatagtcttcactctgctgagagcaactgcctacagtggaacctgtgccgccattctggctgtggatttcccttcgtatcctacggattaccggaaaagccggactttcggagcagctgtcatggatatgggaattgggctttttgtggtgaccatgggattggtttcacatcgagcacggagcatcactgatcttaagaaactaaggagatctgttattccgttgctggtcctagggcttgctcgcaccattgtcatcactttgatcgactatcaccaggatgagacggaatacggccgccatttgaatgccttcttcatactgggattcacgaaattgctgggcagctgctatagtctgttggtaaactctgatgaacagctcctggcacttgcaataggtttgctattccttcacgaagtggtgctccaactgggactctccgaattcgtcatgtcttctgcaccccatgaggggtttttcagtgccaatcgggaaggcttaagttccctacacggatgtgtggctctctatttgctcagcatttactttgccaagtgcctaattgtgatctacgcgttcttctttgagctgaaactcgtacggccagatatttgttctaaaaagtcaattagagatgacgggcaaaagaacatatccttgcccacctttgttgaaagtctgaacatgaacggtctgactcacttcatgatctccaatttccttacgggaatggtcaacatgtccctgaacccgggtcatcgaagtgatctggagtctgttgttatactgtccatctatatgtttgtttgtgctggagtggtcttccttatgctaaaaaaaggcatacgtgtagcttag

SEQ ID NO: 20949 - protein, 401 aa, DROSOPHILA
MEAEVASFVEHELNDVDLKSWRSIKESLDSFLTILPTILGFVLSRLLCGHLPMLSTRRFLLELFLIGLPTVILITVGSAYSYTYSLVVSLAVLVYIYGNVAPNPPNFVYKVGKRPIVFTLLRATAYSGTCAAILAVDFPSYPTDYRKSRTFGAAVMDMGIGLFVVTMGLVSHRARSITDLKKLRRSVIPLLVLGLARTIVITLIDYHQDETEYGRHLNAFFILGFTKLLGSCYSLLVNSDEQLLALAIGLLFLHEVVLQLGLSEFVMSSAPHEGFFSANREGLSSLHGCVALYLLSIYFAKCLIVIYAFFFELKLVRPDICSKKSIRDDGQKNISLPTFVESLNMNGLTHFMISNFLTGMVNMSLNPGHRSDLESVVILSIYMFVCAGVVFLMLKKGIRVA

SEQ ID NO: 20950 - DNA, 3488 bp, DROSOPHILA
atttatttcttaaaaagtgaaatccattaacacaaattccttggcccactatctttgtaccccctcccccaaccaaacagccaaccatcctccctctcccacctgcttcaaaccatatctttatgtcttggtcagaccattcacgtggctcttatgttccggttttccagcttttccgctgctgcctggccagaggaaaattgcaatcacctttgtgattgtgttctgcttttcagctccatcgctcggcattcaacagttttcgctttgtgcactaaaagtattaaatttcttcaaatattctcggtacacgtgtttgtatgtacatacatacatgtatgtatgtacgtacatatgtacataagtacctacatatctacataccgagcaaaagtcacttttgaaacgtatgtatgtgtatgtatgtatgttttctgtgcgtttgttgtttagatggtcaaagatttggttagaaagacacattttcatggcattcggttagtggtattacttatttaattatttacgaaaatcgttcataaaatcaattcaaatggcagataataccagatttcccaaaagaagcttattaatactgagtgcaggattttctgtcagggttttgcacatcaaataacacaactgtacatagcttctatcgaacttgtcaggttgaggaatttttttgatgtgacataggcgacaaatccaaagtttattcaaaaggcagtaattataagcatttgcagctggcgaggcattttgtcgggtaaggcgatcctccttaagaagtgctgattcagtcaaatccactatttcaaccgacgctgcaaacattctgaccattaagaccagggcgcgggaacttcaccgaggaaatgcgcttagtacgacgcaatccagaagcgcatgcagaatgcacagcaggttctccagctggtcatctcggacagctgtactggcgctgcgatcccgccatgaacaagcatgtggagggcctatgacctatggccatgtcgcttgtctgctgcaggtctttgtggagaacgaaatcaacctgagtcccgaccagagctgcatgaactgctgcggaggctgccatgacacccgctcgagcggttgttacaaggcggaggaggagttctgtggccagcaggccgcttgcaagggaaggctctacaaatgcaacaccatcgagtccgaaagtttataatctttgtggggaccaaaaacaacagctaagaccgctgctaccaaaggtaatccctatattaatatataaaccataacaaaataaaatcccttttatttccagtgtggatttcgatctagaaaccatatgtgcttgagtttagataacgtaaacagaataattttaacagctaacagttggcgcgcaactaacagctctgttagcccggccggcgcaacagcgaaaaatccctagcgcttcaccaaaaatcccgcaccggcggcttgatctctgtgacattgaagttgcgattgaaagcaagcctgttaaccacatgttatctgggtttttgcgacgaggcgtccaaagagcacggttcaccttcacccagcaactcggcgaagatcttttgagcggcgcagcggcaacactccacacccagatacgcatgatggatgacattgcgctggacgcggccaagaagacggcggcccgcacggcggtggaccagtgggtgactgaggatacgaagattctggggattggcagcggatcgacggtggtgtacgccgtgcagcggatcgcggagcgcgtgtggaaggagggcgagctgacggacctcatctgcgtgccctcgtcctaccaggcgcgccatctgatactcgactacaaccttaacctgggcgatctggacaggaatcccaacatagacgtggccatcgacggggccgacgaggtcgatcgccatatggtgctgatcaagggcggcggcggctgcttgctgcaggagaaggtggtggcctcctgcgccaagcacttcatcgtggtggccgactacacaaagaactccatccgcctgggcgagcagtggtgccgcggcgtgcccatcgaggtggcgcccatggcgtacgtgcccatcaagctgcacatcgaggcgcttttcggcggcgaggcctcgttgcgtatggccaaggtgaaggcgggacccattgtcacggacaatggcaacttcctcctggactggaagttcatcgccaacagggagtacgactgggacgaggtcaaccgcgccatcaccctcatcccgggcgtcctggagacgggcctgttcgtgaacatggcccacaaatgctactacggcatggccaatggctcggtcaaggtccagaacaagtagttcttgggcggagttgggggagcgctttttgcatttatgtttcaccaagttgttccttaaattttaggtttgccatttgtaatggatttaaatacatattgagttcttagccgagaaaacgatgtgtcctaacttgaaagtttcagcaaacgaatcttattcagcttcttcattcaagtataacatcgaaatacgtccaaatcaccacaaaagggtatccattacactgaaatcagacccactaaatctcaattggttacagttccactacaataaagtggatgtcgaatgtcagttcacatgcgctttgtatacttttgtctcgattgcggctacaaaaataaataaacattaaacaagctagatctagaaggccttcttggtccgcccagggagcagggcctctttcagatactggaacagcgacagcaggccctgcttcttgttacgcgagaagtagttgctgaccacgtccggactgcgccggctctggtcgctgacggtggtgggcaggacactgtcattcgcactcagcgagacgaacagggcgaagggcacgatccacatgcagatggtaaagtaagccagcacctgaaagtgtaaatttcctttaggcgtttgctgcggcctaattcaagttgtatgtaaacaaactgatgatgtggatacacaatgcaatgcatattgcatataatggctgtataaaaacgtacatacgtttgtacgtagcgaatgcgctttccatgactaatgatttatgcaatacatatgctcacctgcgtgaaaggcacatagacagtgacgaaatgctggaaggccaggaagtgattgaccaccagcatggccagggagcccagcagcggcagcgagagcaggcgcacgaaggggaatccactcatgatgcccaggtggaagccctgcgccaccagtccgcagatgataaggctccacggcaggtcctcgaacagcagcagcaggatgtagacgaagatcgtgaagctgatcagaaataggatgcacttcctagccgccgtcgtgtactcctcggccagctccgccagataatagagaccagccactggaaatacaaattgcagacgttgcaattggacaagtgcg

SEQ ID NO: 20951 - DNA, 1097 bp, DROSOPHILA
atgacctatggccatgtcgcttgtctgctgcaggtctttgtggagaacgaaatcaacctgagtcccgaccagagctgcatgaactgctgcggaggctgccatgacacccgctcgagcggttgttacaaggcggaggaggagttctgtggccagcaggccgcttgcaagggaaggctctacaaatgcaacaccatcgagtccgaaaatcttttgagcggcgcagcggcaacactccacacccagatacgcatgatggatgacattgcgctggacgcggccaagaagacggcggcccgcacggcggtggaccagtgggtgactgaggatacgaagattctggggattggcagcggatcgacggtggtgtacgccgtgcagcggatcgcggagcgcgtgtggaaggagggcgagctgacggacctcatctgcgtgccctcgtcctaccaggcgcgccatctgatactcgactacaaccttaacctgggcgatctggacaggaatcccaacatagacgtggccatcgacggggccgacgaggtcgatcgccatatggtgctgatcaagggcggcggcggctgcttgctgcaggagaaggtggtggcctcctgcgccaagcacttcatcgtggtggccgactacacaaagaactccatccgcctgggcgagcagtggtgccgcggcgtgcccatcgaggtggcgcccatggcgtacgtgcccatcaagctgcacatcgaggcgcttttcggcggcgaggcctcgttgcgtatggccaaggtgaaggcgggacccattgtcacggacaatggcaacttcctcctggactggaagttcatcgccaacagggagtacgactgggacgaggtcaaccgcgccatcaccctcatcccgggcgtcctggagacgggcctgttcgtgaacatggcccacaaatgctactacggcatggccaatggctcggtcaaggtccagaacaagtagttcttgggcggagttgggggagcgctttttgcatttatgtttcaccaagttgttccttaaattttaggtttgccatttgtaatggatttaaatacatattgagttcttagccgagaaaa

SEQ ID NO: 20952 - protein, 325 aa, DROSOPHILA
MTYGHVACLLQVFVENEINLSPDQSCMNCCGGCHDTRSSGCYKAEEEFCGQQAACKGRLYKCNTIESENLLSGAAATLHTQIRMMDDIALDAAKKTAARTAVDQWVTEDTKILGIGSGSTVVYAVQRIAERVWKEGELTDLICVPSSYQARHLILDYNLNLGDLDRNPNIDVAIDGADEVDRHMVLIKGGGGCLLQEKVVASCAKHFIVVADYTKNSIRLGEQWCRGVPIEVAPMAYVPIKLHIEALFGGEASLRMAKVKAGPIVTDNGNFLLDWKFIANREYDWDEVNRAITLIPGVLETGLFVNMAHKCYYGMANGSVKVQNK

SEQ ID NO: 20953 - DNA, 2731 bp, DROSOPHILA
atgtaaacaaactgatgatgtggatacacaatgcaatgcatattgcatataatggctgtataaaaacgtacatacgtttgtacgtagcgaatgcgctttccatgactaatgatttatgcaatacatatgctcacctgcgtgaaaggcacatagacagtgacgaaatgctggaaggccaggaagtgattgaccaccagcatggccagggagcccagcagcggcagcgagagcaggcgcacgaaggggaatccactcatgatgcccaggtggaagccctgcgccaccagtccgcagatgataaggctccacggcaggtcctcgaacagcagcagcaggatgtagacgaagatcgtgaagctgatcagaaataggatgcacttcctagccgccgtcgtgtactcctcggccagctccgccagataatagagaccagccactggaaatacaaattgcagacgttgcaattggacaagtgcggctgcacggcgacagctcaccaatcgacagggtgaggaacacgatctgtatggccagcgaaacccatcccagcaggtacaggacggccatcttgcgtacttcaggcggaatcgaaggatatatacggctcaaatcggccgacaaaacaaaacaatccgattagagtggcgtgtggtgtgtggctcgaaataccaaacatttaatcagcttgtatagaaacgggcacactaatgcgcagagctgccagatattctcgttccaacgctttttcaaatattttttgtgggaaacatgaggaatttaggattgaaatccatatgcaaactaactaatgtgagcagcagcatccatggaccatgacttaaaaatatctgcaaatgaagtaaaaatacattcataagtaaaacgagttcaattctttataaaatgtcggatatcaaaaccgaatatcttagaaagcaaccgtttcaaatttcatctgaagcaaacagtctagattctgcttttgatatcctgcaaattgtccagccttttcgaaaaatccgtaacttttcgtatgtgttccatactcgcacgtgcaaggatgttttgtgcaggaatagtgcagcgtagactgagcatgggtctcaatccaaagtgagtagcgcttgcacataactccttcccttaaacaccccatccgaaatccctgaagactcggcctggcgcccaggaagctctactccgaggagaagaagcccccgggtgttttcctttggggcggcggacttggcaagctgcagggcggtctcaaggaggaggagtacttcatttcgttgacccaaaccctcgtgggcaagatgcgggacaagaaggagcccggcgactacctgcccaactgggacgagttccagaagactctggaccacgcctcgctgggcagcacctcttccatgaacaagcacaagaacgtactcgaggaggcctttttcctgaacaaggttgctataagtctccagctcatttttcttctaatttccattgcaatatctttgctttcagactgcagacgacatcaaattattgcacgatcgtgcccaagaagagctcaaatctcgccatactgccacagaactggaactcgaatcagatccccagaacaccaaatagttagttgtttatgtttaaatgccatacaccgatttcttcaggcgcatcatcatcataatcacccaacttatccacatgacacggctcaataaaattgttagttgcaatctttgtagaaagtttttatggaattaaggaagtaattaaaaatccattgggtcatcccagttgattaaaactaaagttctttagcccctatttagtgaatgtgtttctatttccgtgcccactcagtatttttagcagcgctattgtccaatgttcaccagtttgttttcgcaagtcgtcgaaatcgaaatttcagcggctactcatcccttatatatagcttaactatactatataaaccgataaaccgatagaggcaaacatgtttacactgcgacgattcagtcagcgctggtatcccaagcagattcagtaggtttcgcgatttggagagcagttgcgtaagattctagaaccgttttcgaatcgctttgcaggcacttgaagatgtcgcagatcggagaactgggcagtggagccggcaacggcggcggcggcggcggatccatccgggaggcgggcggttcatttggcaaaatggaggctgctcgcgaggaggagttcttctacaagcaggtgagctctttctactacaccagactgtacacgaggtaaagattccatgtttccctgcagcaaaaggagcaactgaagaacctgaagaccaagacggagcctaaggcaccagaggctcccaagaagtgagcccaaccaggagctttgaactccactagcttaactatggttaggctggattgtctgaattgtatttaatgggaatggtactccaaatatattttgtttaatttacaactggttgtgtattggataactcccatccctgatcagctgatcgccccgcggctcacccaaactgcaagcctaaactttccccagaccgctccacttccatttgtttacgaacagcgctgcaaagcggaacagccgacagataagcgtcagtgtaagcgcagctgataacgggcggcggagtggcgacctaaagacgcatggaccgcgcaggcagatggaaacagttcgcaccggttcgctcgag

SEQ ID NO: 20954 - DNA, 612 bp, DROSOPHILA
tccagccttttcgaaaaatccgtaacttttcgtatgtgttccatactcgcacgtgcaaggatgttttgtgcaggaatagtgcagcgtagactgagcatgggtctcaatccaaaactcggcctggcgcccaggaagctctactccgaggagaagaagcccccgggtgttttcctttggggcggcggacttggcaagctgcagggcggtctcaaggaggaggagtacttcatttcgttgacccaaaccctcgtgggcaagatgcgggacaagaaggagcccggcgactacctgcccaactgggacgagttccagaagactctggaccacgcctcgctgggcagcacctcttccatgaacaagcacaagaacgtactcgaggaggcctttttcctgaacaagactgcagacgacatcaaattattgcacgatcgtgcccaagaagagctcaaatctcgccatactgccacagaactggaactcgaatcagatccccagaacaccaaatagttagttgtttatgtttaaatgccatacaccgatttcttcaggcgcatcatcatcataatcacccaacttatccacatgacacggctcaataaaattgttagttgc

SEQ ID NO: 20955 - protein, 136 aa, DROSOPHILA
MGLNPKLGLAPRKLYSEEKKPPGVFLWGGGLGKLQGGLKEEEYFISLTQTLVGKMRDKKEPGDYLPNWDEFQKTLDHASLGSTSSMNKHKNVLEEAFFLNKTADDIKLLHDRAQEELKSRHTATELELESDPQNTK

SEQ ID NO: 20956 - DNA, 2270 bp, DROSOPHILA
aaaacttgtagacagcttgttatgaagaattaaacaatatatatagcagctggtcacaaaattgcaatgaacacgacctttttgttcgttttaagtgctaacggaaaattaatacctttggttgcaaatatgggcttttcgctttttcctctgcacttctctgttttttcccgttcgtcactccactcgaactgcacttcagatctgcatggcattcctgtcgcattaatatagcgccatctccagcgcgacggcagacatcattatttttaaaaattcagtcgttgcataataatgaatccatacatacatatacgtacgtgtgtcattggtccgggccaaaaattaatgagtgggcgtgggcaattgttgcacgcaccgaactcgactactttaagtttcgatgctgcgccaaagagataaatcaggtggaaactttttcagcgccaatcccggcgaatatatcatgtcaagccaagactctgcgcccaaaatccacatggcgacggattaggccaggtcgggatgaaatactgtcctggggcgtgagcagattttcgccacgagctttatgtgccatgccgtggcatacacatactcacactcataaaaggtgttgcttcgcctgtccctttcattttatgtctctctctaaatacacacacacacacacacacacatgctggcaaagggccacgtggcaggtgtgtgtgcacattaaaggccataaaaaatgcataaaatgcatttctcgcagtccgaaaagcaaacacaaaatactaaagctcccagcatgcaaaatacacagcacataaattgcaaagccacataacttcggaatacttacgtgtgtagccttcagagcaccagtcgtcgtccagtagacgccatgccggattataagctcctaacctcaaagcataattaaaacactttgcagaacttaagggaatgcgttcattcggcttttattggacttatcaaagactcctttcgccacttagttggtttttttcttagcggcacctccttcacgcaatccgttgcgaaaacgacggcgcagattcttgaggtaccgcatccttcccgttccctgcgccttgcgacccttggcctttcgggaccagttgaagcttcgggtcttggccgcaggatagccgcactgggagcacttcgatttctgcagatggtacgacgagttgccgcaccggcgacagatggtgtgcgtcttgttgtggcgctttccaaaactagtggttcccttggtcatctttcttcaatgcgattctggccaaaatggccaaatgatatactagataaattccggagtcaaagaaagttctgctctgaagaactatgccaggcggaaagaaatgttctgttgatgatactttaatgatagaaaccttgtaagctagtttcgattgcaatcaatccttatcgatgattgtattaacaacactgggtttatgtattaaataacatagagattctctattagatttctttattagatttagattagagattgcggagaattcgaatttttttgcgcggttttgctgaaaaatggaatagtattttatcagttcgattaaatctttagatcttcgcttgaaattctctaagccactatcacgtgcgtgacatttgccaattgctgcgaaattgcgcgcaaattataccaatctgccggcgtaatcattgaaaacttatcaattttccgcagacggcgtcgcaatcgcagggaccttggaaaaatgtggggaaatcaaatatttatgatatgtttgagcaacattttgctgccagttgcctgcgggaaaagtaaactgcaaattcttccttttcggctgcattttcgtttgccttggcatttggatttatgtgcgtgccgtttgaaaattcaatttaattctcattttttcctgccatcgcggacgctgctgctgtgggatatcctgtgctcctttgcatatcgactaagttatggttcatcgggaattgtgttagctgtgtcgaaattcagttttctgtgggctcacagattcattggaagagccatatttcatgaatttaacatcctatcatagcacgatctcagatgtctgcataaaaatcataatttctacactcttaggcatcatttatttgctttatacattttttttttgtggctattctagtgttttggaaaaattttaaaaagtacaaagggcaattgaaattgaatatcgttaataaaaagggatcgatcctttacgtattat

SEQ ID NO: 20957 - DNA, 270 bp, DROSOPHILA
atgaccaagggaaccactagttttggaaagcgccacaacaagacgcacaccatctgtcgccggtgcggcaactcgtcgtaccatctgcagaaatcgaagtgctcccagtgcggctatcctgcggccaagacccgaagcttcaactggtcccgaaaggccaagggtcgcaaggcgcagggaacgggaaggatgcggtacctcaagaatctgcgccgtcgttttcgcaacggattgcgtgaaggaggtgccgctaagaaaaaaaccaactaa

SEQ ID NO: 20958 - protein, 89 aa, DROSOPHILA
MTKGTTSFGKRHNKTHTICRRCGNSSYHLQKSKCSQCGYPAAKTRSFNWSRKAKGRKAQGTGRMRYLKNLRRRFRNGLREGGAAKKKTN

SEQ ID NO: 20959 - DNA, 5612 bp, DROSOPHILA
tccgtacgtatccgtacgtatccgtatatccgtgcatccggatccgggatctggagtatcggggaagatgcttctgtggccacttcccctttcccagtttttgggaatgcgtttgagagcactgctgcacattctattgtgccccgaatggcaatctgtacttttaattgccctagaaaaccgagatttccacaatcttaatccactttgattgtggcttcgcttttccaacatttgcggctaggcaaaagttttcccttgctgcttgctgtttgtgcccctcgcctcttctctccacagctttcctatccactcctcgcccgtttgtttatttgttttcgctttaattaagttttattatacaaattaacacatgcgggtgaaataacacacactcgcagatgcaaatggaagcctcgagctgctttgccagtgtgcggcggggttatgaatttttaattaaatcgtattactaagtcaataattaaataagccatgtcatcgccaaacgcctgagtgacagtttcgtaaatggaaaactttcacatatcgacgagaaggtaattgtttgtgtctcgcaagataatccaatcgaaagagttatccaaacgtgattatgattacaatctttctatagttcagtttgtgccctagcaaattgtagtttattggcccttaagcgcagtagattttccaaaaaataaacacagctcccagtcaaacacacagtgcccgtgttttcttagaaaatgttatttattgggttttctccttcagtgcgtcacatctgtatcggtatctgtatctctgtctgtgtctgtatctgtatctgtatctgtgaatgtatctgcatctgtgtcggcatcgtataagtataaatattagtcaggtaggcgaatatgccggtcctaatacgtttttaagcattaatgcaatttggctaattgaaatacatatgcatgaagtaacctcatggggcccattaaagctagccgcgccatcacagcggcggataggcgttcttcgcataattggcggccacacaatagttggtggccccaaagaaggagcagacgccactgccgctggcaccactcgatccaaatcccccgtagcagttcgtatagttctggcacgagcgcagctccagcggcccaaagttgagggcgtatgcgccggggggcggtggcggctgtgggtgtgggtgtggcatattggcatatttgtgcatattattgctaatcggcgccggcaccaactgaggagccgtatccagaagtgtcctggagcccacgctccgttcgttccgccggaatttcgcacgccgattctgaaaccagacctgaaacgggcgtccaagtaattgataggggaattagctgcaatggattgttaactaagttagcagatagctgctggaatgtatgtgcaacacaatgggatacggtgtggctttctattaggtgaacacttaatatttaaacaggtatcatcgaagcttaccaatgcaattaaaacccacctgaactctggcctcgctcagatgcaccttggtggccagctcctcgcgaacaaaggcatccggatagtgagtgcgttcgaagaccttctccaaggccgtcaattgggcggagctgaaggtggtgcgattccggcgcggcttcctcgagtggtggccaccacccgccggcagatttccggagcagggagctggccgatctgcgccaccgcatcctgcgccagtggggcctgcaatcagggagccattaaattgggaattttcactttcacttttacttttgcgttttccttttcccgagggtcgaatgaaaaatctctttgacggactgaggtgaaaaacgctcgtaaataatcgataagagccaacggatatcaattaatttggcagccagctaggaaatttacttttatggcttgtcgtgaacacataaaattttgcattccgtttgatccgtcggctgggggccacgaaaggagtggagtggggactttggggctttagggagtgggagggggggtcataaacaaatggcatgagccataaaatatcttttgacgacatcggcggacagctgtctactaatttcgtcgcccaacaaacatgagctagcgcatttacgatctattaattaaagtgaaattgtgacattaagcggtcataagcgggctccctgcttcaggcgaccattaattgattttccatagaattggcttgaaaaccgatttacaaaagacttaagccgttttccttcgaatttatctattttcaaactaattggacggaatgctagggaaaaaattaagcatttcagctaaaagccggaggaaaaaactaaaatgagatcattatattattatattatatggttttattttgcatggctgcatgggctgtagtgagtattacactctccttcgagtttcagtttttagtcttgtatcgataaattgcttctgatttctccgcctcgcagcctgctggaatttcagggtggccatcgccgtgagtatccccatcgccatcagatatcctcctacccacgccatttgtctcaatttgtcagccgagctgtccacggagttgggaactgcatcgtagatcagctcggagcactccaagtacacggaatagtgggaaacgggagcaactgcatcggcaactgatgtcccaggggatgggaaggggagtttggggcactgagtgaagggaagatctttaatttgaattgccaacgagcgataaaaaacagttgcggcttaataaaaaaccaacaaatcgaaagggaaacctcaatcagattttcagagcggcaacggcaaggggtgaagaatgactgagcagttgcactgtgagaaatcaatgggggttggggcactgcatgaactacttgctacaacaaataaatcattgttaaaagggagtacctttgcatatttccaataaaatgttatcgaatcatattataaagtgaacaaagttcacctcgccttttaatctatgagcataacagatagattcgattttttaagtggcaggtaaactgtttttcttacagtgcctggatgctactggcacatgttacaatccgatggagcgacgaaaataaacgaggggtgagggggggggggcggggctaggaagtagtggcagtggagtgcgtgctgcgtctgggactggttacagtgggactggcgttttatatgctccacttggaaattatagtcgtggcagctagtcgctgcctcggatgcttcaaaggcatgcggccactgagggaatatcatgtcagctttgattacgttttgtcatgttgacaatgttgaagtgttgtcggctcggaaatgtttcctctgccacggatagaaatccaaaaaaaaatataagcacgggaagaactttacacgaactgccagagtttcggttcctctgcgtttttcggtgggatcttcgttttcggcaaggatagcgctgcaaattatgccagagctgccaaccagtagcaatatgttgacagctttctcccggtcggttaatgcgcagactatggggcactgggggcacggaggggttaaagccgcaaccgcaacaggaaaaatgcacggagatgacattgcagcggcattgggagcagcgaaatgagcgaatgtcgcccacatctggcacctaattgtcatccatgagttgccccacggcccccgcacatttatatgaattctcccaccgcatatacggtagcacctatttgtgcatatctaaagatatggcagctgtgcgaataacgtcataagttctcttggcccgcaactcgcacgaatctatcatttatgaattaggcacagtaagcctcataaagttgcagaactcaaatgcagatgtaactaaactcctgtggcattacgtattctgttgcacataattgagcacatctgtgaactatgccatttaagaggcttttaaaattaaatgaaccagtgctccacacccagattaattacatttcgagagtgatgaatatttttgatagaaaataataaaaacagtattcattttggttttcatggtctaattcagccatgaaagcctttgactttgaatgaaaatgcaataacattccaacataacattgcacttgcctgacctgagtaatgggtatgtgatagtcgtttatctcgactttctttcgttttaatatgcaaaaatttacctaactatctataattcaaagcagattgattgatttgttttgcttttattgcaagttttcacatttcactcacagaattttttatttatctgcactataagcacaagattgttccatttgaactcaccgaagttgctactgagttccatggccatttttcccttggaataggcgtcgtgtttcatttccatgatattgtccacggagaatctgtgaattttatccaggttcctgccactttcttcccgatcctccagcttgtcctcggactccaggttgtgcgattggtgagatgagtatatctcgccggaaaccgtcggtccgtagtaaaaatttcccggattaccgacgggcagcgaatgcaattgctgctggtagttaagcatgtttaggatatccgtctcgagttttacttaaaggttgaactcttaactttgggctgtattaactgaacaacaaactgaactcaagataatagaattgattttttcgaattttaaactcaattcttaatgtgtccgattgattgaattaatttgtgcaatttgtgttatgttcgcctgccgcaaatgggggcatcctgtgcgaacttggtaattggattagcacacaacacataaacgagttaattacgataattgtcgcgacgatactaaaccgtgccaaagtcgtgtgcccactgaaattagcctcaaaatcgaaagagtgcttcgccagatcccatgcccatcccccatctcccatcccccatccaccattccccagaagaatccaatccgaaacatatgaacatatgtgcctgcccgcgatcgtcgagcgagtctatcgattctgcgcctaattatagaccggcgatctgcgattggttgctgctcctcctgcgccggtggtgattcctccatcttgggggcgtttcacttcgagtggctggctggatgaatgagtgtctgaaatacgaggtgaaaagtatcaacaagttttgggcatttaagcagcaataaataccaattagccagagggtttgctctccggttgacatcatcctgcctgtcaccacaggccatgtgtctctgtctttgctgtcgtcctgaatcggtgctcccgtttcgcaggatgtgtccgttgtagttgcatctgaagtagtttcgggcaacatcggggcataaatctcggcacgcacagtgtttgtcatcctcctgagctaatttccataaccacaacatcttgttcatttgcccggcaaagtggagcgatggaaatcggaaggctgggcggaactggttagttaagtgcatgtttgtggatccttgcgttctgcagctgtgtttaactttacctacgaaggtgtttccccattgttctacattgtgctcagcacgttggtat

SEQ ID NO: 20960 - DNA, 1131 bp, DROSOPHILA
atgcttaactaccagcagcaattgcattcgctgcccgtcggtaatccgggaaatttttactacggaccgacggtttccggcgagatatactcatctcaccaatcgcacaacctggagtccgaggacaagctggaggatcgggaagaaagtggcaggaacctggataaaattcacagattctccgtggacaatatcatggaaatgaaacacgacgcctattccaagggaaaaatggccatggaactcagtagcaacttcgttgccgatgcagttgctcccgtttcccactattccgtgtacttggagtgctccgagctgatctacgatgcagttcccaactccgtggacagctcggctgacaaattgagacaaatggcgtgggtaggaggatatctgatggcgatggggatactcacggcgatggccaccctgaaattccagcaggctgcgaggcggagaaatcagaagcaatttatcgatacaagactaaaaactgaaactcgaaggagagttccgtcaaagagatttttcattcgaccctcgggaaaaggaaaacgcaaaagccccactggcgcaggatgcggtggcgcagatcggccagctccctgctccggaaatctgccggcgggtggtggccaccactcgaggaagccgcgccggaatcgcaccaccttcagctccgcccaattgacggccttggagaaggtcttcgaacgcactcactatccggatgcctttgttcgcgaggagctggccaccaaggtgcatctgagcgaggccagagttcaggtctggtttcagaatcggcgtgcgaaattccggcggaacgaacggagcgtgggctccaggacacttctggatacggctcctcagttggtgccggcgccgattagcaataatatgcacaaatatgccaatatgccacacccacacccacagccgccaccgccccccggcgcatacgccctcaactttgggccgctggagctgcgctcgtgccagaactatacgaactgctacgggggatttggatcgagtggtgccagcggcagtggcgtctgctccttctttggggccaccaactattgtgtggccgccaattatgcgaagaacgcctatccgccgctgtga

SEQ ID NO: 20961 - protein, 376 aa, DROSOPHILA
MLNYQQQLHSLPVGNPGNFYYGPTVSGEIYSSHQSHNLESEDKLEDREESGRNLDKIHRFSVDNIMEMKHDAYSKGKMAMELSSNFVADAVAPVSHYSVYLECSELIYDAVPNSVDSSADKLRQMAWVGGYLMAMGILTAMATLKFQQAARRRNQKQFIDTRLKTETRRRVPSKRFFIRPSGKGKRKSPTGAGCGGADRPAPCSGNLPAGGGHHSRKPRRNRTTFSSAQLTALEKVFERTHYPDAFVREELATKVHLSEARVQVWFQNRRAKFRRNERSVGSRTLLDTAPQLVPAPISNNMHKYANMPHPHPQPPPPPGAYALNFGPLELRSCQNYTNCYGGFGSSGASGSGVCSFFGATNYCVAANYAKNAYPPL

SEQ ID NO: 20962 - DNA, 11296 bp, DROSOPHILA
ataaatctggaatcgccgaaacttacgtgacatctttctggttgatttcatcgcaaatcagaagaattgatggccagtcgggctccagacgcaagtgactggtggcattttctgcgagtggaaagtgcgtaattgttagacctttgtgtgtttatcaaaatcttcaattgttttggagttcaatcgcctttttattgttacttctgaattcttcttccttgttttttttgtttttcgatgagtcattttttcttattggtttatttccttgactttggtgcttcttacctaagtttttgtcgaaacttgatcgaaacatgttttctgttttcttttatgctgcttctcgtcgttggttttctattgttattcgtttaaaataaggaaagcttattattattgttttgcaagcaaagaaattttctgcaatgcgctagtgctgccacatcaatgaaattaacatacccttacagtgctgccagatgacgaaaagcaagggcaacgcaaataagagcagcactacatgactgacgtaacgattgacgtaaagtttggaattttcgtaacggatttttaaaaatttgaaatgacttttatattaacatattaacattaagccccagattggaatcgcattttgtgccataaaaataaatgcgctactcatttgcttaagcttcttgtttattttgtttgttcatacaggtctcgcttacaattaggttaactagacaaataactacacgtacatacatatataaaggttagttatccatacataaacagtataaaaactatgattcgctatgcttagaggttgccgcaacagttggcactcgcatattgcaatggtccgttgcatttgttaaagtatcacacgccggtatataaaagattgggtttacttgcaactaagcgatatacatacatacataagtaacataaaatcacattcgattcaaattaagccgaatactaaaagcccccccccccccccccatcagttcgtcttgatcttgtgcttcagcgtaaagtaggacagaaccttgaatatcgctatttggatgaggatcatgagaatgttgtgaccaaagtcgccgtcctccataccaaattgtcgcagcacagtcacagcgttcctaatcgaaaacgataataaatgagtactttgaatatttgcagcttgcttatgctttcactcacttgaagtggcaatagaactccgtgggcgggcagatcaactggccacgctgattgccgtacagcgagatcaccatgttttcgagggcgtagcgaagtggcgatatataggccatgaatcgcatggcagccggaatgtgattcagcaggatgaggaagccggagaacattagcatacatgacgtcgaaacggcgccaacgaaagttccattctgcaaattaagtttttgtggtgacaaaggattctagcatttggttaaagagctctgcacttaccactggattcagcacggtgcccagaaagacgcccagaccatccgcacagatcgtgaccaccaccgcacttagtaggtacttaacaaatcgatccatttccacgggctgatcggtcatcagatatcctatcgttatatacaccgtcgagaagatgatctgaaaaaatataatatatgtgagaaaatataagtatgtacgtgtggataggttttttcaggaatccacaggattgcagactcacatggactggtgtggatgtgatgatggtggcaaggtaataggttcgcaatttgtaccagttgttgaaggtctcctttctgatgatctctatttcggcgggatctgtaacacgcatcatattatattgtagaaagaggcacatagtatgcactcccccattccgacttacatctcaatatgcccggcataatggtggtgtaccagagatatacgcaatggatcatgatcatgccgacattggaaatttgcttggtggcattgctgcccgaatcgccgaagaacaagccaatcaaaatggaacagagcacatgaatgcccagcttcaggtaggtaagagtctggaagtggtattgaaaatattcaagtaaggcttaaattgtggtaagatccaacccaactcacccaatccctgaagaactgaagatgacaccggccgatgagcagccacagtcgcatgtattccgtgggcggataggtgtgcttggtcagatccttcgacgactccatgttctggatctcgatcttctgcacctgcacctggacctgccccggtgactgagattcattgaacttggccacctgcgtctcgctgggcgcatcggcatcctcgccctgcatcaactgctgatcgtatctccagcgtatgtccttggccgcttccgccagagcctccgtctgatcgccgtagtccccgttcgcgcattccagcactgaaatgattaacacctttaatgacactcgcctttttgccgctcaccaactttggtattgaacgggttcaattaggatcacatgaatgaatgtgccgcagtaaatgccaattaatgggatcccaagtgagcaatcgaaagggaagggcatgcagttgggcagcagctactcacggaagtcggcgggattgtggtagggcgggcactccaggcccacgctgctgagaaacatgaccgtgttctggggcgtgccctggtaggtgcatcgacccgcgcttagcacgtagaccaggttaaagagattgtagatgttcgtcgacggctggtggatggtgcacacgatggtacgtccctcgttggccaggccgcgcagcagctggatggtgtcgaaggaggaggagctgtccaatccgctgtgggtgattcaaggtcggaatgtgtcaattttggaatctgatcgaagcacaactggtttcgaggaccacattggaactcgctctcactcacgttgtgggctcgtctaaaaatagcacagctggattgtctatcagttccagggcgatggataggcgcttcttctggccgccactcaggttggagcacttcgtctgccgcgtcttcgtcagcttcagcgagttcagcagatagtcgatctgtaaatcacaagtcaattagtgtggtggactgtgcactcaaaaaaaaaaagggaatttatggaattttgttaaagttaatggcactcatttttcctaccagagttcgcttttccttcagactgacgcactgattggagattttaagtgtggccgccatcagcatggtctcctcgacggtgaagtagggaaagaagtgatcgtcctgcataatgtagccgcacagtttgcgcgccttcccgatctcgatcttcccgctgacgccggatttggtcagaccggtgaggatgttcataagactagatttgcccgcccccgaggggcccattatggcggtcagttcgcccgacttgaacgtacccttgatgcccttcagcacggacttcttctctgtgaataaaaaatcgaatggatggcaaatataggtgattagctaactgttgaaatataaagtgagtcacaggttcagttacatttcaattgtggcagatatgaatataattagctactatattttagttgattgctggttggggtttgtgttaaaaccattatgctattaggtttatgtaactttcagttaaccagctagcaataaggttaacaggtaaagctgaggtaaaaaacgctcattaaaagtgcatacatcataaagcagaagcgtatgcttcgtatgattttggatgggtcaatctaaatgaaacggtggcctgttccacttgggactcgtgcgcaatctttgaatgtgccccatttgcggcaatcgtctgctctattgacactagattatcaaggagtaacacctgtgctccgggatcttttcttccggcacactttcggtgctaatagagatagtcaattcgcacttggagctaatggagtgcactgcgagaaatgaaatgatccaaataaaagaagctctaatgtgaattactcgtctcacttccgatttgagaacatactttttttttttttttttttttgcacttacctggctttttgggtacgttgacctggtagacgagatcttcgaagtgaatgtcgatgccgtagacattcttcaacaacttgctgctatccattttgtgtgtactcttggtgttccaccgtgctgtttacaaaacgtttaaacgtttgaacgctgatttatttcggaagcttatcggaatatatttattggctctgctcgcacattatttacacatatcaaatttggcgaaaagcactctggaatcgttctcgaagtggctgtgcgcaggaaaacaacagtattataatggattaccagccatctgggttggtccacgtttccagttgcaatttgtgtggttgcgggaatcggaaattatatcacttttgccattaaaactaaaggcactcaacgcgccaattggagcgcgtcttgaaaacgagtgacctcaaggctcgtggattttcgtaacgaaaactggtgaaccgtttcttatgttttcttaagtttcctacacccctgaacttagtatgtgggctgtgaattttccttggggaaaatctagcattgggaaaatcgagttaaaaaacgaacgagcgatctgcgcatgcgcccccgttggcagacagctgataactgcggaagaactcgccgccaactgaaaaggtggagagctctgccgctgccgctgctcagtcgctgcctctgccggcgtcagcaagagcaaagcactaaaacaaaaacaatatataaaaattataatcaggcagcaaagctaagcacactcgcatatcaaatcgaaaattaaaaaaaaaaaaacgcgcacacacacacacacagctcgcaatgcaaaacgcgctggaagtcaacaatcgcaaagaagccggcagaatggcattaaatttcaagtttatattttagtaagtcatgtttttgtcttttgggccgttgagaacaacgcgcatggtgccaattccaagccattcagccattcactcaccaccagcgtggaaagcaataattattaaaaaaataataataataaaatatacgctaaagagcgaacggccttgtccgaaaccagaacatctaacacaaaaaatcaactaaaaattaatgtgcgaaatactattcttgtgatttcctccagcccagttgtaaacaaaagttggagagtgtgagagaattgggggcagactaggcgaattcccaatcaccttttctgctagtggagatttccactcattactgtgttcgccgccgcgagaatgtacatatcatagtttgcgaaaattccagttttgatttaaatatgcatctcgcacttctccactggccgctttcaaagaacttccgcaaattattcaattagtcatggaacacgtagttcaattccagggaaaacagccactacgtgactttcggtttcacaagtaatatgcccgtcaaatacccattacacctactaatgatctcgggaaattcgctcaatggaacttgccctacgcttgactttagggaatggctctaacttgttggcatgcaaatggtgtaaactggaatgatttccagtttctggggaatattgcttggcggtgctgactcaacggggtaaggccatcgatatgcctcagttttgcgggctaggggatcagaattaccgcaacaagtagacagaaccgattgcaagaacgcccaaaaaagtagcagcgaaaattgcgaaatagataattacgaaattacatgaaaaagcgttgaaaatgttggaaaacagaacgttgcggcggtcagttcttagaacaaaacttgaaactggtttgatttggcgacaatcttggaaaaagtgaatctgaatagagttgtaagaggtgtgagagagagcgaggggaagcaagccaactacagtgagcacccgatatggcgtaagctttaattaaattaaagtcatttgtcaaggcatcagcttatgtgtttaattacttatataatattgtaagacaaccttcatgacaacatcagtttcagaaatcatttacactgctccatgtaattctgctctttgcagagtaattaaaaccaggcaaccttaaaataattgctttgcattaaggtcaagctattttcataatttcgtagtaaaaaaatgaagtgagtacttctagtttgcggagtgaccactgtaattgccggctgactttatggcttttgttctcgcctcgcagttggcgaatcttgcgccactgctgaattgctcctttgaatgggacaccagttcgtctcgaattgggactgtgagtttgggggctttagaacttgattacgtgaccgttgaattaatgccacaagatttcgtacgccacttggctgcacacaaaaaaccttcgccggggtaaacaaaagtgatggaaagaaacaacggcgcgcacggaagcggcaaataaatatagtatagtgtattttatatacgaaatgaggttatcattatgatccaccaccacttatgggcggcagtcagctgtcccgggctcccatggttatctattcgcttgggcaaaataatgtcaattaataatagctgtcctaccttcgccattgaaacctctgctgacccgcggctcgataaaattacaaatgcagccgactatcatcggtcgaacggcaataacaaataataataataataataacaataacaataacaatggcaatacccataccaataccaataacaacgcaggttgaaaacaccgacatgtcttgggaaggcacacacttgtgcctcggaactctggaatgccacttgctatcaattaaaataaattgtaataatattgcctttgacttttccacattcgaattgagtcattctgggcgaatctccccgaaactctgccatttgaaatatgtgttgggttttatgggaagttttagcattttactggggaacataaagtaatcatatggataagcgccgaagtgggaaaatttgattgaggaaattcgaaataaatgagcttggttgttgggaaaggtctacgcaaattatactggtcagttgttaagtagttaagtttcaatggcactttatgcaataatcatggaataaaaacgataatagcattagatagattccattcctaacttcttatccatttaggagcatgactcatttgatagtactcccacttttccaattgcgttccgatctacaagtgtttttgttccgggtgctagggctaggaaaaacagaaaaacagatgcctggcatagtaatacgttctaatcttggtcttgcataaacaaaacaaatcgtataaacaaaccggcaagtgctgaaagagaaacaccctgcccatcaatcccaatcccagtcggatgggaaaagtttccgcacgtgtgtgtttgcgccgatgatgatgatgatcatcatcgcttgtgcaatccaagtgtattggtattgcggcactcaagtaacataaataaacgcataacccgatgctataaccgtctactattctgctatcaaccctttgtgatttagcagtcgggcaaaaggttttgcattcaattagccgctattgcgcttacgtaacggccaaatgcaaatatatagtagctcattcatgcggcgatctcgacacaccgtttacactgagaagacactcggcacttgggcaattatctatgcatcggctgtcaaaacttcaggaagggtgtcaagttttcaacagttctgtcagcggatttaccgatttagcaataccttttgtaagctggctaaaaattccaaagtatggacaatgaaccccatttctggcgcaataattgccaatattgatgagctagtagcaatcgatgattttacaactcctagcaaggtctttggcaaaatgcttaccacaatcttttccggtctttctttacatttattgaaattaacaactaaactgcatgtggctctataattatggcaacaatgttgttagccattgcactaattggccatgctatgaagttgcaagcggttaaacagttaatcgcttcctagatcttaagagattaggtatgtaaattagcccagtctgcaagcaagatgtttaactttacataagactataatcttatgtagatagtgcagctttaaggctgcaacaatgtatcgcattgaccccagctgatagctccatctatcgtctagacttcttcgatggaagagcgcaaaaaattcaactgccccacatagatagagcttttggaaaaacaaacttttattccctcgatgtgataacagcgagaaatccaacacaattctgggcaagaagagaagaatacaactggcagacactaagtgacgctcattcatgcttttatagtccgaaaatagaattcttctgtcgccccgctgaagatttcaagccacttggggcgcattctttcacccatacgacgcacacacgcacacataggcgactatatagccaagagatataacgaataaagtggcggcaaggttacaccaaatcaaattatgctctgggctacattcttggctcacgaacatctattccactgattagaagaatccgaatcggaatccgaatccgaactcaaggccaactgggctggaaacagaaactcggattgaatcggatcggatcggcttggttttcaattcgatggcacttccatttccttggtgcagtcgctccaaccgaccgatagataagtcgtttgtttgccccaatagatgataaggagggtcagtcttttgcacagccgcaccctcacgccccccgaagcacacacacataaatgctctgtgtgtcatgtgcactgggagaaatgaatggcagagtttaaaatcaaaatactcaagctttgcagctcactcacaatgggctagccttgatctataattgaactattatagataccacctactaatttccaaaattacagcctaataaaatattaaaaaacaaaacgaagctaattcctttgctgtttctttctctgcaagggaaatgactgactttgtttgcacttgtgtttagattggggcgcgaacttgaagccccatgcaaagcggtgggtattgcattacaaattgtacttttccacaccagcaccatcaccatcaccatcaccatcaccacaaccatcacgagaagcacccacaataagagccgccccaaccaccgagtggagcctgccgcctggcccacattctgcggtgcggtggtgacaatggcatcgtcgtgtccgcgagggtggggccatcttggcattggttccattccgttctggccatgtccgttcgctctggtgacgggtgacgggtgatatcatcatcacaatttggcagggcataatcgctgactaataaaatgcaaataaatactccagtttatttgatcaagacgccgtggcgaacaagtccaaacatttggtcattaaaaccgaacgacatacggggcgtatgcgtattactgacgtgcgctaattgcgtagccgacacggagtccccgttaaagattcaccacaccgatttttttttaccattgcccgcaaaacgaaaaacccaatttaactctccgagcgaactttgatctatgaggaatcggtcgagtataaattgttatgcctcctcatttgttgatgtgtgtctgcggtctattttctgtatgatttcattacaattagaataagacccagaaagcgaggcgaaggccccgaaaagcgggacacagaaaaccggggaacgtgccaaaaaaaaaaatatgtagaatgggaaatagaacacagctggaaattaaagcaattccccaacgaagttcagaaaggtgtgcattttcgatttcgaaacgatttttgtggcataaatttgaatagatggatgccaggttttccgttcgatttgcgtgcgtatttgcgattctctgatttaatataatttttctccttttatttctgctgactcacacaaattgcacttgctaatatagatagatataggggaacataggatctcgcgatcactatgctcttttttttcgcgattttccaacgcgaaacacaccaaaaaaacacagctggcactcgattgttgaccggcgattgaaacgatgaaacgaacgattttatttataatttcgaaaaatatgcaaactttttgatttgtaacacgcgcgcagaagaaccgagaccatatataccatgtatatctctggccaagaatatatatgtatatatataaaatatatgcttcttagctcggacgtggacaaaacgcttccgaatcgctcgaattgcgacgcgagactgaggcgactttcagacagcgactggctaagtacaacgctgggcggctcgactagtttgtcttttccaagtgtttgccggcgtcagcgcgactatagatacacgcgccactgtatcgcgccgagcagggcccactgtacctagtgttattaataaaagcggtctctcggagcttcttcgatttatttaaactgacatttcgatcagttccgcaagtcatagagtttccgttttatctggcagccagccgatctattagatttccttttcaagtcagatgttgtccatgcaacacacggtctgtaattttgtgcttaacgctgattatataatcagtgataatgtgacacagaaggtcagagttaaccagccatttcaaatagggaattgctcgtttggccggcctgacatttgagaacatatacagcttgaacttgaatatgttttttgcggtagcttcggcggattatcgcctggaaccctttctattatttgtatgtgccctatcaaaatacaaatatagccgttcaaagttcgtcctcctgacgacgcctccaatgcatttgcagtttgataaggcgaacgaaaaatgcatgcgcatgctgagaaagggattaggttgattaatacattcgtagcctaagctttggtgtgggtgaaagacagcccttaagtcgattgaaaaatgcaacaaattaactcggaaactaatttgttcacacctctagtacgcgaatggtaattgccaatgcagtggattaataatagacaattacacttgactctactcgtaggtatcgtaaaagctgtctatgggaattccgatttggcggctttaaactctattggcagttgcgtcgtcatcaggtaaatgtcattcggcatatggcaattgccgcccctccgattagccttttaattaggcg

SEQ ID NO: 20963 - DNA, 2182 bp, DROSOPHILA
tacatatatattcttggccagagatatacatggtatatatggtctcggttcttctgcgcgcgtgttacaaatcaaaaagtttgcatatttttcgaaattataaataaaatcgttcgtttcatcgtttcaatcgccggtcaacaatcgagtgccagctgtgtttttttgccacttcgagaacgattccagagtgcttttcgccaaatttgatatgtgtaaataatgtgcgagcagagccaataaatatattccgataagcttccgaaataaatcagcgttcaaacgtttaaacgttttgtaaacagcacggtggaacaccaagagtacacacaaaatggatagcagcaagttgttgaagaatgtctacggcatcgacattcacttcgaagatctcgtctaccaggtcaacgtacccaaaaagccagagaagaagtccgtgctgaagggcatcaagggtacgttcaagtcgggcgaactgaccgccataatgggcccctcgggggcgggcaaatctagtcttatgaacatcctcaccggtctgaccaaatccggcgtcagcgggaagatcgagatcgggaaggcgcgcaaactgtgcggctacattatgcaggacgatcacttctttccctacttcaccgtcgaggagaccatgctgatggcggccacacttaaaatctccaatcagtgcgtcagtctgaaggaaaagcgaactctgatcgactatctgctgaactcgctgaagctgacgaagacgcggcagacgaagtgctccaacctgagtggcggccagaagaagcgcctatccatcgccctggaactgatagacaatccagctgtgctatttttagacgagcccacaaccggattggacagctcctcctccttcgacaccatccagctgctgcgcggcctggccaacgagggacgtaccatcgtgtgcaccatccaccagccgtcgacgaacatctacaatctctttaacctggtctacgtgctaagcgcgggtcgatgcacctaccagggcacgccccagaacacggtcatgtttctcagcagcgtgggcctggagtgcccgccctaccacaatcccgccgacttcctgctggaatgcgcgaacggggactacggcgatcagacggaggctctggcggaagcggccaaggacatacgctggagatacgatcagcagttgatgcagggcgaggatgccgatgcgcccagcgagacgcaggtggccaagttcaatgaatctcagtcaccggggcaggtccaggtgcaggtgcagaagatcgagatccagaacatggagtcgtcgaaggatctgaccaagcacacctatccgcccacggaatacatgcgactgtggctgctcatcggccggtgtcatcttcagttcttcagggattggactcttacctacctgaagctgggcattcatgtgctctgttccattttgattggcttgttcttcggcgattcgggcagcaatgccaccaagcaaatttccaatgtcggcatgatcatgatccattgcgtatatctctggtacaccaccattatgccgggcatattgagatatcccgccgaaatagagatcatcagaaaggagaccttcaacaactggtacaaattgcgaacctattaccttgccaccatcatcacatccacaccagtccatatcatcttctcgacggtgtatataacgataggatatctgatgaccgatcagcccgtggaaatggatcgatttgttaagtacctactaagtgcggtggtggtcacgatctgtgcggatggtctgggcgtctttctgggcaccgtgctgaatccagtgaatggaactttcgttggcgccgtttcgacgtcatgtatgctaatgttctccggcttcctcatcctgctgaatcacattccggctgccatgcgattcatggcctatatatcgccacttcgctacgccctcgaaaacatggtgatctcgctgtacggcaatcagcgtggccagttgatctgcccgcccacggagttctattgccacttcaagaacgctgtgactgtgctgcgacaatttggtatggaggacggcgactttggtcacaacattctcatgatcctcatccaaatagcgatattcaaggttctgtcctactttacgctgaagcacaagatcaagacgaactga

SEQ ID NO: 20964 - protein, 615 aa, DROSOPHILA
MDSSKLLKNVYGIDIHFEDLVYQVNVPKKPEKKSVLKGIKGTFKSGELTAIMGPSGAGKSSLMNILTGLTKSGVSGKIEIGKARKLCGYIMQDDHFFPYFTVEETMLMAATLKISNQCVSLKEKRTLIDYLLNSLKLTKTRQTKCSNLSGGQKKRLSIALELIDNPAVLFLDEPTTGLDSSSSFDTIQLLRGLANEGRTIVCTIHQPSTNIYNLFNLVYVLSAGRCTYQGTPQNTVMFLSSVGLECPPYHNPADFLLECANGDYGDQTEALAEAAKDIRWRYDQQLMQGEDADAPSETQVAKFNESQSPGQVQVQVQKIEIQNMESSKDLTKHTYPPTEYMRLWLLIGRCHLQFFRDWTLTYLKLGIHVLCSILIGLFFGDSGSNATKQISNVGMIMIHCVYLWYTTIMPGILRYPAEIEIIRKETFNNWYKLRTYYLATIITSTPVHIIFSTVYITIGYLMTDQPVEMDRFVKYLLSAVVVTICADGLGVFLGTVLNPVNGTFVGAVSTSCMLMFSGFLILLNHIPAAMRFMAYISPLRYALENMVISLYGNQRGQLICPPTEFYCHFKNAVTVLRQFGMEDGDFGHNILMILIQIAIFKVLSYFTLKHKIKTN

SEQ ID NO: 20965 - DNA, 2267 bp, DROSOPHILA
ggtgactcctgtggtcatcattattctggctcggccgctgcaccaatggggcatcataaaatcgctgagaggacataaacgcgttattatattatgcctttgaatgcccatgacttgcagggctccaatgaatggagcccatagagaacagagggcattgtgcagtggccacacgacccacagaggacgacgaggactcgacggactcgcaggacacacagctcgcacacaggacacaatggatgaacatcagtgccagagccgcgacgtcgaatggacgacgttggatcgggggaaaagtcggagctggaccaagctgccgcgtccatcaatgcaactttgagcgaacgtcaacaggcaaagaagctattcagcttaacttgcattctctggcctttttcccatcctgtgatgccctcggccgaaggacataaatttgaaaaataacaatataagaagatgtcctccagatgtgtgcgaccaaaatgccggagtcaggccagtgaagccccgtctaaggactgaggactgaaaactgctcaagatgccgggcagaagtttttaatgatgccgcaaagtcgttgaaccaagttcgatgcacattctgtggatttgacctgactttggcatcctttggcatcgacgaagggaaaggacgagggccactgcattgatttacttgcggctcaggcgaatgtgagccacagctgtgcggaatcgaacattttggccaagtgaaagttcgtttctgggccggaaagttgcctgcattctctactaaaaatgtttaaatgcttgttgcagcagtaaaatttcgaccgcacagaattcggtaattcaaatgtgtttaatacaccaacaagtgggtctgtacttctttcaaaaaccaaaacctgaagacgtaaatataaaaaccacaccgcagatattggagtcacaagaatatttatttggtttatttgaattgaacaggcttagggttaatcatcttctcgactttctatccgtagaagccaccgccgaatccgccagcggaggccgaggacgaggccgaggcactggctccgccgaatccgccgcgcctaaagccaccgtagccaggatatccgccaccgaagccgccgtagccaggatatccgcctccgaatccgccgtatccggggtatccgcctccgaagccaccatatccgaactggggagcgggcacggcctccaggacactgaggagtgcgaaaatcacaacgacaaacacgatagcagctcgcatcttggatggcttgttcactttagatctttccgttttggactgttgatcgatttcggcctggctgcctattatataaacagattcgcctggttcaacaacctgctcatctggttctgacaaaattgggtgtcaagtgttggtgtgctggttccattctcgctaataaatcgctaccatcgaaaaccaatacaatatccacacaatatccccatcaccatcaccatcccctcgggaagaccagttttggagtttggggttaacctttccgcagactcacgcatctgttgtgggattttgggaatcactcgtccaaaatatcgcgttcgtattagcataaaataaaatacgataaaatacaaacaacaatttcgaataattataggtatacaatttcgccggactttgtttttcgcctatcacattcgcttagtcacaaacactttgtattccatttaatatacattatgctaatcaagccagtcattaatgggtttccattcactgtttttttttttttgcatcaaaaaaaaaaagaaatgtttttcaccggctttagtctgtttatttctaatttgttttttttttttttcattgcccaaggggatattttatttgaagaacctatttgcgattcaagatttcatttttgataacctacttcaaaccatcaactgtctttcatcagtactccaaacaattaataatgatttttttgtatatgtgtgtgtttaattaagatgagtaaaataatccatttgtggagttgcaaaaacctgtgtaaatgcgatatgtttatttacagaagaatgactaagtcaacaatttaaccctgacttatgataaacgtttgtccaacagttttttgtaaacaaacaattatatcgacctccatcccaccagctggagttcaatccggttctgaagatctattcaagtctggctagcaggtcagaaatcagaaattcataaagtaggcttgaacagacagctgaaaaaaaaa

SEQ ID NO: 20966 - DNA, 267 bp, DROSOPHILA
atgcgagctgctatcgtgtttgtcgttgtgattttcgcactcctcagtgtcctggaggccgtgcccgctccccagttcggatatggtggcttcggaggcggataccccggatacggcggattcggaggcggatatcctggctacggcggcttcggtggcggatatcctggctacggtggctttaggcgcggcggattcggcggagccagtgcctcggcctcgtcctcggcctccgctggcggattcggcggtggcttctacggatag

SEQ ID NO: 20967 - protein, 88 aa, DROSOPHILA
MRAAIVFVVVIFALLSVLEAVPAPQFGYGGFGGGYPGYGGFGGGYPGYGGFGGGYPGYGGFRRGGFGGASASASSSASAGGFGGGFYG

SEQ ID NO: 20968 - DNA, 2870 bp, DROSOPHILA
acaaaggtggcacctggtgcacaagatagccaatgaaataatagactcacaatcccttgactcacagattccatcctccattggtagtttgatgcgacttcaggtcctcacgttggactacaataaactggacgaattcccgctctgcatctgtcgtttggtccggctgaagtttctcaacatcagctgcaataacattagtagtttgccacccgaactgggatacctcactcagctggagacgttctggtgcaataatactgggctcctggagctgcccaacgaaattcgtaactgtgaacacctcgagacgctgggcgtacggggaaatcccttgaagaagttgcccgatgccataggcgctctgtcctccctgcgttggctaacagccgagggctgcgaactcagcgaagtgccactgaccatggcgttgctgggaaatttggtgcatctgaatcttaaggggaatcgattgcgacggctgcccaggatgctgatggccatgcagaagctgcggtttgcttttctcaacgaaaattgtattgacgagatgcccacgcggtcacaactggaggagttgcggactcttcacatgctcaacctgtccaagaatcccatcagcctgcaccgcgatctacagctaatggctttggtgaagctccaaattaacctttgtgtttctttttgttgaatttctctgaattttacagcgccagacgaacctttatgtggagctgccgtcagatcccgccaatatttgcgatggtctcgccagtcgagctagcctcaacgcccaggaacagcaggaggatcaggcgcgaggagcaggacaggatctagactcctccgactgggcgaacagcgtgcggaccagcgaactggacacaacggacgagagtgcgctggagaacaacatcgaggatctgagtgtcatgctgccggaaatgtcgcgctttgtcaccaccttttgaatgcattaatctgtgtcaacgaggtctgatattatgtagcacacataaatctgtggtttattctctacaacggggtgttttgtacatgtacctctaacaatcgtagcgcttcaaaaatgcacattggttaagcggaaatgtgggttaatgggtgccaggttaactagacatcttcttcatcagctcctcgtcctgcatggacatggccgtcagcttcttgccgatcttctcgtgaatgtccagatatttggccacacagcgatcgatgcacaccatctcgcctttgcctgtagggtgcggaaagcattaaaattacaagtgtagaattgtggtacaagtttcaagatttctatttaaatttcatcaatcgaatcaaagagaaacctgaagtgattgtcatagaaagagctgcgaactagatacagcattctatatggctatggtactcacccaactccgactcggagtagcgcggcggaatgcactttttgtggcaagcgttcgtcatgcggttatataaatcggacatcatttcgatctccatttcctgcatcagctgcagcttggcctggtctgcggtgctgatctggggcaatgccattgtgtgggtgtgggtgtgttactgatgggttttaggtactggatgctgccgcttagtaatcgaatcgcctgtccgatgctgcgcttgagtcgtaatccccttggtttgccttcctcatgcgctcacgcactcgcatgctctcgtaacgccggttctcaacggatctctttgacagcacaaatgcgtagacgccacccacggtcaaaacagtcctgtttcgggattttcaaacaccatgtagtaaagctaagtgtgtgtaactaaaaacgatttttctacaaaccaacagacagcgattcgccctgcgttgcccaacgacatagcctgctacgaaaaaacgacacactaacgcgttccgttggaaggtgtgcgggattttttatcactggcacgtgtgacagctgtcacatagggttattcctttcaatcgaagtcactgtattgggaaactgtgatttgagttggttcggaatcagagtgaatctgtattgctaggttgatttgttttctggaactgtacttatttatcacttaatcagccaaattactttatatgtttgtcaatggctttaatataatttaaaaattgcaaattttaaatgctacatgttaattatcagtatcagtgataaatatgttagcaacattgtgagtatttattgctttagcatatttaagattttgaatttcatacttgaaaccttattcatttttttatcttataagattctcaatatttaagttcatataagatttgaaagtgacctttgtaactccgaatgtttttcaacttgtggttcccaacattctctggtcacactgacttgctgtttacacaattatttcgtaattttaagtcatattttatcaatgaattaagataaggagcgagcagagcaactcacaaatgacttcgcagatctacagccagaagaagttcgtgcccacgccgcccgagaagggttcctttcccctggaccacgaaggtctctgcaagaagcaattcctcctctacgccagttgtctgcgcaagaacgcccaggatacgagccagtgccgccaggacgcccagaactacctggcctgtcgcatggacaacaatcttatggagaaaaccgagtggtccaagttgggctttcacgaccagagtaccaagaccgatcaaaaagaaccggaggtgcagaagcaatagccggcattgtgagccatgaaacccgaacgtaatgtgatgatagcggccaccggaagtgtggccaccattaagttagcccagttaatccgagagctctccgacgagc

SEQ ID NO: 20969 - DNA, 636 bp, DROSOPHILA
aatcgctgtctgttggactgttttgaccgtgggtggcgtctacgcatttgtgctgtcaaagagatccgttgagaaccggcgttacgagagcatgcgagtgcgtgagcgcatgaggaaggcaaaccaaggggattacgactcaagcgcagcatcggacaggcgattcgattactaagcggcagcatccagtacctaaaacccatcagtaacacacccacacccacacaatggcattgccccagatcagcaccgcagaccaggccaagctgcagctgatgcaggaaatggagatcgaaatgatgtccgatttatataaccgcatgacgaacgcttgccacaaaaagtgcattccgccgcgctactccgagtcggagttgggcaaaggcgagatggtgtgcatcgatcgctgtgtggccaaatatctggacattcacgagaagatcggcaagaagctgacggccatgtccatgcaggacgaggagctgatgaagaagatgtctagttaacctggcacccattaacccacatttccgcttaaccaatgtgcatttttgaagcgctacgattgttagaggtacatgtacaaaacaccccgttgtagagaataaaccacagatttatgtgtgctacataata

SEQ ID NO: 20970 - protein, 92 aa, DROSOPHILA
MALPQISTADQAKLQLMQEMEIEMMSDLYNRMTNACHKKCIPPRYSESELGKGEMVCIDRCVAKYLDIHEKIGKKLTAMSMQDEELMKKMSS

SEQ ID NO: 20971 - DNA, 3751 bp, DROSOPHILA
gtttgtttttattcgaagataatgcagcatacgtttaaattgcacttctttatttataaaaaccgcgcaatagttcgtataactgtgttttcttgtacgtgaaatatacactcttttcataaattctattttttacaagttgttattctttttaagttaattgatttttagtcgattataacggcaggcgataaggccttagttattaacgaagaggaattgaaaaataacttataaagaaacacatcaacgaactttattgctttggttctgtaacgaagcggccataaactttagtaacctgttccagcacgagctaaagatgagcttctagttaaagcattcaaaatatggatggtttattacgcacttttcaaatacatatataatttttgggttactggtaagtggtagtgagcacttgggaacatacaaaagagagtgaaatgcattttagtaaatgtctcgagttcatccgtccgtgcggtcgccttctgccggtggatggatcaccgctcacttgtgcaggttctcgaggaactccttgtggcgctggatggcctcctcgtgctccttgatctgctggtggtggaactcagcctggtggatctggtcgttcttaaggcgatccagctgctccctttgctgcaacgaaacgaacaatgatggattctctcgattagccggtgcgaaatacaattagtgctagcaagtcgtaaaaagctaattgctggttagctaagcccgcccacccctgaagcttgccatcaatattgatcgactgtcatcattagctgccagccatataagaggctttactacaagagacaatatttggttaacaattttcagaccgaacccgtcacacgggcagacaaaaagttcggatatcgcctgaatgaccacgacaaacagtcgacggaagtctgtaaagagtgcgaaaaagatcgggggaaaaccacctgccgccaatgaacctgaatcattgtctgccgttctgcctgctcgtcttcaagccaccaagctaaaaagcctgttttcagttgatagttggctaccgaagtgagacgtcgaagaaagtgtcgttagatcggggtcaccgtattaaattattccgcattgttaggccgcatctggccaaatatcaacagacccttgctcttaattggtcgtcaacaagtagacaaagccaggccgcggtccacactcttcgatctccgccagccagcctgcctgcctctctgccacttatcaacgcctcaggaaccaacttgcttgataagcagctgcccttagttcgaacagaacatttaccatccgactctgctgcggaatggttatgatgcccctccggatactgctgatcgccttttcgctgacgctagcccagagctatggcgtcggtgtcaatggaccgcgtcccgtgcgcactgtagaaacgctgacgcagtggggccagctggagttcggatttcccacggcgcaggatcgggagaacgctcaggcggcgggtaatctggtgcccgagaacggcactcccatcgatgtgcagccacagtacatggccaatggccagatcaggctgttcaccactattccgcgcttcgtgacgggcattccctacaccttggccaccgtttcagcgacgcagggcaggaatggcccgctgctgcagccgtatcccaactactcctggcacaatgccaacggcgaggactgcgatcgcataacatccgcattcagagtggctgtaagtgtaaaatgttcggacagctaagttttttctacattgaatctcttccagatcaccgagtgcaaccagatgtgggtgatcgattcgggtgtgattggaaccacccagctgtgtccgccgcagttgctgcagttcgccctggccaccgatcgcttgctgcatcgcttccgcttcccgaacgacacatacatcccgagtggatcgctcttcatcacgccaaatgtactcgtccaggatcctccgcctaggggaacctgcagtcgcaccatgatctatgtggccgatgtgagctatcatggcttggtggtctacgaccaccaggcgcagacatcatggcgggctgagaaccgctttatgtatcccgatccggactacggcaagcacaccatagcaggcgagagcttctacctgatggacggcatgtttgcactgaacaacgacaagcgcaatctttacttccatccgctggccagtgcaagtgagtattccgtgccactgagtgctttgaaccggcagcagaactgggccaacgggccggaggctctgccggaggagttcaggctgctaggcaggcggcggagcgagtgcgccgcgtccgccatcgatggcaggaacaacgtctactgcgtcaccttcaatcccgtcaagctctttgtgtggaacgtgaactcgccgtacaattcgcgaaactttggcaatctgccagccaagtccgatgacctgcagttcgtcagcggcatgaaggtgttgcggaaccgcgaagggcaggaggaactctggatgctctccaatcgctaccaggtttgatgttcagcaggcttttgtgtgccccgtaaactgattgttacgattgttcccttagaaaatcgccgcaggtacgctgaactcgaaggaggtcaacttccgcatcctgcgccgcaagttggatgatgtccagggcggcgtcttcttctccaacgacgaggatctaaccaatcgcctggtgtttagctagtgacttagcaaatccacttaattaatatatgtaaatattagttttgttgtgcacttcactgggggatcgttgcgaattccgcctaagtgctaataacagcctatctgaaattgtaaagattccgcaaagcctaagaaatatatatgacgtgtaaatattaaccatcttgtggtactcattcccttgaataatttaaattttacgacagcgaaatatttaaatttactttgctaacaaaccatataaatgcgcataaaacgatgaacctgatttgagaaagctaacttttcggttacaaactttcaaagaaatgttgactataaaagttgataaaagttattgtgagaaatggaagaattggagtttcttctacatatgtttggcctatgaatgcatgcgtccgaagctttactgtattattttgattttcaaatttcttgcgccacacaatttgtggcaaagttcagggtcacttgttatcgccccaagtctgtactcccaagcaacagtctagtcacgcacgaatcccactggccagtagaagccgcagtggcttaagattagacctgattcagcgccatcaagtgacgttaaccgtttcgggcatcagcagcatcgattggaactggattgggaactaaattgtactgactggataatggatcacacttaatggggcgacgaaccgagcaatcggtccaaatgggtggcggcgtgcataattagccaataccagcaccagcaacttgttttccgaggtggacaccagtgaacagtaaacaaactgccatggctcgaccagaatttcagtgcacagagttttgggtgtgcaattaaaccagttacaaaagctgacccgcttagcctgctgagtggctggctggattagaaagacatgggcccgcagctccacgcgcatgtgcagtatccgctcggtgtttaagtggaacagttgtcgcgaaagtgaaaggattacggcatggagcgttggattgtcttcggtg

SEQ ID NO: 20972 - DNA, 1594 bp, DROSOPHILA
cctgctcgtcttcaagccaccaagctaaaaagcctgttttcagttgatagttggctaccgaagtgagacgtcgaagaaagtgtcgttagatcggggtcaccgtattaaattattccgcattgttaggccgcatctggccaaatatcaacagacccttgctcttaattggtcgtcaacaagtagacaaagccaggccgcggtccacactcttcgatctccgccagccagcctgcctgcctctctgccacttatcaacgcctcaggaaccaacttgcttgataagcagctgcccttagttcgaacagaacatttaccatccgactctgctgcggaatggttatgatgcccctccggatactgctgatcgccttttcgctgacgctagcccagagctatggcgtcggtgtcaatggaccgcgtcccgtgcgcactgtagaaacgctgacgcagtggggccagctggagttcggatttcccacggcgcaggatcgggagaacgctcaggcggcgggtaatctggtgcccgagaacggcactcccatcgatgtgcagccacagtacatggccaatggccagatcaggctgttcaccactattccgcgcttcgtgacgggcattccctacaccttggccaccgtttcagcgacgcagggcaggaatggcccgctgctgcagccgtatcccaactactcctggcacaatgccaacggcgaggactgcgatcgcataacatccgcattcagagtggctatcaccgagtgcaaccagatgtgggtgatcgattcgggtgtgattggaaccacccagctgtgtccgccgcagttgctgcagttcgccctggccaccgatcgcttgctgcatcgcttccgcttcccgaacgacacatacatcccgagtggatcgctcttcatcacgccaaatgtactcgtccaggatcctccgcctaggggaacctgcagtcgcaccatgatctatgtggccgatacatcatggcgggctgagaaccgctttatgtatcccgatccggactacggcaagcacaccatagcaggcgagagcttctacctgatggacggcatgtttgcactgaacaacgacaagcgcaatctttacttccatccgctggccagtgcaagtgagtattccgtgccactgagtgctttgaaccggcagcagaactgggccaacgggccggaggctctgccggaggagttcaggctgctaggcaggcggcggagcgagtgcgccgcgtccgccatcgatggcaggaacaacgtctactgcgtcaccttcaatcccgtcaagctctttgtgtggaacgtgaactcgccgtacaattcgcgaaactttggcaatctgccagccaagtccgatgacctgcagttcgtcagcggcatgaaggtgttgcggaaccgcgaagggcaggaggaactctggatgctctccaatcgctaccagaaaatcgccgcaggtacgctgaactcgaaggaggtcaacttccgcatcctgcgccgcaagttggatgatgtccagggcggcgtcttcttctccaacgacgaggatctaaccaatcgcctggtgtttagctagtgac

SEQ ID NO: 20973 - protein, 415 aa, DROSOPHILA
MPLRILLIAFSLTLAQSYGVGVNGPRPVRTVETLTQWGQLEFGFPTAQDRENAQAAGNLVPENGTPIDVQPQYMANGQIRLFTTIPRFVTGIPYTLATVSATQGRNGPLLQPYPNYSWHNANGEDCDRITSAFRVAITECNQMWVIDSGVIGTTQLCPPQLLQFALATDRLLHRFRFPNDTYIPSGSLFITPNVLVQDPPPRGTCSRTMIYVADTSWRAENRFMYPDPDYGKHTIAGESFYLMDGMFALNNDKRNLYFHPLASASEYSVPLSALNRQQNWANGPEALPEEFRLLGRRRSECAASAIDGRNNVYCVTFNPVKLFVWNVNSPYNSRNFGNLPAKSDDLQFVSGMKVLRNREGQEELWMLSNRYQKIAAGTLNSKEVNFRILRRKLDDVQGGVFFSNDEDLTNRLVFS

SEQ ID NO: 20974 - DNA, 4231 bp, DROSOPHILA
gctggccgatcgatgccagaaggcgtgggagaagctcaatcgtctggaggaagtgcgcttcaagatcggcctggagatcgagttcaaggtggaggcggtgcagctggacaactcacagctggcgctcgatcgcaactcggccaatatctcatacaagccggatcccacgagaaatcccaagaagtaagtcacacatggaatgtcccagtagctcagtaggataactaaccaatcacttagctcctgttcctacgagtcctggctggagaacgtgaagaacataaagctgctggcggagaatgagctggccgacacgtacgccattcgggaggctttgttcgtgtgccgcgaaaaggcgcgcaacatgctgcagtcgcagcaggagcgggcggagcacaccatccgcaaacggatcttcgagacgcagcgggccagaaacgaactggagtggcagcagctcaagatgaaggaggagatggagaaggccatgtgcgagatccgcacctcggagaatgcgctgcgtgacaagacggatgcactgaagctggccgagacacgcctggagaatcgtgcccagaggtcgggcatggaactgtgcatggaccaggcgcacgacatgctctgcttggaggtggagaagctgcgagagatacgacgccgactgcaggtcaagatcgacgagagcaagaccaactttagtctgctggaggagcacggcaagcgaatcgacgtggatctggagaacaagcagcactcgctgatgacggacatcagggccctggacttgcgcatgcgtctccggggcggcgagttcggctccaaggtggccaacgcctcgcagacggacaggaacataacgctcactcgcatggagaacgagattcccaaagactagacttgggactatgccgcttgctcacttattcaattctatttgccctgacgttcgttgcacgttgtaatttgtccaaattattgtgaataaataaatggtataacgttaaagcttcttctggccaaagctgaaggtcagttcacccagcaggggcttgaaaaccgtgctccattctagatgcgtaatggcttctttgggtctccttggaaagtgcactccctgtctcacaaacatgtcccactttacgaactcgccgggcacgacaggttcactgggaccactgcttacaatggatctggggctattgtcctccaccaactgccagtccacccataaggccactccgttgcagattctggggctaaaaaaggaatgaggattgaatctatgcataacattactgccgaatcactcactgcttgagctcaatgctgcccttcaggctgtgctcttggccaaagttactaaaatccacactgagaacttcctggggttctgagagtgcgcgacagggatattcccacaggggctgcgcctccaccaaggacactgcctgctctgctgagcgctgtgaagaataataatcaacatttcaatggttaaatcgaaagttaataaggaattgcagacgtacctccaccatttcatcaaacaggcgcagatcaaatccctcgcagctgccaacgggcgctcgaatcttgtgcagatcgagaaactccacgggaagagcatagatgcgcgccgagcatggcgaaatctttacaccttccggcagcctgtccttgattttggtgagcagggtgccaaagtagaagttgtcccagggtagaatcgcattgaggaagtagggctcagcgaaaatgtgagtgagcgcagctagccgagagtcctccagttcctccaccttgtccaaaaactggacattcttaagctggttgtgcttaacaatcgactcgattaatctacgcgagaagcgatggggttcgtggagcagcacagacgcagcacccaaagcagagctagcaagtcccagcaggcagccgtttccgaggaccaggacattcgacttctccgcctctatgctttcctccaggtagcgcaggtagcgcttgtttcgcggtgactggttgagctggccaatcctactgcgtgagtaggtcatgtgcaggtcgcaggtgcaggtatgccgccgcacgctcttcgtgggcgcctcttcgcgtgcatcgaaccagagggagtactcatcgtggtggcagctgaggtggaaggatttacctgcctcgagcagttgcaggggcttgggtatgtagtagatggcctgcatccagtgatcccgccagggcaccacattgggcagcggatgatccttcgccttctcagctgccagctccttcagctgtggatgcgcccagtaaggagcacagctgagcaatatctccccgtcatcgtccagctgaatgtcccaccagtagaagaccagctcagcggctcccggttgcttggactgcagctttagtaattgcgaccgctgcttctcccgctcctgcttgcgctggaaatcgaactggaagatctcgacgggatcggtgagcgggcggaatgcggagcttggcagctgcgacagctggacgtcgtgcagcgcagcttctccttggcagctcttcagctgctccggtgggtgcagcaaaggttcgccgtccaagttggcaatcgttttcaggctgttccactgcgcagctagcggagattgcgccacctgggcatagcatctggcgcgcgcgggaatgcagagagcgtcctcggtcagcagttcggcgtgggcatggttgtagatgccgatggcaccctcgccaatcagttctgtatccagcagctcggccactagcagattcgcctttcgcggcatatcctcgcccacttggatctctgtggatcgctttcggatgagacgcaccttgtcgccagctccgttggccgccagaattttctccgcgcaattggccattggcaggaaggcctcgcaagcggtcaccgaatccgctcctgctgccaaggccatcatcgacaggattcccgtgcccgtgccgatgtccagcacgtgcacctccctgcccgcctcacgcattccggctatggtctttctcagagcggcgaagtacttctggttgcgctcccagtcgtgcagcatgtcgccgaatccggcgttggccacctccaggtggtagtcgtagtcatcgccgcgctcctgccaggagttctgccccgttatcgggttcatcacgtgcgagaagcaggacatgctgcgcggtgccgggaaacgtgactttaacaaattcctcaacataaaaaccggcgaaataaacaccgtccacagtgatggcaccagctgttttcttagaagtgctctactactcgaccttgcagaaatagctaatcaaaactagcgataaacgagtcgtattcgcttttaaaatactaaatactatatttaatgctgaagctaaaaataaacaggatcttatatcatgtagtttttattcccaacgtttaaattatctgactaaaaacatagacactgtcagcgtcgccagactagcacagaactaagccatctggcagccccaggcttgttagaaaaatatcgaaagcccgcgtaaaaatcgataagttcaaactaaggtttatacggtttattaattttttttattgtcatatttgataaatcttatttcttatatctacaacacgattttcttaaaactgatgatctagccggcgttttacgctagccagaagcttagcgcgatgtcgcaatccataatttctgaccaaaggagtctcatttccgcactttttgtttttcttggcggaaacagtagaagtcgaaggatgcaaggatgaatctccctttgggcaggaccaattgttgaccataaaatccaccagtgaaattcccagtacaaggagaacgaggcaagcaggattcacttggagaaacgacagaggaccttccattctcgtatatttacttcttgaggtgctgatagcgaatgatgtgctgatcccgatatccaacgtatttatatagtaaccaggtagaatttagcccctcaatctactaagttagtacctgtcatggggtcaaaaggtcaaaaagggttggtgagaagtttagtaaacaaggtcataaatacaaatccttttgttttgacacggctttgaacttcgagcttgtgcaaacatgtctaatcgggcattgttgcgcagaaaaaagggttcattaaagtgaaaccaaaccgctaagttggttaattcgtgttgctaaagatatcactc

SEQ ID NO: 20975 - DNA, 2051 bp, DROSOPHILA
gaatttgttaaagtcacgtttcccggcaccgcgcagcatgtcctgcttctcgcacgtgatgaacccgataacggggcagaactcctggcaggagcgcggcgatgactacgactaccacctggaggtggccaacgccggattcggcgacatgctgcacgactgggagcgcaaccagaagtacttcgccgctctgagaaagaccatagccggaatgcgtgaggcgggcagggaggtgcacgtgctggacatcggcacgggcacgggaatcctgtcgatgatggccttggcagcaggagcggattcggtgaccgcttgcgaggccttcctgccaatggccaattgcgcggagaaaattctggcggccaacggagctggcgacaaggtgcgtctcatccgaaagcgatccacagagatccaagtgggcgaggatatgccgcgaaaggcgaatctgctagtggccgagctgctggatacagaactgattggcgagggtgccatcggcatctacaaccatgcccacgccgaactgctgaccgaggacgctctctgcattcccgcgcgcgccagatgctatgcccaggtggcgcaatctccgctagctgcgcagtggaacagcctgaaaacgattgccaacttggacggcgaacctttgctgcacccaccggagcagctgaagagctgccaaggagaagctgcgctgcacgacgtccagctgtcgcagctgccaagctccgcattccgcccgctcaccgatcccgtcgagatcttccagttcgatttccagcgcaagcaggagcgggagaagcagcggtcgcaattactaaagctgcagtccaagcaaccgggagccgctgagctggtcttctactggtgggacattcagctggacgatgacggggagatattgctcagctgtgctccttactgggcgcatccacagctgaaggagctggcagctgagaaggcgaaggatcatccgctgcccaatgtggtgccctggcgggatcactggatgcaggccatctactacatacccaagcccctgcaactgctcgaggcaggtaaatccttccacctcagctgccaccacgatgagtactccctctggttcgatgcacgcgaagaggcgcccacgaagagcgtgcggcggcatacctgcacctgcgacctgcacatgacctactcacgcagaaagcatagaggcggagaagtcgaatgtcctggtcctcggaaacggctgcctgctgggacttgctagctctgctttgggtgctgcgtctgtgctgctccacgaaccccatcgcttctcgcgtagattaatcgagtcgattgttaagcacaaccagcttaagaatgtccagtttttggacaaggtggaggaactggaggactctcggctagctgcgctcactcacattttcgctgagccctacttcctcaatgcgattctaccctgggacaacttctactttggcaccctgctcaccaaaatcaaggacaggctgccggaaggtgtaaagatttcgccatgctcggcgcgcatctatgctcttcccgtggagtttctcgatctgcacaagattcgagcgcccgttggcagctgcgagggatttgatctgcgcctgtttgatgaaatggtggagcgctcagcagagcaggcagtgtccttggtggaggcgcagcccctgtgggaatatccctgtcgcgcactctcagaaccccaggaagttctcagtgtggattttagtaactttggccaagagcacagcctgaagggcagcattgagctcaagcaccccagaatctgcaacggagtggccttatgggtggactggcagttggtggaggacaatagccccagatccattgtaagcagtggtcccagtgaacctgtcgtgcccggcgagttcgtaaagtgggacatgtttgtgagacagggagtgcactttccaaggagacccaaagaagccattacgcatctagaatggagcacggttttcaagcccctgctgggtgaactgaccttcagctttggccagaagaagctttaa

SEQ ID NO: 20976 - protein, 406 aa, DROSOPHILA
MSCFSHVMNPITGQNSWQERGDDYDYHLEVANAGFGDMLHDWERNQKYFAALRKTIAGMREAGREVHVLDIGTGTGILSMMALAAGADSVTACEAFLPMANCAEKILAANGAGDKVRLIRKRSTEIQVGEDMPRKANLLVAELLDTELIGEGAIGIYNHAHAELLTEDALCIPARARCYAQVAQSPLAAQWNSLKTIANLDGEPLLHPPEQLKSCQGEAALHDVQLSQLPSSAFRPLTDPVEIFQFDFQRKQEREKQRSQLLKLQSKQPGAAELVFYWWDIQLDDDGEILLSCAPYWAHPQLKELAAEKAKDHPLPNVVPWRDHWMQAIYYIPKPLQLLEAGKSFHLSCHHDEYSLWFDAREEAPTKSVRRHTCTCDLHMTYSRRKHRGGEVECPGPRKRLPAGTC

SEQ ID NO: 20977 - DNA, 3790 bp, DROSOPHILA
gtatgtgctggttaaacaagtattttcacaagatatatgcgatgaaagattcttaaaaggtctgaaaaaatatctcgggttaaaattggttcgacaaaaaaaaaacgtgttacaactacactatcgctgcggacaggacttgaacctgtgcgggtagaacccaatggatttcaagtccatctccttaaccactcggacaccgcagccttattgaagtccgctccatttgtcactgatatctctccctgcataattctatgctgataagcatctgaatttctgcaaagcgatgacagtaaatcactagatatttgaatgcagaaatatgcagttcaatttcttcaataccacaagttttagtttaattgatagctgctcttcatgacatgtgctcatacttctatatgtaaactattagcttaagtgagagcgaactaaaaaataatgtattgctacattattttatttatttatgtattaagctaataatctttatggattcattagccccacgtgaacgaaactccaattttcattaagaatggcttaagccgagacaccaccccgtgaatagttcttggttcgtgtctgtataaatggtgcgtcatacctggcgaagataggtgaggggggtgctgaaatctatgcttcataccaaataggaactttgccaccggggcgacacagttgcggtgtccgagtggttaaggagatggacttgaaatccattgggttctacccgcgcaggttcgaatcctgtccgcagcgcagaactttttttattttttatttattgtgaatttgcagagggtactaatagctgaccttaatatttctttgacatttcattgttaagcattatactttctgtgatgaagatgaaaacaaactagtgtataccagccttgcccaaccattttccgcaatacccctcagaaaaaccacgtttgtacaaagattgactttaaagatcttcatctttcataggaactccatattgttacactggcatttggtttttgtgtatattttgtacgtctgctacaaaaataatgtgcattttgatttatctttataactacggttttatatttaaaagaaacttaatacaactcgtctgtattagtacaatagccttaaaactaaacccagcagaaaacgacttcttactgcttgggcggtggtcggtagacgccaacgacaacggcgtggtctcgctcgtagggctccagcgtgagctgctcttggggcttcagcttgtccgcctgcatcttcttcacctcggcagcgaataccgcttcgggctgcgccgtcgagtcgatgcaggaggccttgatcgagatgacaaagtgtccgccgttcttcaggaagtgctgggcattcagcgccacaatgcggccctgatccggctgggcaacgtcggcgaagatggtgtccaccatgcccaccagcatgcggtacttgtgtggatggcgagcgtcctcgatgatgggtatgatgttggtgcgcttcttggccacgttgatcagatcgcgaccggatcggtgtgagaactccacggcgtagaccaggccctcgggtcccaccacatcggacacatgcgagactgtcgttccggaggcggcgcccaggtagagaaccttcgagcccggcggcatgtgaatctgctcgacgccacccagaacggcggcagccagcttggagcggaagggattccacacgcggtactcaatcttctcgccattggtctgcaaagaagaacagatttaaatccattgctctttcttaaaaattatagcagaaagcaagaagtaagtaagttgagtgaaatacagagttgtttggattgttcaggtagcttcaaatcacttttcaagatggtggacttgtttgggttctgtttgttttgggatagaagggtagatagataggaattcgcctcagttgtgcattattctaagcagcccttggagctccgcgactgcttcacgtgcacctgaagtgcacacagccacaggtgaccgccaaggatgctcatggccacatgatgccatgttctgtacccctgcacaacctcatcataagctaggaatagggaaggtaagtgaataaagatgagaacaacaaacctcaacggagatgcgcttctcgccgtagacttcggatccaggtacaaagttcctggtgaccagagcgtcctccttgccgcgcgcaatgaacactccctcgtgacgatgcggctcgatggtgacggtcttgccgcccttgaagccgccagcaccaccaccacgtcctcctccgccgcgaccaccgcctccacggccgccgccaccgcgaccaccgccgccgccacgtcctccgaaggcaccacggccgccgccgccaccaccaccgcgaccacctcctccacggccaccaccgaatcctccacggccaccgcgatcgccgccgccaccgcgtccacggccgcctccaaatccaccgcctcctccgccgccgccgccaccacgcccacggaatccacctcctcctcctccgccgccgccgccaccaccgcgtggactgaatcctgcaatagaaaagatccgcatttgaatttcggttgactcagaggttaagttggagactatcaaaagcaaaggcgacgcctgcttcgatttgtatcgttagagcgtgattttacgcacctggtttgcccattttatgttgctgtacttgcactttttaatacaactttcgacgaaatgtgattgagtccgtcaacacgcggcaaccaaaacgcttgaaaagaaaaacacgtgtgtgccggagtgtggccgcagcagtgattttagtgataatatacagaagtacaaaggcgaaaataccaagagaatgatgttagtgtgtgtgttaggtgggaaacttggctgggactgtagctaagttcaacaccaggcggagaggcaattgtgcatagtggtacaaaggttgaaaaactgtacattttattcttggatatcttgcaaataatgtaattcttttttttttgtattcaattcaaaaattgattgatcaattaaattattgattgatttattaaattaatttaatttttatgagccactacattattatattttacttatttgatgcatgtaactatggaagtatatgattaataattacaatcccgtagtccttgacaatgaccccagtgccttggagatctagtgttcgttgaccaaacaaacagccacttgaaatcgatgtttgagaaaaacgttccattccgctttgagagttctagttgggagcacacactttctgaaattgttaacgcataaatcctgctgttttacctaaacttttgcaaacataatggccttccgctcggtggttacgatggagaagccgctccagcacatttcgctgacggactggtatgcccgtgtgaaccagatgcggaatgtggcggatgcccggaggtcggacgccttcgccatccgccactcatcccgatccttgaggaacgagacgcggatcgagggcgactgggccaactacgagacaaatgaggctctgaccgatcggtgagtgtccatatcttatattaagattaacagcacgattaataatctgtaatttatacatcagcatctccgagttgaatcgctggcgggatatcatttccaagtccttcgagaagatcgagcgcgagatattcatgctgcaggaggagaagaatgccacggaacgggagctggaggcgttggcaggtccgatttccgtgatagccgagtgcctgacc

SEQ ID NO: 20978 - DNA, 1291 bp, DROSOPHILA
cttttcaagcgttttggttgccgcgtgttgacggactcaatcacatttcgtcgaaagttgtattaaaaagtgcaagtacagcaacataaaatgggcaaaccaggattcagtccacgcggtggtggcggcggcggcggaggaggaggaggtggattccgtgggcgtggtggcggcggcggcggaggaggcggtggatttggaggcggccgtggacgcggtggcggcggcgatcgcggtggccgtggaggattcggtggtggccgtggaggaggtggtcgcggtggtggtggcggcggcggccgtggtgccttcggaggacgtggcggcggcggtggtcgcggtggcggcggccgtggaggcggtggtcgcggcggaggaggacgtggtggtggtgctggcggcttcaagggcggcaagaccgtcaccatcgagccgcatcgtcacgagggagtgttcattgcgcgcggcaaggaggacgctctggtcaccaggaactttgtacctggatccgaagtctacggcgagaagcgcatctccgttgagaccaatggcgagaagattgagtaccgcgtgtggaatcccttccgctccaagctggctgccgccgttctgggtggcgtcgagcagattcacatgccgccgggctcgaaggttctctacctgggcgccgcctccggaacgacagtctcgcatgtgtccgatgtggtgggacccgagggcctggtctacgccgtggagttctcacaccgatccggtcgcgatctgatcaacgtggccaagaagcgcaccaacatcatacccatcatcgaggacgctcgccatccacacaagtaccgcatgctggtgggcatggtggacaccatcttcgccgacgttgcccagccggatcagggccgcattgtggcgctgaatgcccagcacttcctgaagaacggcggacactttgtcatctcgatcaaggcctcctgcatcgactcgacggcgcagcccgaagcggtattcgctgccgaggtgaagaagatgcaggcggacaagctgaagccccaagagcagctcacgctggagccctacgagcgagaccacgccgttgtcgttggcgtctaccgaccaccgcccaagcagtaagaagtcgttttctgctgggtttagttttaaggctattgtactaatacagacgagttgtattaagtttcttttaaatataaaaccgtagttataaagataaatcaaaatgcacattatttttgtagcagacgtacaaaatatacacaaaaaccaaatgccagtgtaa

SEQ ID NO: 20979 - protein, 344 aa, DROSOPHILA
MGKPGFSPRGGGGGGGGGGGGFRGRGGGGGGGGGGFGGGRGRGGGGDRGGRGGFGGGRGGGGRGGGGGGGRGAFGGRGGGGGRGGGGRGGGGRGGGGRGGGAGGFKGGKTVTIEPHRHEGVFIARGKEDALVTRNFVPGSEVYGEKRISVETNGEKIEYRVWNPFRSKLAAAVLGGVEQIHMPPGSKVLYLGAASGTTVSHVSDVVGPEGLVYAVEFSHRSGRDLINVAKKRTNIIPIIEDARHPHKYRMLVGMVDTIFADVAQPDQGRIVALNAQHFLKNGGHFVISIKASCIDSTAQPEAVFAAEVKKMQADKLKPQEQLTLEPYERDHAVVVGVYRPPPKQ

SEQ ID NO: 20980 - DNA, 3478 bp, DROSOPHILA
tccaatcaaatcgggatggctttagctacgattacacttttcaatagaacctaggttacatccattgcttgagcaactgatgccttcagcttaagtggaaccagattttcaggtgaacggatttggaaacggggtcgtataaaatactttcagcagtctttggatctatatccgctcaatccttgggcggcacatccttgctcaactctgcacgcttcctctgctccatgcgctcctctacctggtccaagcgctcgctcatggcatccagggagctcagcagtcccgcctggatctcgccatatcgcttcatggccaggaccagactctcctcgataagttcgctctgctgcgcgtactccccgttgttctgcgttatgccctttagctgctccagacactcggcgggaatgctgcggaagtactccgcgcccagggccggttccagctgcttaatcctctccagctgctcggcctgcgtgtgcagctcgggggccacggcttgcaggtacacctccttggagcgcacctgctggtgctcctccaggaagttggggtccaggtacttctccagctcgtcagatctcttcacgcactgctgcagtgcagcacttcctgtggttgcttcgcccaggatggcgtgtgccgagcacagggcgtcgaccacgccctcgcccacctcagagtcctggaccggacccaggactcgtgtcagggcatcgatgcgcttctccagaatgtccagtgcctccatttttcgctgaatttctctttattttgttcgttttgatgggaatgatgtcagtctgcaaaacaatcgatgtccaacgaaaaggtggcaacgttagcttggtggcaaggttcttgtactcgctaagcagaacgaattaacccttatgcggactaaaaaatatggtatttaaataaaatatttagctcctctgcataaagtttttggtgcatacgtatctataaatatagtacacacttaaattccattgctatttacttagtttcttttaaacgtaaactgtacaatacaaaaatctcagttacaacagcttaaaattctcgagggacaaccgctccgcatccttgttgatctgcgccagactatcctcggagatgatgcgcaccgtatcgacgtccgggtcatcgcctccggaatcatccagcacacacagcagaccatcgttctcgatgtacgggaagaagaactcgggcttgtcccagctctccttatcgccgattccgtggtgcgactcttgtgccatgtgctccacgagcagctcctcctcgtcgaactgcagatcgcaggtcacgcagcgcagcaggcacatttggcggcgcaggtagttgaccaccttgacgcgttggtagaagttcagagagctggtggccttctcgaaatccaagcgatgaacctcgtgcatgtgcttcttgagggcggtgaagttgtcgccgagatggtggcaaaacaggcacttaatggagctaggctcaccatctgccgcccaatccgaccagtccgaatcgtgttcgccatccgaatcagggcgagcgaagtgcttgtcgaagtccacgctgccggtttcaggatcagcaactgtggacacggatgccgtttcccgtcttcgcttttggaggtgctgtttccggggcgtgggggccgttggtacacgattgtagttgataaggaagtacttgtcgtactcccttcggttcggattgatccgcttgtggcccttcttgcgcatgtgttccttgagcgtgggccgatccctgaagatcttctcgcagtagaggcacattaaccgattcaagttctcctccaggtgatccagcagttcgtccacatacaccagcttctcgggcttgccgaccaacagaaagtgcttgtcaaacagatggtccagatagtccgccctcaatcccttgatgatggccctgcagaaaaggcactccttggagaaggtgcggtcggttagctcgaactgatgtcgctccagggcttcacttaggcgcttctccttcaaccttcgccgcagctcgtagtcctggggcaggatgtcacacagcaggtagtacttttcgttcttggcgtacttgccatcgggcagctgatccaggaacattgtggtgcaatattgctcgaattcgtgggctaaaatgggtaacaattattaaattttcagggtagggttgctgattctctcactgtgaaactccttttcccagtactggaggtagtcctccagaagcgctatatcctccacatcggcgatgaccagtcggtgctccatatacaaatgcgccaggcagtcatctttatctgacggaaatatgtacaccttgtcgcatttcaggcacttgatggccgtgttcttggagggcttgagtttcgaactgccagtgatctcctccagcgaggaatcccctcctgaaacagccacctcgtgctccatttgtttacgttctcctggtgctccacgaataagtgtgaccgcaggtgcttagcggcaaaatactgtttgcgagataagcttaattatgacgtacactggaaacaattgaaaatttaatgaatttaatttaatgcacaaaaaaaattaaataaatacttacaactgtcttatgaagactaaataatcaaaaaatgatattcagtattttcgatgtagacaacacgtactggaaatgttaatatccttataggatattatacgattcaaatatttgtaacttatctgtgaattaaaattctgaaacttacaaatacattgttcgttaagttttcaacagactatgatgaatcagcagcatcttatcggttaaaaatgtttttttcggaactctgtgattcaatgcttatactatggcaatagttaaaaattcttaagttagtaatattttagattgttttttggggttgacgaacttgagatgttcgccatgtaaccatagggcatttcggctgctgggtataaaaggagctgatagttgggtggggacgtgcagttgagaatcagcaactgctcgctaaaggtcctcctaatcgcgaatccatcgaaaatggccgacaagaagaatctgctccttctgttcgatcatcccacggagcccgtgttcatggacaagggtggcaatggcaccgtcttcgacgtgcccgactcctacgtgaccgatcgctacaatcagatgtgcaagaaggtccagcggcgcgtgagcagcgcgtccgagaagaacgttcaagtcaaggagatcgccataccggatctcagttgctccatgagactgggccgctcggagcagttctcgatcttcctgaagtcccaccgcaagatggccagccacctgatcgagatcttcaccaaaatgcagaccgtggatgagctgcagagcgtggcggtgtacgccagggatcgcgtcaatccggtgctcttcaactacgccttgtcggtggccctgctccaccgtc

SEQ ID NO: 20981 - DNA, 1424 bp, DROSOPHILA
agaacgtaaacaaatggagcacgaggtggctgtttcaggaggggattcctcgctggaggagatcactggcagttcgaaactcaagccctccaagaacacggccatcaagtgcctgaaatgcgacaaggtgtacatatttccgtcagataaagatgactgcctggcgcatttgtatatggagcaccgactggtcatcgccgatgtggaggatatagcgcttctggaggactacctccagtactgggaaaaggagtttcacacccacgaattcgagcaatattgcaccacaatgttcctggatcagctgcccgatggcaagtacgccaagaacgaaaagtactacctgctgtgtgacatcctgccccaggactacgagctgcggcgaaggttgaaggagaagcgcctaagtgaagccctggagcgacatcagttcgagctaaccgaccgcaccttctccaaggagtgccttttctgcagggccatcatcaagggattgagggcggactatctggaccatctgtttgacaagcactttctgttggtcggcaagcccgagaagctggtgtatgtggacgaactgctggatcacctggaggagaacttgaatcggttaatgtgcctctactgcgagaagatcttcagggatcggcccacgctcaaggaacacatgcgcaagaagggccacaagcggatcaatccgaaccgaagggagtacgacaagtacttccttatcaactacaatcgtgtaccaacggcccccacgccccggaaacagcacctccaaaagcgaagacgggaaacggcatccgtgtccacagttgctgatcctgaaaccggcagcgtggacttcgacaagcacttcgctcgccctgattcggatggcgaacacgattcggactggtcggattgggcggcagatggtgagcctagctccattaagtgcctgttttgccaccatctcggcgacaacttcaccgccctcaagaagcacatgcacgaggttcatcgcttggatttcgagaaggccaccagctctctgaacttctaccaacgcgtcaaggtggtcaactacctgcgccgccaaatgtgcctgctgcgctgcgtgacctgcgatctgcagttcgacgaggaggagctgctcgtggagcacatggcacaagagtcgcaccacggaatcggcgataaggagagctgggacaagcccgagttcttcttcccgtacatcgagaacgatggtctgctgtgtgtgctggatgattccggaggcgatgacccggacgtcgatacggtgcgcatcatctccgaggatagtctggcgcagatcaacaaggatgcggagcggttgtccctcgagaattttaagctgttgtaactgagatttttgtattgtacagtttacgtttaaaagaaactaagtaaatagc

SEQ ID NO: 20982 - protein, 452 aa, DROSOPHILA
MEHEVAVSGGDSSLEEITGSSKLKPSKNTAIKCLKCDKVYIFPSDKDDCLAHLYMEHRLVIADVEDIALLEDYLQYWEKEFHTHEFEQYCTTMFLDQLPDGKYAKNEKYYLLCDILPQDYELRRRLKEKRLSEALERHQFELTDRTFSKECLFCRAIIKGLRADYLDHLFDKHFLLVGKPEKLVYVDELLDHLEENLNRLMCLYCEKIFRDRPTLKEHMRKKGHKRINPNRREYDKYFLINYNRVPTAPTPRKQHLQKRRRETASVSTVADPETGSVDFDKHFARPDSDGEHDSDWSDWAADGEPSSIKCLFCHHLGDNFTALKKHMHEVHRLDFEKATSSLNFYQRVKVVNYLRRQMCLLRCVTCDLQFDEEELLVEHMAQESHHGIGDKESWDKPEFFFPYIENDGLLCVLDDSGGDDPDVDTVRIISEDSLAQINKDAERLSLENFKLL

SEQ ID NO: 20983 - DNA, 7327 bp, DROSOPHILA
ctaaagatcgtttcagccgttcttattaaaaagaccatagtctttgggaaaactccatttatttttagctattgggtaaattacataaattagtttgttatcccgttggtacacatcaagtttatccataaaagacatatccatttacaaatgattcacatatatttcgtgtttttcgaaaagcttcgatcgaaattcagaaattgtagctaagacatgcaccttctttagctagttttcaaacccaaagtgatctcacttatggatgtaaagaaaaatataacaaaaatgatttgttttcgtttttggtaaaaagtcatgtaaataaaaatcacacgtattcaaaactgtgcgctctgtaaaataactttcagaattatagttcttaagtatcggtataacgcttaagcatcttaattcaattttgatttaaaagatcaatctattagggctgcatcatcggatttttgtcttttttatttatcatggtaaatgcaatatccgtaaaatccttataaaatacatcatgttggtatcaaattctctatgtaagtctgtgcactcaaactgagattttcatggtggacaccgacggattatccttagtcgctaatgcgagtactttaagttcgttggtatcatcaaattcaaaacttacaaattacttgactttatctcacaagttggtcttcagttacgctttattatatttttttttttttagtggaacttaagcgaagtatagcgttagaatattatattgcagctgaaacctatcattgtgattcccttttgatagcgggaaaaaaaacacaatcataaaattgcactagggtgggtcgatttcttcgatttgcagaatatgagtttataaaattatacacttcctaataaacaataaaagtggtcaccggttctgtgtattaggcttgaaggcaactaatttcaaagtttcacgaaagtatagaattttatagaaacccactctgcaagtaagatattttgaaatatgggaatatattattatattatattacgttgtacttttttcccaaaaggttataagtatttttgtaacggttttttgttttaatacatatatatatatttttaattgtaaacacataaccgtttttccagtttgaatcaatcaaatcgaaccactctgctgtttgataatggaatgtaaattaatttaaaggcgtagctagtgcccttgcaccctatccatttccagaccgccctcctcctccattttgctgaggaacttgataacccgctggtgaggctccgattgccggatcatatcgatgagagccagcagcttcttgatgccgatacacaatcgcttacccgccattttcctggcaatgctctgcagctcctcgggactaaacaaatcagaatcatccagcacggcaagcacgttctcgggagttgagagattggacacatgcaggacggacgtgaaagccgagagcatttccatctcctcgagaacgtcccgccggctggaagtgcacaggatcagcagttttctaccctttggcggttgctttttcagtagaaccaatagcgcctgcagcgtgagattagagtacctgggtccaattggaccgtagtctagcaatcgctccacattgtccaccacaatgcagctcaatgtggagcgataggcgtcgtcgaagatcttgcggatgtgcaggcacttggctgactccgtaaatcctaccatatcttccggggagcagaccttaacgaatgggaaatcactcaactgggccagattagcggccagcgctgatttgccggagttgggagctccttcgatgagaacagacaccaggccagagctctcagtggccttcgcctgctgtacggagagcattccgtcctccaggagttcggtgaccggtgggccccagtttataattccgcgtgccagcagattttccagcatctcctgggctgctccaaaggcgggcttgatgtcgttgtccaatgcgtgcagaaagtcggctcgcgtaacacgcagtttttccatagcctccgggtccacgtgaaccttggatcgtagaaaagcaaatgatgatggtaattttagaatagtggaacagtcgaacgttaatcgctttcttggtttatcgaaaccaaattactcgaaattaaacgaaacccgaaacgcaaaccgagagataaatgaaataagcgaatacgccaaataaataaaataacatttcgatccgaatgtgaattaagagaaccccctttctttgctttcacgccatgctgtgcatcatataccttggagtccgcctttattaaccgattcatggccgtggattgggccgctctaaccagaccctccaactctgcgccactgaagttctttgtcttggccgcgatctcattgttgtccacatcgctagctatcttgttaaagtcacgcatccgcttggtgtggatattcaggatctggacgcgaccctgctcgttgggcaagctgatctccatttgcacttccaagcgtccaggtcgcagcagggcctcatcgatcatgtcccgccggttggtcattcctattaccaggatgttgttcaactgctccacgccgtcgatcttggctagcagttgattgacgaccgtgtcgtggacaccactattaccggccacggatccgcgagccttgcaaatggcgtcgatctcgtcgaagatgatgatgtgcagtccactgttcggtcccaagcgcttttcctcctcctcggcctcggcaaacagtcgccggatattggcttctgattcacccacgtacttgtccaggatctgcggtccattcacgatcttgggttcgcgggcattcagcatggtacctatttgccgggccatcagggtttttcccgtgcctggtggtccgtacaacagaatacccttaacgtgcttgatgcccagttgttcgacaagttccggcggaaaaacacgagaggcgaaggcgcgtcggaaaatcgcattgaactctttgtctaggccaccaatgcccatcttgccaaagtcccagtccggatttatgatggactgccgcacgatcttacccttggagcgaccctgcagatttagcacagagttttcggccttctcgaactgcaccaccgtgttaccgaggatgcggccgaatcgtacgttccgagtcttcggtagggaatcgcccactgttcggggatccactgcctccagcgtttttacagcgaggcccaggaatttcttgtctttgaactgaaaggcggtaaacatccttattagcaaacgaacgatatatgtacattaaggagcatgttagaagaattactatgttaagatagttgcatttcctatgagggcagcctaacacactatttttagttcataaaaaagggggacattgtatgctgaattattaaaaaagatttggcagagagccaaaaagatgatctaagggagagttacgtgtctttgggtttctaattgttggaggtaagctaccttgttaatatttgcattaggtcaccgtctaaatgtggaatatgagattcagcatctcatgacaatcaagacacgtcagtaaatataaaataacgaatatcgaataacacaaataacgaatattctcactaccgctatgctatgaacgtataaatctttttgtaaagttatacaaaaccaaaattattataagtgcacacaataaatggtgaaataatgaataggtgcgtccgagataaaccgagaaccctcattgaattgggtagtattttaactggctctggcatatatcactaatcctctccagattactaccttagtttcagtcctttgctatctatttttctatactgcatacatttatgggggagccacatccacaccattacctgaaagacgagcgtttggccgacggtcagcggcattccggcgaactgcatgaggaactccttggccatctcgtcggagtcgtagggctcctgcgtggtggtcttcttctgcaggaagtccgtctcgaaggagaccagtgtgatgatatcggcgctggcatcgaatcggtacggccgcacgtctatttcctggttgatggagagcgtggcccacttgcgctggaccagcgagaatccgacgtggccgagcggcagctccggcccgctgatcttctccagcgcgaagatgtagtgcagccccgggcccggcgagatgtccacatatctgcagggtatcaagcggtgcgtcattagcataagcgaaagtttccataggctcgtacgcccacgtaggaagtggaaaaacaacaaaaaccaacactcacttgacctcctccgtgaaatcggacacattcacaatcgccttgttcgtcagggacagctcatccgttgggcatttgatcgctctcatccggtgggctttttcaattgacattttcgtagcaattttataatataatcccgaaattgtctcaaacagctgatagcccgttgagggagtgcaaccctgttcggcattgcgtgtgtgtatgcactgtgattgcgagcaaaagatgcctgctacggcacctgcagtgcaaatttgaattcattggcgcgcatttgcattttctaataatacatatatcccccgcattcaagacttcttcgctgttgctaagcagctctgcagcaccaggattggtgaagaaaacaatccaaaaaatgtgttgtatcaaaagccaaatcctctaagtaaataacgataaaatgggtggcatttgcaattcaaatatctttatttttacttatatatatataatatggtaataaaacttgttatgccaatcaccaaagacactagaacaatataatatatatatataatatataatatatattatatatataattatgtatatatatatatattggacaacgacatcaagcccgcctttggagcagcccaggagatgttgggcccaccggtcaccgaactcctggaggacggaatgctctccgtacagcaggcgaaggccactgagaggtctggcctggtgtatatataatatatatataatataataatctagtatctttgcaatcacattatcgggctgttcattttagtcttaagaacattgcaatgcaatggaagcaagttcatccaaaaaataatgcaatattatttttttagatggtttttttatgcttacgtggttcttttaaatataaagcattactgaattatttggaatcacttggaattattttcctggaattgtagatacaatattgcatttcctaacctaacgtcttaaatgtattgaggtacaagtggactagaatggttccctacccatcccattgcttcgcccaatttcttcagcaatttggcagctcgacggtcgggatttagggaattcacccacgcaatcaagtcaagcaaccgtttgatgccaatggagacgttgcggccatccatggcgatctcgatttggcgtagctcctcgggctcgaatcgttttgaagcttccactatgaccataagttctttaggcgtggaaacatttggcacattgtgaactgaagtgaaaacggatagcaagcccagttcctccaggacatcgagacgattgcttgtgcaaatgatgatgagctcgtggctgttgggcggttgtttcttcagaagaaccgtcagcttctgcaggaactccttggagtaccgcttacccagggcgccgtaaccaatgacacgctcaaagtcgtcaatgatgacgcagctgcgcctggaaacataggcgtcctccaagacttcccgtattctctggcatttttcggaatcgctaagtcccagcaattcggccgacgagatgtattttataaaagggcagtctgttttcaaagccatttgagcggccaccgtagttaggcctgacttgggcttaccttcgaccagatggcaagaccatcttgggcgtccggtggacaggagatcattcggatcgaaagcggtacgatctagatattcatatggcatgagcagctggagagtctcctcctgccggccaaatcgtggctgaatgatctttaccgcggccaggagatcgacctgagtgacttgaaggcccttcgggcatctggtgacgtgagtgcggacaatggcttcatggagggcttctcggaccagttggcacagctcgtcctccgtgaaatttttggttttcattgcaatttcgcgtgcgcaaacatcgccggccaccgtaatgtcacccagcctgttgatgcgcgattttaagaggttcacacgctcctcagtgttgggtaaagtgatgttgaccatcttggcgcccgggttggcttcttttatggagaaattatattggatatgaaatggtcaaattgtatcagctgttctttacaaaatggttttgtatattatgttatccacctaaaatcgattgcgataactgcgatcgattttaaatttcagggacggtcgaagtttcgataagacggtggttcaattcaaaccattatattgtaagtttttattattttataaggtagcttaaaattaaaataatattaatattttgaattgccattattttccgaaccaatgtgttatcagcttcgttatgtatgtgttatcagcttcgtattacgatagtgtaaccaaatttccatttgaaaatactgcttttccacttggctattacaaaaaaagcgcgccacttttgaaaaatatctaaacttaaaattagtaaaaataattgcacactattttatccatcaagtattttaatgccttgactttaactacatgaaatgcagaaaaaatttcatcgtacatatatgtcactttaatatttgtattgtttatggctaataaaaataccgatagaccgattgactggcggtttcgatgtactgcaaccgttacaatttaaacgactttgtgatttatgatattcttgagtttcgttccgtttgctaaaacctaggcacacattatgaattcccgcttttcggctcttctgctgggttggctgtgcaattacttgcaatatcgtatttttcttctttccttgccgctgacctcgagcagttaatcatgcgctcgataattggatagtggatgtctctattcgttctgggttgcacaacaaatttatagcgtgcattatattcggacagtttaattgggtatcgacatttattaatttatccggtcggccggcctagcgtaatgccggtaatttcttgtcccatccgaatttgaccactcaaggctttcaacactccacatccgcacagcatcctccttcccactccttgcc

SEQ ID NO: 20984 - DNA, 3549 bp, DROSOPHILA
atggtcaacatcactttacccaacactgaggagcgtgtgaacctcttaaaatcgcgcatcaacaggctgggtgacattacggtggccggcgatgtttgcgcacgcgaaattgcaatgaaaaccaaaaatttcacggaggacgagctgtgccaactggtccgagaagccctccatgaagccattgtccgcactcacgtcaccagatgcccgaagggccttcaagtcactcaggtcgatctcctggccgcggtaaagatcattcagccacgatttggccggcaggaggagactctccagctgctcatgccatatgaatatctagatcgtaccgctttcgatccgaatgatctcctgtccaccggacgcccaagatggtcttgccatctggtcgaaggtaagcccaagtcaggcctaactacggtggccgctcaaatggctttgaaaacagactgcccttttataaaatacatctcgtcggccgaattgctgggacttagcgattccgaaaaatgccagagaatacgggaagtcttggaggacgcctatgtttccaggcgcagctgcgtcatcattgacgactttgagcgtgtcattggttacggcgccctgggtaagcggtactccaaggagttcctgcagaagctgacggttcttctgaagaaacaaccgcccaacagccacgagctcatcatcatttgcacaagcaatcgtctcgatgtcctggaggaactgggcttgctatccgttttcacttcagttcacaatgtgccaaatgtttccacgcctaaagaacttatggtcatagtggaagcttcaaaacgattcgagcccgaggagctacgccaaatcgagatcgccatggatggccgcaacgtctccattggcatcaaacggttgcttgacttgattgcgtgggtgaattccctaaatcccgaccgtcgagctgccaaattgctgaagaaattgggcgaagcaatgggatggtgcatacacacacgcaatgccgaacagggttgcactccctcaacgggctatcagctgtttgagacaatttcgggattatattataaaattgctacgaaaatgtcaattgaaaaagcccaccggatgagagcgatcaaatgcccaacggatgagctgtccctgacgaacaaggcgattgtgaatgtgtccgatttcacggaggaggtcaaatatgtggacatctcgccgggcccggggctgcactacatcttcgcgctggagaagatcagcgggccggagctgccgctcggccacgtcggattctcgctggtccagcgcaagtgggccacgctctccatcaaccaggaaatagacgtgcggccgtaccgattcgatgccagcgccgatatcatcacactggtctccttcgagacggacttcctgcagaagaagaccaccacgcaggagccctacgactccgacgagatggccaaggagttcctcatgcagttcgccggaatgccgctgaccgtcggccaaacgctcgtctttcagttcaaagacaagaaattcctgggcctcgctgtaaaaacgctggaggcagtggatccccgaacagtgggcgattccctaccgaagactcggaacgtacgattcggccgcatcctcggtaacacggtggtgcagttcgagaaggccgaaaactctgtgctaaatctgcagggtcgctccaagggtaagatcgtgcggcagtccatcataaatccggactgggactttggcaagatgggcattggtggcctagacaaagagttcaatgcgattttccgacgcgccttcgcctctcgtgtttttccgccggaacttgtcgaacaactgggcatcaagcacgttaagggtattctgttgtacggaccaccaggcacgggaaaaaccctgatggcccggcaaataggtaccatgctgaatgcccgcgaacccaagatcgtgaatggaccgcagatcctggacaagtacgtgggtgaatcagaagccaatatccggcgactgtttgccgaggccgaggaggaggaaaagcgcttgggaccgaacagtggactgcacatcatcatcttcgacgagatcgacgccatttgcaaggctcgcggatccgtggccggtaatagtggtgtccacgacacggtcgtcaatcaactgctagccaagatcgacggcgtggagcagttgaacaacatcctggtaataggaatgaccaaccggcgggacatgatcgatgaggccctgctgcgacctggacgcttggaagtgcaaatggagatcagcttgcccaacgagcagggtcgcgtccagatcctgaatatccacaccaagcggatgcgtgactttaacaagatagctagcgatgtggacaacaatgagatcgcggccaagacaaagaacttcagtggcgcagagttggagggtctggttagagcggcccaatccacggccatgaatcggttaataaaggcggactccaaggttcacgtggacccggaggctatggaaaaactgcgtgttacgcgagccgactttctgcacgcattggacaacgacatcaagcccgcctttggagcagcccaggagatgctggaaaatctgctggcacgcggaattataaactggggcccaccggtcaccgaactcctggaggacggaatgctctccgtacagcaggcgaaggccactgagagctctggcctggtgtctgttctcatcgaaggagctcccaactccggcaaatcagcgctggccgctaatctggcccagttgagtgatttcccattcgttaaggtctgctccccggaagatatggtaggatttacggagtcagccaagtgcctgcacatccgcaagatcttcgacgacgcctatcgctccacattgagctgcattgtggtggacaatgtggagcgattgctagactacggtccaattggacccaggtactctaatctcacgctgcaggcgctattggttctactgaaaaagcaaccgccaaagggtagaaaactgctgatcctgtgcacttccagccggcgggacgttctcgaggagatggaaatgctctcggctttcacgtccgtcctgcatgtgtccaatctctcaactcccgagaacgtgcttgccgtgctggatgattctgatttgtttagtcccgaggagctgcagagcattgccaggaaaatggcgggtaagcgattgtgtatcggcatcaagaagctgctggctctcatcgatatgatccggcaatcggagcctcaccagcgggttatcaagttcctcagcaaaatggaggaggagggcggtctggaaatggatagggtgcaagggcactagctacgcctttaaattaatttacattccattatcaaacagcagagtggttcgatttgattgattcaaactggaaaaacggttatgtgtttacaattaaaaatatatatatatgtattaaaacaaaaaaccgttacaaaaatacttataaccttttgggaaaaaagtacaacgtaatataatataataatatattcccatatttcaaaa

SEQ ID NO: 20985 - protein, 1113 aa, DROSOPHILA
MVNITLPNTEERVNLLKSRINRLGDITVAGDVCAREIAMKTKNFTEDELCQLVREALHEAIVRTHVTRCPKGLQVTQVDLLAAVKIIQPRFGRQEETLQLLMPYEYLDRTAFDPNDLLSTGRPRWSCHLVEGKPKSGLTTVAAQMALKTDCPFIKYISSAELLGLSDSEKCQRIREVLEDAYVSRRSCVIIDDFERVIGYGALGKRYSKEFLQKLTVLLKKQPPNSHELIIICTSNRLDVLEELGLLSVFTSVHNVPNVSTPKELMVIVEASKRFEPEELRQIEIAMDGRNVSIGIKRLLDLIAWVNSLNPDRRAAKLLKKLGEAMGWCIHTRNAEQGCTPSTGYQLFETISGLYYKIATKMSIEKAHRMRAIKCPTDELSLTNKAIVNVSDFTEEVKYVDISPGPGLHYIFALEKISGPELPLGHVGFSLVQRKWATLSINQEIDVRPYRFDASADIITLVSFETDFLQKKTTTQEPYDSDEMAKEFLMQFAGMPLTVGQTLVFQFKDKKFLGLAVKTLEAVDPRTVGDSLPKTRNVRFGRILGNTVVQFEKAENSVLNLQGRSKGKIVRQSIINPDWDFGKMGIGGLDKEFNAIFRRAFASRVFPPELVEQLGIKHVKGILLYGPPGTGKTLMARQIGTMLNAREPKIVNGPQILDKYVGESEANIRRLFAEAEEEEKRLGPNSGLHIIIFDEIDAICKARGSVAGNSGVHDTVVNQLLAKIDGVEQLNNILVIGMTNRRDMIDEALLRPGRLEVQMEISLPNEQGRVQILNIHTKRMRDFNKIASDVDNNEIAAKTKNFSGAELEGLVRAAQSTAMNRLIKADSKVHVDPEAMEKLRVTRADFLHALDNDIKPAFGAAQEMLENLLARGIINWGPPVTELLEDGMLSVQQAKATESSGLVSVLIEGAPNSGKSALAANLAQLSDFPFVKVCSPEDMVGFTESAKCLHIRKIFDDAYRSTLSCIVVDNVERLLDYGPIGPRYSNLTLQALLVLLKKQPPKGRKLLILCTSSRRDVLEEMEMLSAFTSVLHVSNLSTPENVLAVLDDSDLFSPEELQSIARKMAGKRLCIGIKKLLALIDMIRQSEPHQRVIKFLSKMEEEGGLEMDRVQGH

SEQ ID NO: 20986 - DNA, 2640 bp, DROSOPHILA
ttgtgtacggcgtaagcatacccaacactgagggcagagcaggaatggcagccatctacgatcccactcgggaggtcaacgtcagccagctgggcgtggaactggccaaatccctgcccaactacgccaggccgcagtttctcagattcctgcgcaaaatcgacctgacgggcaccttcaagttgcgcaaggtggagcttcagcagcagggcttcaatccggagatcatcgacgatgaactcttctacgcccaaccggatggcgtgtatgctccactcaccccatccgtatacgagaggatagttagaaacgagctgcgattctaggagcgccggactttgttcttgggaagaagaaaagtcaagactgtgccttgtatgttggtgaagaggatatcctttggattcggcttgtggtgcgccaactacttttaattctggctaagtttcttattgtccggacaatataaactttagcattggaaatttactgttgaaagagcgtttccgcgggtaaattattattttgtaactatttccttctacaattcctacatacataagtgtcacatcgtattgtatacattgtatagataataaaaataaaattcagccaatgataaatccatattgtgctctattatgtgattatagcattttccttctgtaagacaggattttgattggttttcattagatttgtaatttagtttattgtgcttagttaaatagtttttaaaaatgaaacttacaattgaaagagcatcattagccactttacgttggagtagttagaaaatctaatatcccggcttccttaaacagttccaatcaaatcgggatggctttagctacgattacacttttcaatagaacctaggttacatccattgcttgagcaactgatgccttcagcttaagtggaaccagattttcaggtgaacggatttggaaacggggtcgtataaaatactttcagcagtctttggatctatatccgctcaatccttgggcggcacatccttgctcaactctgcacgcttcctctgctccatgcgctcctctacctggtccaagcgctcgctcatggcatccagggagctcagcagtcccgcctggatctcgccatatcgcttcatggccaggaccagactctcctcgataagttcgctctgctgcgcgtactccccgttgttctgcgttatgccctttagctgctccagacactcggcgggaatgctgcggaagtactccgcgcccagggccggttccagctgcttaatcctctccagctgctcggcctgcgtgtgcagctcgggggccacggcttgcaggtacacctccttggagcgcacctgctggtgctcctccaggaagttggggtccaggtacttctccagctcgtcagatctcttcacgcactgctgcagtgcagcacttcctgtggttgcttcgcccaggatggcgtgtgccgagcacagggcgtcgaccacgccctcgcccacctcagagtcctggaccggacccaggactcgtgtcagggcatcgatgcgcttctccagaatgtccagtgcctccatttttcgctgaatttctctttattttgttcgttttgatgggaatgatgtcagtctgcaaaacaatcgatgtccaacgaaaaggtggcaacgttagcttggtggcaaggttcttgtactcgctaagcagaacgaattaacccttatgcggactaaaaaatatggtatttaaataaaatatttagctcctctgcataaagtttttggtgcatacgtatctataaatatagtacacacttaaattccattgctatttacttagtttcttttaaacgtaaactgtacaatacaaaaatctcagttacaacagcttaaaattctcgagggacaaccgctccgcatccttgttgatctgcgccagactatcctcggagatgatgcgcaccgtatcgacgtccgggtcatcgcctccggaatcatccagcacacacagcagaccatcgttctcgatgtacgggaagaagaactcgggcttgtcccagctctccttatcgccgattccgtggtgcgactcttgtgccatgtgctccacgagcagctcctcctcgtcgaactgcagatcgcaggtcacgcagcgcagcaggcacatttggcggcgcaggtagttgaccaccttgacgcgttggtagaagttcagagagctggtggccttctcgaaatccaagcgatgaacctcgtgcatgtgcttcttgagggcggtgaagttgtcgccgagatggtggcaaaacaggcacttaatggagctaggctcaccatctgccgcccaatccgaccagtccgaatcgtgttcgccatccgaatcagggcgagcgaagtgcttgtcgaagtccacgctgccggtttcaggatcagcaactgtggacacggatgccgtttcccgtcttcgcttttggaggtgctgtttccggggcgtgggggccgttggtacacgattgtagttgataaggaagtacttgtcgtactcccttcggttcggattgatccgcttgtggcccttcttgcgcatgtgttccttgagcgtgggccgatccctgaagatcttctcgcagtagaggcacattaac

SEQ ID NO: 20987 - DNA, 640 bp, DROSOPHILA
gttttgcagactgacatcattcccatcaaaacgaacaaaataaagagaaattcagcgaaaaatggaggcactggacattctggagaagcgcatcgatgccctgacacgagtcctgggtccggtccaggactctgaggtgggcgagggcgtggtcgacgccctgtgctcggcacacgccatcctgggcgaagcaaccacaggaagtgctgcactgcagcagtgcgtgaagagatctgacgagctggagaagtacctggaccccaacttcctggaggagcaccagcaggtgcgctccaaggaggtgtacctgcaagccgtggcccccgagctgcacacgcaggccgagcagctggagaggattaagcagctggaaccggccctgggcgcggagtacttccgcagcattcccgccgagtgtctggagcagctaaagggcataacgcagaacaacggggagtacgcgcagcagagcgaacttatcgaggagagtctggtcctggccatgaagcgatatggcgagatccaggcgggactgctgagctccctggatgccatgagcgagcgcttggaccaggtagaggagcgcatggagcagaggaagcgtgcagagttgagcaaggatgtgccgcccaaggattga

SEQ ID NO: 20988 - protein, 192 aa, DROSOPHILA
MEALDILEKRIDALTRVLGPVQDSEVGEGVVDALCSAHAILGEATTGSAALQQCVKRSDELEKYLDPNFLEEHQQVRSKEVYLQAVAPELHTQAEQLERIKQLEPALGAEYFRSIPAECLEQLKGITQNNGEYAQQSELIEESLVLAMKRYGEIQAGLLSSLDAMSERLDQVEERMEQRKRAELSKDVPPKD

SEQ ID NO: 20989 - DNA, 3320 bp, DROSOPHILA
ttcttctccaacgacgaggatctaaccaatcgcctggtgtttagctagtgacttagcaaatccacttaattaatatatgtaaatattagttttgttgtgcacttcactgggggatcgttgcgaattccgcctaagtgctaataacagcctatctgaaattgtaaagattccgcaaagcctaagaaatatatatgacgtgtaaatattaaccatcttgtggtactcattcccttgaataatttaaattttacgacagcgaaatatttaaatttactttgctaacaaaccatataaatgcgcataaaacgatgaacctgatttgagaaagctaacttttcggttacaaactttcaaagaaatgttgactataaaagttgataaaagttattgtgagaaatggaagaattggagtttcttctacatatgtttggcctatgaatgcatgcgtccgaagctttactgtattattttgattttcaaatttcttgcgccacacaatttgtggcaaagttcagggtcacttgttatcgccccaagtctgtactcccaagcaacagtctagtcacgcacgaatcccactggccagtagaagccgcagtggcttaagattagacctgattcagcgccatcaagtgacgttaaccgtttcgggcatcagcagcatcgattggaactggattgggaactaaattgtactgactggataatggatcacacttaatggggcgacgaaccgagcaatcggtccaaatgggtggcggcgtgcataattagccaataccagcaccagcaacttgttttccgaggtggacaccagtgaacagtaaacaaactgccatggctcgaccagaatttcagtgcacagagttttgggtgtgcaattaaaccagttacaaaagctgacccgcttagcctgctgagtggctggctggattagaaagacatgggcccgcagctccacgcgcatgtgcagtatccgctcggtgtttaagtggaacagttgtcgcgaaagtgaaaggattacggcatggagcgttggattgtcttcggtgtctgctgttggtgctggctggcagcatccgcccaggccttggaaagtgtctttggagcctacaatctggagctggagtttccatcgccgcaggaaagacagcgcgcgctgagagatggactatacgatccgggcagcgtgatccccatcgatgtggacgtctactacaagcgtaggagttctccatttcagcacaaaagcctacctaatttgctctctcatttagatggcgatgccacaccctcgatattcgtgaccattccgcgttttgccaagggcgttccatactctctggcctacgtcacaaacgaaatgcgaccgaacgggactctcctgcaggcttatcccagctacgagtggcacaaatcccacggagccgactgcaatggattgacttcggtgtaccgcacacagatagacgagtgcgggcgcatgtggatcctggacagcggcgagatcgacttcattcagcactgcccgccgcagctgtacgctattgacttggaaagcggaaaagtcgcgcatcagtacaagatgcccaagcgattgtacaaggagggcgtgagtcgctttgtcacgcccaccgtggagctggatccgcacaactgcgatgtgggattcgtgtacatggcggactccattggagacggcattgtggtgtatgacgtggcagcccagcagtcgtggcggattgagaacaagtttacgtatcctcatccagacttcggcacattcacgatagcaggcgagagcttccagctgtgggacggcacggtgtctaccactctaacgccccacggcttgggtggccggcggatgatgtatttccactctctgtccagcgagtggcaaatggccattccgttggatgtggtcaacaacggcagcaactggcggctgaacgatgtgagcgctgccttggatcagttccagttgctgggcaagcggggaagtcaatgcgttgcggcggccatgagcgagtccggctttctgatctgcggcctggtccagccggccagccttttggcctggaacattcgcaccggctacagccatcagaatctggtcatgctggtggaggatgagcagcgactgcagttcgccagtggactcaagatagtgcgcaaccacgagggcaaggaggaactgtgggtgctgtcgaatcggctgcagaaagccttcggagcgggtctggactacaaggagataaactttcgcatacagaagtgcggtgttcaggagctgctcagcggcaggccttgcaactgagtcgcttcccgctgctgctcaataaagctaatgatgaaataagttgttttctgggtcactcaccttcttgtagaagtactcctcctcgcgggcagcctcaagcttgccgaaggctccgccggcctcgcggatagagccaccgccgccgcctcccttgccggcgccactgcctaggtcgcccacctggctgccgctcatcttggccagcctgtggagcggaaaatggcggtgggaaccattagaatcttctggttttgtgcggttacgcaacagtggagtgaagtcagcatagactgcacacacacacatgcgcgcagggtgaaagcgatttcgatgggatcggaattgtttatcttatcgaacattgaggaaagtgtaagttgggggcatacataacactttgaatatggcgaatgagatatgagtgctctgttaagtcttgtaagccaattagcaggtagttatgaacgggggttaaatgtgggtagaaactcactggactccagcggggtacagacgagatgcgctacgacgtacaacgaacattctgtttgattcttgagtagtttagctgcaagagaagcgcagaaaatacaatttattgagaaaactccattacgaagagtaactgtaaagccgtctccttaacaaaacggagtgcattgaactttttcgaaaaccaagtcgcaataaaagagccgctatttttagccagttctttgtttgttgtttgtataaaatatatacacgaatacccaatgcacatactagatttaatgccggaaaagtgcggcgcgcttgaacattacttacatttttgcgacgacaaaagttttctgcagagtgaccgtaggcgcacccttaaataataccttcgcggcagagcgagcacagtcggcgtggtctatcgaatatgtgagcttgcgattttaatcgataacgctttataccctttgcatactgcaaataaaactaagcttcttctgttgtttacttaatc

SEQ ID NO: 20990 - DNA, 1266 bp, DROSOPHILA
ttgtcgcgaaagtgaaaggattacggcatggagcgttggattgtcttcggtgtctgctgttggtgctggctggcagcatccgcccaggccttggaaagtgtctttggagcctacaatctggagctggagtttccatcgccgcaggaaagacagcgcgcgctgagagatggactatacgatccgggcagcgtgatccccatcgatgtggacgtctactacaagcatggcgatgccacaccctcgatattcgtgaccattccgcgttttgccaagggcgttccatactctctggcctacgtcacaaacgaaatgcgaccgaacgggactctcctgcaggcttatcccagctacgagtggcacaaatcccacggagccgactgcaatggattgacttcggtgtaccgcacacagatagacgagtgcgggcgcatgtggatcctggacagcggcgagatcgacttcattcagcactgcccgccgcagctgtacgctattgacttggaaagcggaaaagtcgcgcatcagtacaagatgcccaagcgattgtacaaggagggcgtgagtcgctttgtcacgcccaccgtggagctggatccgcacaactgcgatgtgggattcgtgtacatggcggactccattggagacggcattgtggtgtatgacgtggcagcccagcagtcgtggcggattgagaacaagtttacgtatcctcatccagacttcggcacattcacgatagcaggcgagagcttccagctgtgggacggcacggtgtctaccactctaacgccccacggcttgggtggccggcggatgatgtatttccactctctgtccagcgagtggcaaatggccattccgttggatgtggtcaacaacggcagcaactggcggctgaacgatgtgagcgctgccttggatcagttccagttgctgggcaagcggggaagtcaatgcgttgcggcggccatgagcgagtccggctttctgatctgcggcctggtccagccggccagccttttggcctggaacattcgcaccggctacagccatcagaatctggtcatgctggtggaggatgagcagcgactgcagttcgccagtggactcaagatagtgcgcaaccacgagggcaaggaggaactgtgggtgctgtcgaatcggctgcagaaagccttcggagcgggtctggactacaaggagataaactttcgcatacagaagtgcggtgttcaggagctgctcagcggcaggccttgcaactga

SEQ ID NO: 20991 - protein, 412 aa, DROSOPHILA
MERWIVFGVCCWCWLAASAQALESVFGAYNLELEFPSPQERQRALRDGLYDPGSVIPIDVDVYYKHGDATPSIFVTIPRFAKGVPYSLAYVTNEMRPNGTLLQAYPSYEWHKSHGADCNGLTSVYRTQIDECGRMWILDSGEIDFIQHCPPQLYAIDLESGKVAHQYKMPKRLYKEGVSRFVTPTVELDPHNCDVGFVYMADSIGDGIVVYDVAAQQSWRIENKFTYPHPDFGTFTIAGESFQLWDGTVSTTLTPHGLGGRRMMYFHSLSSEWQMAIPLDVVNNGSNWRLNDVSAALDQFQLLGKRGSQCVAAAMSESGFLICGLVQPASLLAWNIRTGYSHQNLVMLVEDEQRLQFASGLKIVRNHEGKEELWVLSNRLQKAFGAGLDYKEINFRIQKCGVQELLSGRPCN

SEQ ID NO: 20992 - DNA, 3883 bp, DROSOPHILA
caatttgtttgcttttgtgtgtatgttggtctatgagtgtgctaaaatctatgatgacagttggtatgaggcaaattgctattggggttcgccagggaatacagtgcgttgcgtggctataaggcagcttaaagcgtatgtgtagatatttctacttggtgaaaaatgtgtacttataggattaacaaaagaagaaattaaaaataatatcttaattttagcaaatatattaaagaattaaaggcacccatggttttgaatatattgtagcttttttatcagaccatcgtatctttaggtttcaaactatcaatgttttatcaaaagacgctatcatgacgctatccctcatcgatcccctttaagtaaaaatcctcatcaactatcattcactccatatgcgtatagtacaaaatgatgaaaacaccctgcagatgagagtatttctatatagtatgtatataaatattgctttgcttttcggattgttttgcctcttttgttattttttctgtatacaattttctacttaataaccaataaaaatttgatctaaaattagttaaatttcatcttaccgctctaggggctgtatatgtttatctagaactatgtacacgcaaattgctagcaccaatccaaaactatctgtagtatgaatatatttaactatgcagatatttctatgtatatgtatagtaggtaaaaatccactttgttaacttggcttctgaaggcaattgtctctgggcttaaaatgtgaaaaattttacaaatctttccgccacaaaactacactctaactacatctaagttgggctttgagccctcttaaggtctaaattgagctacttaggcgacatggaatatctggtctcagtgaatgatcaatggaagtgattcgagtgcatataaataatcaagagctgctccacgacagcatctcagatgagtattctcggatgtgagtatgtatggccagatcggcagttccaaatcctcagtggcggcgcatgtgcagcgataggtggtccgagcggctgaagctccgggtgcacagctggcagcggaagggcttcacgcccgtgtgcttccggtagtgccgggtcagctcatccgaccgagcgaagcgccagatgcagccctcccacgtgcacacgtacggcttctcacctggcggagattaggagttcattaggctagtcgaataactaataaatacagtttggttacatactgcctaaatgtataaatggattgggttatcttaacttggtcaaactgaaactcacctgtatgcgtccttttgtgcgccttgaggtgcgaactcttggtgtacaccttgtcgcatccttcagtgtcgcacttgtgcaccttgcggttcttggagagatcattgtagccgccgttggccatcgaatcggaggaggtggtaaatccgaaggcggaaccgccgcctccaaagttaatcccactgaagctgctgttatccttccgcgtcgccccccgacccatgcccccgaaggcgggatttagggctgcgtggggcgatcctgatccggcgtagctcttccagctcggcgaggagttggaggccaggggcttgctggagccgccagtgggcgaggtcttgcgcgaggcctggccatctccgccggcaaacttgtagggattcttgaacagactcagcaacgagaacttgctctcgtagtcctgcatgctgttcgccgcagatcctgctccgccgctgctgctgccgttgttgtagctgcagctgttgttgttgtcctcctgcttgacgctgacacttccggtgccgtttccacttccgcttccgctgatccgtcgataggtgaaaaagaatggcgaggccgcgaagaacggcgagaatggcaacttggacactccggaggaggcatacagttgttgttgctgctgagcagcaaaggcccccaacgacgacgatccggctgagcccgctccgaagcccgaggacgaggacgagccggaggatccgcccggcttgccattgctatagccaactgccttgttggccgacgagaatttgtagctgctactgctgctcccatgcgaagtgctcgctgcgggggaaaaatggggggaaacagagttagagtgcttgagaaaacccattgagatttggtgaacaaaatggccaaatggcggggccaactttatggccgccaatgcctaatgagcctcgtaaatgaaccgcaaactgagccaagctaccaaccaaaaagcaaggcaggctaactaacttaataagccgaacatcaagataccctgtctatattgagtactgcaattcttttggatatttggatattaggtagaatagaaatacttattgcaaatatataaatggatttcaaaatgtctacaataaccgaatttattaaccaataaatataaatctatggattttgcaaatctaagccagactgcggggaaatgccaattgaagagcagaaaaagggaaccagctggccgggaaaacttttgcctgtcagtcgggagtctttacacaatttcctaatttcgttcgaccgcctcattgcatcaaaaacgtttgcatgtcgcgtattttatggccagcagacagcgccgacggacggacggacggagactccaagagtcgaagtcgaagttggagacggagatggagatggagacgagtgtccaagaggcggattccgactcagacggacagcgaatccgtgcagtcgtgatccatttaacctgtactctgcgctccagacgacgactgctgccactttcggctgccagttgcagttgcatttgcagttccagttgcagttgcagttgggacaagtgtgtcgattttggcgcccgcgacatcaacatcaattgccgccaaactgcagctgctgctgctgcagttggtccccaatggccccaccttcccctcggcttgaagggtgctccacgcggctgagcaaaccgaaatcttgcagaagtttgcccaggcttgccactccacttggccacttgtcgcggcttaagatttgcgaggcttctttcctaactaaattatttgaactaggatttttcagttgccaacctggcggtgaaaataaagttatgttcatgtctattttttgaatgtatatttacaatttatagatttctaatactattacaaagctatgaaagaagtgtgagtgccgacaaatcaccacactagttagcgtttaccagaaagtttgacaaattaaaaccaaagtccaggctaaaaaagtatttaaagcttattcccgttgccccaagtcaactagcgattttttggcctgctaagcacattcaattttcactcttctcggcgttgcagctcgtttgtcagtggccaaaacaaaaggcaggcgaaaggggatcgcggcgatctgtacaagtgacccaggcttaagtgctttgtcaagcctgcaaacttcacatgaccgagggccacatggccaacaacagaaacaacagcaaccagaccatccgaagcaggcctaaactgaccggccaagcagagaatggggtccgttggtccgctggtccgctggtttcttagcctcaagtgcctcaagtgcgtttgcgactgtctacacatgtgtgccctggcttgatgcatttgtaatttccatgccagcgagcgttttgtttcaccagcaccgggttacagtgcccaaggtagcggactcacagtaggacttggctaagtgaaacaatgtccctattttgttccacaagcgcagaagtgataaaatcaatattttctatgaaattaatttaagaaattaaacatttaaaattttcattatttaattaaccatgtttctagcctgaaccttcgacc

SEQ ID NO: 20993 - DNA, 1233 bp, DROSOPHILA
atgtcgcgggcgccaaaatcgacacacttgtcccaactgcaactgcaactggaactgcaaatgcaactgcaactggcagccgaaagtggcagcagtcgtcgtctggagcgcagagtacaggttaaatggatcacgactgcacggattcgctgtccgtctgagtcggaatccgcctcttggacactcgtctccatctccatctccgtctccaacttcgacttcgactcttggagtctccgtccgtccgtcccgagcacttcgcatgggagcagcagtagcagctacaaattctcgtcggccaacaaggcagttggctatagcaatggcaagccgggcggatcctccggctcgtcctcgtcctcgggcttcggagcgggctcagccggatcgtcgtcgttgggggcctttgctgctcagcagcaacaacaactgtatgcctcctccggagtgtccaagttgccattctcgccgttcttcgcggcctcgccattctttttcacctatcgacggatcagcggaagcggaagtggaaacggcaccggaagtgtcagcgtcaagcaggaggacaacaacaacagctgcagctacaacaacggcagcagcagcggcggagcaggatctgcggcgaacagcatgcaggactacgagagcaagttctcgttgctgagtctgttcaagaatccctacaagtttgccggcggagatggccaggcctcgcgcaagacctcgcccactggcggctccagcaagcccctggcctccaactcctcgccgagctggaagagctacgccggatcaggatcgccccacgcagccctaaatcccgccttcgggggcatgggtcggggggcgacgcggaaggataacagcagcttcagtgggattaactttggaggcggcggttccgccttcggatttaccacctcctccgattcgatggccaacggcggctacaatgatctctccaagaaccgcaaggtgcacaagtgcgacactgaaggatgcgacaaggtgtacaccaagagttcgcacctcaaggcgcacaaaaggacgcatacaggtgagaagccgtacgtgtgcacgtgggagggctgcatctggcgcttcgctcggtcggatgagctgacccggcactaccggaagcacacgggcgtgaagcccttccgctgccagctgtgcacccggagcttcagccgctcggaccacctatcgctgcacatgcgccgccactga

SEQ ID NO: 20994 - protein, 410 aa, DROSOPHILA
MSRAPKSTHLSQLQLQLELQMQLQLAAESGSSRRLERRVQVKWITTARIRCPSESESASWTLVSISISVSNFDFDSWSLRPSVPSTSHGSSSSSYKFSSANKAVGYSNGKPGGSSGSSSSSGFGAGSAGSSSLGAFAAQQQQQLYASSGVSKLPFSPFFAASPFFFTYRRISGSGSGNGTGSVSVKQEDNNNSCSYNNGSSSGGAGSAANSMQDYESKFSLLSLFKNPYKFAGGDGQASRKTSPTGGSSKPLASNSSPSWKSYAGSGSPHAALNPAFGGMGRGATRKDNSSFSGINFGGGGSAFGFTTSSDSMANGGYNDLSKNRKVHKCDTEGCDKVYTKSSHLKAHKRTHTGEKPYVCTWEGCIWRFARSDELTRHYRKHTGVKPFRCQLCTRSFSRSDHLSLHMRRH

SEQ ID NO: 20995 - DNA, 6181 bp, DROSOPHILA
attgtttttccttgcatatgcatgtgtgtgttttacttaaaataaatgttactctttaatcataatatatattcacagtttttgtaagtaggtgtgtgtgtttgtgtgtgagtgtatttttaagttaaactaatatttattcgtatatgtatttccgattttgaatatatttaaaggtatttacagtgtgggaaataaatatacactaaataggtttataaataatttaaaaatcctgattcatagaaatgcactttttgttaatctaaatttattgccgatatgtgagcaaatccgctcgggatattttcttgtgcgcttagtgctgtgtgagtaacgaaaactgactttgcaaacatactgctattaagaggtacataggcgtttccaaacgatcatctgatcattcgatttttgatattgcctggtattacggaaaacagatgtgggggggtggggagcgctctaacttcagctaacaacgatttgtgaaacttagggttattctctaaaatatgcctacacttaaagcctggacaacttcaacaaactcaacgaaactctagtattgcacgatcgacgacgactggaaagtaaggccaacaacaactaacctgcctgccacactcaacactgattctaactagctagcctatatccactatatagtaacacacatatccgcatatatatatacatatatatatacgatcttgactctgctctcatattccctatagatctttgatatatgcatactaatatacataacatacttaacgtgtattttactgtatagcttacttctttgacctctcggggattctgtggcctaaactgactgccagaagtatgcaacagcgtgtggaattcttctttcggtgtgatgggggaaaccttaactatttatcctttgccttgttcgcttcaccttctcgcacgaatttcctttctggtaagactggttctagatttgtgcacttagctgtgcctctgccatctatctgttgcctctgctgaccagcagtgtcagcaatgtccctgtgagcaggagtcccaaactactgccagctgctcgcgtggagccattgccctcgccatccctgcagatgcccggatttcgggtgaagtcctcgcagtagatctgtaagatagattcggttacaatttgcttccggaggagttctatctttctgcgtaccttggtcaggctgttggcatatttgtccaccagttgacgcgtaaactttgccgcctcattgccgcagatcttgcgtgcagcatcctccgagcaatccacaagttcgttgatggagcttgaataattgattaatgcaaatgcaagatatttaaagagttttaaataaatcccaaaaatgttgcaaaaataataatttcatagtaataaaactctggctctgccaaaaatatttcctctttcaatcgaatgaatccccgacacaatataacatttcaattacaatttgcaattgcgttccatggcgcaattacattcgtttcattctcaaagcacaacaaaccctgtttaaaactgcattgcatcgatttaaatattcattagagagcatgccaaggcatttgataaccaattcggctaggttgatattggtttcactcaccagcaaatggtcttgatgttctcgttcagggtgccgttctcggagttttcctggttcttgtttggcttgaggaacaccatggtctcccgataacgattggagcacacctcgaactccttcttggccatttcagagcagggcacatgcttgaggtactcgtcctggaaggcacccttgttgcacagatccctgatgaactggttggtgtcgtggtagagcttgttgaactgattcctctgctgcagatccatgcaacgccgggtatagctctgtatgcacctcacgcccttgcgcagctcactgggaggaacagacaaaaagattgttgttgcaataaaacaaattaaaaatgttattttcaattaaaaatgcgaaattaagtgagtcggggatagtattactcgatttctagttaatttttcatggataagttccagcacaaaacacccaaatcgatcatcagaacacagcaaacatttgtagcgttgcgccgcaccgattgcgattggaattcggatgcagtgagtccggatcgacgggggaattttgcccgtgaagccacttactgacaaagtttttccagttcctccttcttggccgggccaatcgagaagtccgacgttaaatgcagcatatcaagtggttcggcgcacttggtgaactcctcctggccgcattcctccgaattggccacctccgccgagagaagtagcagggctggaaatccgagaccaaagtgggcggtgagtgggcgcgggtgagagacaaataaacaaacaaacagaaacattgaaatagtgctccagctgaaagctaaaaggcaatccgagacccttggccaccaccaccagcagcagcagcagctccgttcagccagtcacttgcaacaaagttgcaaatgtgcgtcaggggtaataaagttaaacgtaagtgaaattggcatttcataaatttttcgaccaacttttctccgttcatcttaagcggcatatctggtcagattttggccctcagataacccatctttcaaatttcgatataccatgcacttacccgagaaaaccaaaagagtccagctccagttgcgattccacatttgatgcatttccccgcactccttagctttctgctggctgtttacaatgcaattgtttccgcaagggcagttaagtgcttgtaactggtttcgctgaaatatcacaaaaaaaaaaaaaaatggtggaaaaattgataaattaattgagaatcatgacaactattgaatgcaaatgcttatgacaaattataggcttcgcctgttttcatagcctgatacactgccagcccaccttcgtattttcttatttatgaaccgatcaagtcgcagtaaaagaaaatctatgctgacaaataaaagctgcaaaataaagcgcaaaaaataaaatcacgaccaagcgaaacaaaaattgatctaaaaataaataagatgtctgcgatggggagaaaagcgaaagcaaaacgtcagaggttgtcttgttttcatttcggataggattcattctgtttcactgggggttccttctaatatttttctgccagtgggtgcttttatctctgcttttgtttttgccaattatcgttgcaaatgtggcgtggacaggtcaaagtatagtttgcgaaaacaacgagtgggttgagtggtttggccaaaacactaggccaactaggtaaatacaccatattgtaaaatcagtgtaaaattcatttaaatataagcaagagttaaggtgctaagatgagatgtagcgagattgcatgaacttaaaaggagcacttaagagtggaaatttaataaacacgtggggccaaaaggctaatttccaaatggagctactgccccgaataacaatgctaactgtttttttttaatgtctttcagacactttttattacgcgaaattgtacgccagtatccgttcaattagtagactattttattaagctgggtactatctttgattaaaacctttttttttatttgtgcagctatgatagacgtatggattcgtaataaaattaatatatttccttttaataattagtaaaatattaaactgcacaaaaagcgcaaacatcggaacaaaatgtgtaactgcactgccccatttctttcccaaaaattaagtgaaaaaaactgatacaaattgctgttgattttcatgcatttggccaggtaaaatgtttgtgcctttgattatgttttgtgggcatttatgtttttatgccaatatgtaaacacaaatagctattgtgcattcacagttctccgacagatgcatttatagcccataaataaacgatacgcaaataaacacaacacaaacaattttcaaaagcctcgcctccacgatttctcgtcatttgttgatgtccgaatgattgaagaaaaatatgagtgactcgaattgaattggcacaggtcagggttttgtgccagatgaaagccataaaaaggtaaacacgaggaaaggttttcgctggcacacaaacacttggccatctatggtgttgcataacaccatgtctgaaagaggccaatgcgccatcaaactttaacatgtgcatagttttgcactcttgattagcaggttgcaaacgcattagtacactcgtactatttgcccccccctttcgactaatatcacccgccaattctcgcgcctgcacttccgcatatgcaaaagcgaggctttcgcagctgttttcagtcggtacggagagatatgatatgatatgatatggggcctccctgattgaacaacgaaaacaaaacacttaacggaggagcgagagcgaaacaggcaggctgtcgtccaaagaactgtaagttcgcggatcttcaaaagagatttcaatcgaaaacagagagaaaaacatatgaaactttcaaaattgttgaagaaattagattttgaactcaaatcaaagagttggagatgaaactaagtatttatatttactacattactagcatgatcagtgtggtaactgatgctttgcacaactttctggataaatcaacgctataaataaaatatatccaaaactacggcttttacagctcgattacttttgtttaaattaaattgtaagtgcatcgatcgcgccactgtttttttttcgctgtgcaacagttgccttgaaagtggcagggggcggcgagagggcgtgccgccgctggctgcacgtgatgcaagaatgcagtcggacgagcctctcggtggcgatcttgcgttccaagatcgtcgccctgtgcgaattcaaaaccaagagccggttttctgccctgtttatttatacattggtcgcactgcttttgggtcttaattcggttgattactttggtctggagccgccgagcgacgcgctttcgaatgacaactgcagcgggcagtccgacgagcggtgtggctgtttggcggtatggcgatcgtgtttgggatcgggatcgaggcggtggagcggacctgagcggagcaagcgcgccgtgttgttagccgaccgagtgacagaagcgtactgaacgccagaagcagcggcgccactcggccagcgaatggggatggccatggcgatgacgatggcgagtggagccgagctgaaatccgagcgccaagtatccaaacgggccgagtgtgcacgctagcaacatgttgccgacgggctagcaacatgcagcaatggctgcaacaacaggtatttcccgctaacatcaagtgcaactgataagctgaccatcgactgatggcctgaaagtaatcccaattcgtaaccttagccacttagttgcttagccactttgcctttcaattaatttaataagaaggaagtgggccgacttgataagattacagattatctatttggcaaaggaagccaagtataccgcatttgccgcacttctttcctaccctccccagtttgccaatcatttttgtcgcattgagaaatatttgattgccgatgtttgcccagtgccaatagcagtaacactaacgacaacaacaatcaacttcgggctcaagtcaatcggatttacacgcgtgtccttgcctttgttttggccgcccaccgacgcccagatttgtttgctatatgccaatttggcggtgtgtttgcatatttactgtaaacactgtccaaattaggcggagatttccattcaccgccgtccttgagctatttgcctagggggcattccactggggggggggggggggaggtgagtttccccggccgagtcgcagacagaaaccataaatagttggccacaatgaagacactatcaagggagtggacacctgttaacttggctattcgattgtagtgcaagacaaaggaaatatatatatgcatatatgagaagttcggcataactttcgttcagcagtcaattgggaaatgattgtagtgcaaaagaaaatgcaagcgaaaacagggcaggatgcaattaaaatggaatttgcacaaagctatcaaagaattcgttttaattcagcaga

SEQ ID NO: 20996 - DNA, 1008 bp, DROSOPHILA
gtcggctaacaacacggcgcgcttgctccgctcaggtccgctccaccgcctcgatcccgatcccaaacacgatcgccataccgccaaacagccacaccgctcgtcggactgcccgctgcagttgtcattcgaaagcgcgtcgctcggcggctccagaccaaacgaaaccagttacaagcacttaactgcccttgcggaaacaattgcattgtaaacagccagcagaaagctaaggagtgcggggaaatgcatcaaatgtggaatcgcaactggagctggactcttttggttttctcggccctgctacttctctcggcggaggtggccaattcggaggaatgcggccaggaggagttcaccaagtgcgccgaaccacttgatatgctgcatttaacgtcggacttctcgattggcccggccaagaaggaggaactggaaaaactttgtcatgagctgcgcaagggcgtgaggtgcatacagagctatacccggcgttgcatggatctgcagcagaggaatcagttcaacaagctctaccacgacaccaaccagttcatcagggatctgtgcaacaagggtgccttccaggacgagtacctcaagcatgtgccctgctctgaaatggccaagaaggagttcgaggtgtgctccaatcgttatcgggagaccatggtgttcctcaagccaaacaagaaccaggaaaactccgagaacggcaccctgaacgagaacatcaagaccatttgctgctccatcaacgaacttgtggattgctcggaggatgctgcacgcaagatctgcggcaatgaggcggcaaagtttacgcgtcaactggtggacaaatatgccaacagcctgaccaagatctactgcgaggacttcacccgaaatccgggcatctgcagggatggcgagggcaatggctccacgcgagcagctggcagtagtttgggactcctgctcacagggacattgctgacactgctggtcagcagaggcaacagatag

SEQ ID NO: 20997 - protein, 253 aa, DROSOPHILA
MHQMWNRNWSWTLLVFSALLLLSAEVANSEECGQEEFTKCAEPLDMLHLTSDFSIGPAKKEELEKLCHELRKGVRCIQSYTRRCMDLQQRNQFNKLYHDTNQFIRDLCNKGAFQDEYLKHVPCSEMAKKEFEVCSNRYRETMVFLKPNKNQENSENGTLNENIKTICCSINELVDCSEDAARKICGNEAAKFTRQLVDKYANSLTKIYCEDFTRNPGICRDGEGNGSTRAAGSSLGLLLTGTLLTLLVSRGNR

SEQ ID NO: 20998 - DNA, 3983 bp, DROSOPHILA
ttcggttttgtcataccgcgcttaggtacttccattctgcttctgtttgacttgaccagcatgaataatgcaaatgtccaagggctgttttaggtgacatttccatagacactggcttagacactcggagtccagtccaaggattgtggtttcggtgacagaaagaaccgaaaacgcacgagggcaaaacaagctaagctcgacatgaaagctgatgtcacagtttcttttattaaggagtgttaattatattattataatagaccttctttattatccctcggtatcaggactttcagtagatattggttcagttgccgtcatgatcgtagttattatgctaggcgaaggactcaacgtagtaaagggagtactaggtattgcactggctaaagtacttggggcattaccaggtactgtactagatgccgcactactgggttcagtactcgctatagtactcgtcacagtactgggttcagtagtaggtacagtactggcttcagtactcgctatagtactcgtcacagtattgggtacagtgctgggttcagtactcgctatagtactcgtcacagtactgggtacagtagtaggtacagtactggcttcagtactcggttcagtactctttatagtgctcgtcacagtactaggtacagtacttggtatggtaacctgttcagtactaggtaaagaactcggctcagcactttgcacagtactaggcaccgtactggctacagtacttggtacagtaatttcttcaatcctaggtaaggtactagatacagtactagataaggtagtagatacagtactggctaaggtactaggtaaggtactagatactgtactaggtaaagtactagatgtagtactagataaggtactaggtaaggtactagagactgcactaggtaaggtactagagactgtactaggtaaggtactagagactgcactaggtaaggtactagagactgtactaggtaaggtactagatatggtactgggtacggtactggtggaaggttcagtactaggtactgcaacaggttctgtgctaggttcagaactaggtacagtgctcggtacagtagcagttgtagtgctagccacagtggtactactatcactagaagtacttgtcgaagcggttgtatcctcatcttcggtgttctcggcaatccaacctgtgaaccaaggtacattggcgtagacatctggtttggtggtgcagccgccttcggatagaatgcccacgagttgtccatctatcaccaagggagctcccgtatcgtaggagcatcctccggcgccattatgagtgcagagggtaaggtacgagatgccattgtcccagagtccgaaccaaacaccgcgatccgcggcgcactgctcccgattgtagacgctgacccatgccatctgcagatagtccggcagactgccgaagcacctgtcccaccagctgccccaccaactggtggatccccagccggagacagtgcaccacgaaccatcgtccggttcatcctctgctatgctgatgggctgaatagcttcggaggtcttgagcggatcgcacaacttcaacagtgccagattgttatcgaaacgccagcaattgtactgcgggtgattaattatttcacagacttcgagcaggaatccagttccatcataatcgcgggaactggtgcccacgcgtacttcaattgaaccgtaggactggacacacgaagctgctgtgatgatggtgtctgatgtgatgatcgccccactgcatattgctgtgccatctattattacttccgcctggtacggggcatcttcaatatccacatcataacctccaatgatgcggctttgggcatccagatcaccacgaaccggccgtaaaagagcagccaacagaaataagaacacactccaaatcattataaacaactgatttttagagctgcatgtgcgactctttttataggaaaagttaagtcgttttcaaggctagagctccttatctgcaaagtcatacctcaaattgagtgatggctttacttcgaagctctatcaaaataggaagtattgcgtattacttgcactaatctgcacatagtcatagctcgaaggcaaagtattttttaacaattaattgggagaacgcttaagtttactttgtatgattatgcagccagtccttgtactttataagattgatatagacttctggatactccgaacagccgcctttcgttataatgccgaccagtttgccattgtggaccacaggtgatcccatcgctaaagagcaggcttccttagcgaacttctcggtgcagaacaagtcatctgtaaaattctttttggaccaattgtttcgcgcccacagatctgtgcactggctagggccaagtagcttcacctcggccttctgcagcttgtaggcttcatcatccagacacttcttccaatacattgcccaccacctgaaggagggccacccgttggccgtgacctttgccccattagacggaagctggttggccaactgaattggctggatcgttttggaggcctcgagcggttcgcacaactttaatatggccacattgtgaaatactgtctggccggtgaacttttcgtgaactgtaatgttgcagactgctacttcgatgactccatcgctgcgcgtagtgctacccactcgtacacggatcaccttgttcaggaatccatccacacatttcccggctgtcacaatgtgactcagtttgtatatcgctccgtcgcacttggccttttgtttgatcgaaatggaagcaatccatggcgctgtggttatgttcacgggatgaccaccaagagtcgtccggttgcagtcgttttcgtcgtcctcttccgaatcttcacctgcacccgtgtcacttttggaaaggacaaagagtgcaaggaaaattggtagagatcgcagaagcatgatgccaaataaatgtgcatatagcaggctgtttaaattttatagtattggcacaaagcatagcaaattaatttgttttactttacggtgtgttaaaatttttctcactttaagccattgtgcaatgttctttattctgtgctttacaaattcaaatatagatctacagaaggcaaggtaatattatcattaaactattcacagcaagtaagatattaatccttcgtattcgagtccagccagttcgtgtgccccaggatatttgcatagacatcgggcttaatggagcagcccgctctggagaggatgcccacgagcttgttgtcgatgaccagaggcgaacccctgtctgtggagcaggctcccttgcccggcgacttggtgcagatggtcaggtctgagattcccttgagtaagtaaaatggtatgactttccagtcggcggcgcactgtttttggctaaggatccgcacttgagtgccgtgcaattggacaggcagctggaagcacttctcttctattccgctgctaatcctctaagtctaagataaggtcaaggaaattgcctgatctgccaccacagccagtcacattggctcgagaattatcatccggcactttgtcggccctctcaattggctttatttcatcggtggtgttgagtagctcgcaggttttcaagagagccaagttattgtcaaagcgccagctggagtactggctatgaactttgaccttacagattccagcaattgatccactagtgccgcagctgctggttcccaacctgacttgtatgctcctggcgctgtagccatccacacacttggcggcagtcaggatgtagttcttcgagataatggcaccaccgcacttgagcttcgaattgactatgatggaggcataccacggtgcatccttaatgttgacagtgtttccgtttatgatccgctgatctccgagagccaaccaaggcagagccacaatctgcaggaggatt

SEQ ID NO: 20999 - DNA, 1671 bp, DROSOPHILA
atgcttctgcgatctctaccaattttccttgcactctttgtcctttccaaaagtgacacgggtgcaggtgaagattcggaagaggacgacgaaaacgactgcaaccggacgactcttggtggtcatcccgtgaacataaccacagcgccatggattgcttccatttcgatcaaacaaaaggccaagtgcgacggagcgatatacaaactgagtcacattgtgacagccgggaaatgtgtggatggattcctgaacaaggtgatccgtgtacgagtgggtagcactacgcgcagcgatggagtcatcgaagtagcagtctgcaacattacagttcacgaaaagttcaccggccagacagtatttcacaatgtggccatattaaagttgtgcgaaccgctcgaggcctccaaaacgatccagccaattcagttggccaaccagcttccgtctaatggggcaaaggtcacggccaacgggtggccctccttcaggtggtgggcaatgtattggaagaagtgtctggatgatgaagcctacaagctgcagaaggccgaggtgaagctacttggccctagccagtgcacagatctgtgggcgcgaaacaattggtccaaaaagaattttacagatgacttgttctgcaccgagaagttcgctaaggaagcctgctctttagcgatgggatcacctgtggtccacaatggcaaactggtcggcattataacgaaaggcggctgttcggagtatccagaagtctatatcaatcttataaagtacaaggactggctgcataatcatacaaactctaaaaatcagttgtttataatgatttggagtgtgttcttatttctgttggctgctcttttacggccggttcgtggtgatctggatgcccaaagccgcatcattggaggttatgatgtggatattgaagatgccccgtaccaggcggaagtaataatagatggcacagcaatatgcagtggggcgatcatcacatcagacaccatcatcacagcagcttcgtgtgtccagtcctacggttcaattgaagtacgcgtgggcaccagttcccgcgattatgatggaactggattcctgctcgaagtctgtgaaataattaatcacccgcagtacaattgctggcgtttcgataacaatctggcactgttgaagttgtgcgatccgctcaagacctccgaagctattcagcccatcagcatagcagaggatgaaccggacgatggttcgtggtgcactgtctccggctggggatccaccagttggtggggcagctggtgggacaggtgcttcggcagtctgccggactatctgcagatggcatgggtcagcgtctacaatcgggagcagtgcgccgcggatcgcggtgtttggttcggactctgggacaatggcatctcgtaccttaccctctgcactcataatggcgccggaggatgctcctacgatacgggagctcccttggtgatagatggacaactcgtgggcattctatccgaaggcggctgcaccaccaaaccagatgtctacgccaatgtaccttggttcacaggttggattgccgagaacaccgaagatgaggatacaaccgcttcgacaagtacttctagtgatagtagtaccacttaccgtacccagtaccatatctag

SEQ ID NO: 21000 - protein, 556 aa, DROSOPHILA
MLLRSLPIFLALFVLSKSDTGAGEDSEEDDENDCNRTTLGGHPVNITTAPWIASISIKQKAKCDGAIYKLSHIVTAGKCVDGFLNKVIRVRVGSTTRSDGVIEVAVCNITVHEKFTGQTVFHNVAILKLCEPLEASKTIQPIQLANQLPSNGAKVTANGWPSFRWWAMYWKKCLDDEAYKLQKAEVKLLGPSQCTDLWARNNWSKKNFTDDLFCTEKFAKEACSLAMGSPVVHNGKLVGIITKGGCSEYPEVYINLIKYKDWLHNHTNSKNQLFIMIWSVFLFLLAALLRPVRGDLDAQSRIIGGYDVDIEDAPYQAEVIIDGTAICSGAIITSDTIITAASCVQSYGSIEVRVGTSSRDYDGTGFLLEVCEIINHPQYNCWRFDNNLALLKLCDPLKTSEAIQPISIAEDEPDDGSWCTVSGWGSTSWWGSWWDRCFGSLPDYLQMAWVSVYNREQCAADRGVWFGLWDNGISYLTLCTHNGAGGCSYDTGAPLVIDGQLVGILSEGGCTTKPDVYANVPWFTGWIAENTEDEDTTASTSTSSDSSTTYRTQYHI

SEQ ID NO: 21001 - DNA, 5062 bp, DROSOPHILA
gcggcggcgatgaagagagccaagcagacgaggaactgcagatgatagtatggattaatagggctgtgcaggatcaaagggtgtgcaaggagtccaattgaaggatattcctcagatacccaaagctaactccacttactttcattttgatttgttgagttttgggtttgcgtgcgacgaacgatctcaaagactgatggtgcgttgactgatgctgttctccagtggaatcaaggtttttataccccaagagacccagatcttaagaacaagttgcccacaacatgcggatgtgaacttggtagctaatccgggcgaaccatatcgaatggatattggcattgttcgacggaatgtttgtttatttttacactacgacaacaattggcccaaacagaaggaggtgggactgacaatctgacaatctggcaatctgacaatctggcaatctgactcactgactggctgacagtaatgagagcttgattgttagcccgcgcgttttgggtcagttttggtgacaagcaaaaaaatggaggggaaaagcttcgataatcgcgtcgaacaaactcgattcgcggcggaatcatgaaataatcacgctcaaattgaaagcgtaagtggatggcaatcattgtaatttacgtcatcgaagtgattttcaattgtagccctggcattgacattgcatagagcaattaataaagcgttgataccacggcagaaaggggttttaaagatagtacttacttcattcatactcccatttacccttatacttaggtataaattatgttagtatattaatgtaaggttatataggaactgaaacaggggtgacaatcttaaccaacacttttatcgaaatatgtgacaactatatttatcaaagcaacccatttgtcgtttgacgtaggttgtcattgactgaaggcataaagattcgtgattaattgcaaaccaagtgttacattcaagtaaaatcaattactggtgcaaaatggagaagatgctgagtacttacattgaggaagctgtgagttcttcagttcttagctaattaaaaatgacatgtatttactgatatttgatattccccatgtatgcatttcattagatggagttctacgcaattggtaaaggtgccgattttaaagcgatcattgagaaaggcattgcaagctgcatgacaacgtacagcacctacgatcgagaactgtacaaggcctacgccctgctggccacctatcttagcaaccatgcctttaagatcatcaaatctcgaccggcttttcaggccatggccattaattgctttgaccagttggacagccttcgccaacagcatgatcctcaccttcaggtgactaaaggctttctctggatgctctcatccagcagagcccaggatgctgacgctctgttaatcagcgtgctccggaatcatcccaaaaatattctggcactaataggacgtgcgtgcttggcctataatcgccaggattatattggagctttgggctacttcaagagcgtcctgctgatccaaccccaaggaatggcagacgtttgggtaggcattggacactgcttctggaagatgggtgaactggaaaaggctcaattgtcgttccaaatagctttggagcacaacggtcaatgtctgaacgccgcccttgccttggcattagtaaagttcgagcacaacgatgagcagtcctatcaggatggaaaaatgctgctgacagcagcctataaggaaaacaataagaatccagatttgctgagtattctcgctggcatgtactacgcggatgggaaccataaactggtatggagttttgcgggaaatgccattaagttcaccgccaacaaacatatagagtcgcggaactacttccagatagccaagagttaccatgcaaccggtcaattcgagtcggccaagaaatactacttgctttcagcaaaatccgcgcctgatggatatatcctgcccctggtgggagttgcccaaatgtatctgcatgaaggagaactcaacagatccaaggcgtttttggaatcgtttctcacgtccgaacccgatgagcccgtggtaatggatcttttggccaaaatataccttgagtataaatgcccagaaaaaatcgataaggccattgagatgcttgtcaaggtggtggaaagcgcatcctatcatcaaaacaccaatagctggttgaacctggcatttgcctatgagcaaaagcggctttgggcccatggcgtcaatgcctaccagaaggcaatagacatttacttgagccagggacatcagataccgattgagtggctcaataacttggccagcagtcagctgatggccaaaatgccagagaaggcactcaatacccttgacgatgccctttccaaatgtagagtaatgaatagcgataacaagacgactaatctgctctcattgcaatataatcgcgggctagttctggaagaactccatatgttcaccctggctgcggagaactataaatccattaccaaagagtactcgagctaccatgactgctatttgagattgggggtaatggcgatccagaagaataatcacacccaagccattgagcatttgaaggatatcctagttgaggacaacttaaatatgacagccaggtgtgtgtgtgtgtcttaaactcaaatttattttgtatatttttttcaactaatgtatttcattgtcttggctcgtcaaaactttagaacctatatgggcgattgcttcaaaggtctcagcctggacaagtttgctaccttcaactacaacatgatccttgccagacaatctaaatttacgaacacctatgttagcatggcgatgggcaatttttgtcttgaaaaattgcagaattggattgctgaaggaaatttcagagctgcccgtaaacagcaagagaaggcccttcagtgctttggcaaggtaagataagatacattaaagtgatatattgttcgataaaacacatcgttataacacatttcagatcctcgattgcaatccaaagaacctgtgggcagccaatggcattggcgctgttttgagcagctgtaataacctctcagctggcggtgccatttttaagcaaattatcgagtgtgggaataagtgtattcccgccataataaactcggctcacatagcgctcgtaagtggccaatacaggttggccattcagacctacgaacgatgcctgaaggaccatcttcccaaaaaccgtgtggacgttatgcactgcttggccaaagctttgtatgacaacggtgatgcccgaaaggccaagatgtggctgctcaaggtgcgccacttggtaccccacgatccatttgtgatctttaatctgggcctggcgattaagaaagagacagaacaagcattggctcttccacggccccaattggatgaactcatgggcctcgatgggttgcttaaggtggcattcaagtaagcttgggagcaaattcatccattttaatcggtactaatagaaatgtcctatctgcaggttattttgccatataaatctaaatcatcccaaaatctcggtgcgtgtatctgcaaagtatgccgaagactgtcaaaatttaatgaccgagctgattgctaaaaaaagacaagccagcgaatcgcatgccatggaagaggaccgcgttcagctgcaaaagcagcgataccgtgaccacattgagcaccagcgtcagcaggagctgcagcgggaggaggaggagcgagtccgtcgggagaatctgaagatccaacgcaaggaggtcctggaacgcactagaaagatcattagcgcccctttggcgcctgacgtgccaaaaaagtctgcgggaaatgggcgtgccaagaaaaatcaggagaatggagacgggaaggccaagaagagtggacccccaaagaagaagacccgcaaacgagctgctggcaaggaacaggaggatatcgagcctttaaaaaagccaaagtctaaggaattcattgatacggatgatgataactcagaataggaatgcatctttcatttatctacctatgttcctatattaatatataggattaatattaattaataatattaacttacttttatattaaaagttaatattaatattaacttacttaaataaaccaaccttacctccatcatatatgatttttagcccaatgctgttaatgaatttacattttcgttatatttgaccgagtattcctgttttccattcaatttgctaacacacgaaatacgtcagtttctcccgggggagctgagtggaagtgtactccccatccaagagcagcacacatgttcatttgaatgtcaactcttgtcgaatgagccgcaggacattggtgtcctgctcgaattacgcatctacttgactggcactttgtaactgtcagggaatctaacgaaccgaacaaccataacgaatgaaaccaaaccaaaccgagctcgaactgagttcaaccgaaagttaaatattcgttaggcaaacgcgaaaaatgattcgtggatgggtcggcggcggctcattaatatcaatttatgagctgagacacgaaattagtctgtgacaagattcgccgcaggatgtggacaaacaaacaagcacccataaccctccgtcctgccatccatccattcgtccatccatccatcctgcaccactctccaccacccatatgtggttgctttgtatgagtgcgcctttttgggtggttgagtggtttttgcgactacgtctggggtagcgttaattaattccaaaagtgtattgcgtgtcctgccaaaaggacaaatatgcgtacacgactcatgtcctgtggtgaaatgggcttgttacgggtgtctgtacgcaaattatgaaaaatatttccaaataaatcagaggtaacgagctgtccgagttcactgtaggggaaaggaaagtcggtgcttaccacttttttattccctcgtttgaattaagcacaaaagctgcagttttaatacacattttgttcttt

SEQ ID NO: 21002 - DNA, 2694 bp, DROSOPHILA
atggagaagatgctgagtacttacattgaggaagctatggagttctacgcaattggtaaaggtgccgattttaaagcgatcattgagaaaggcattgcaagctgcatgacaacgtacagcacctacgatcgagaactgtacaaggcctacgccctgctggccacctatcttagcaaccatgcctttaagatcatcaaatctcgaccggcttttcaggccatggccattaattgctttgaccagttggacagccttcgccaacagcatgatcctcaccttcaggtgactaaaggctttctctggatgctctcatccagcagagcccaggatgctgacgctctgttaatcagcgtgctccggaatcatcccaaaaatattctggcactaataggacgtgcgtgcttggcctataatcgccaggattatattggagctttgggctacttcaagagcgtcctgctgatccaaccccaaggaatggcagacgtttggcacaacggtcaatgtctgaacgccgcccttgccttggcattagtaaagttcgagcacaacgatgagcagtcctatcaggatggaaaaatgctgctgacagcagcctataaggaaaacaataagaatccagatttgctgagtattctcgctggcatgtactacgcggatgggaaccataaactggtatggagttttgcgggaaatgccattaagttcaccgccaacaaacatatagagtcgcggaactacttccagatagccaagagttaccatgcaaccggtcaattcgagtcggccaagaaatactacttgctttcagcaaaatccgcgcctgatggatatatcctgcccctggtgggagttgcccaaatgtatctgcatgaaggagaactcaacagatccaaggcgtttttggaatcgtttctcacgtccgaacccgatgagcccgtggtaatggatcttttggccaaaatataccttgagtataaatgcccagaaaaaatcgataaggccattgagatgcttgtcaaggtggtggaaagcgcatcctatcatcaaaacaccaatagctggttgaacctggcatttgcctatgagcaaaagcggctttgggcccatggcgtcaatgcctaccagaaggcaatagacatttacttgagccagggacatcagataccgattgagtggctcaataacttggccagcagtcagctgatggccaaaatgccagagaaggcactcaatacccttgacgatgccctttccaaatgtagagtaatgaatagcgataacaagacgactaatctgctctcattgcaatataatcgcgggctagttctggaagaactccatatgttcaccctggctgcggagaactataaatccattaccaaagagtactcgagctaccatgactgctatttgagattgggggtaatggcgatccagaagaataatcacacccaagccattgagcatttgaaggatatcctagttgaggacaacttaaatatgacagccagaacctatatgggcgattgcttcaaaggtctcagcctggacaagtttgctaccttcaactacaacatgatccttgccagacaatctaaatttacgaacacctatgttagcatggcgatgggcaatttttgtcttgaaaaattgcagaattggattgctgaaggaaatttcagagctgcccgtaaacagcaagagaaggcccttcagtgctttggcaagatcctcgattgcaatccaaagaacctgtgggcagccaatggcattggcgctgttttgagcagctgtaataacctctcagctggcggtgccatttttaagcaaattatcgagtgtgggaataagtgtattcccgccataataaactcggctcacatagcgctcgtaagtggccaatacaggttggccattcagacctacgaacgatgcctgaaggaccatcttcccaaaaaccgtgtggacgttatgcactgcttggccaaagctttgtatgacaacggtgatgcccgaaaggccaagatgtggctgctcaaggtgcgccacttggtaccccacgatccatttgtgatctttaatctgggcctggcgattaagaaagagacagaacaagcattggctcttccacggccccaattggatgaactcatgggcctcgatgggttgcttaaggtggcattcaagttattttgccatataaatctaaatcatcccaaaatctcggtgcgtgtatctgcaaagtatgccgaagactgtcaaaatttaatgaccgagctgattgctaaaaaaagacaagccagcgaatcgcatgccatggaagaggaccgcgttcagctgcaaaagcagcgataccgtgaccacattgagcaccagcgtcagcaggagctgcagcgggaggaggaggagcgagtccgtcgggagaatctgaagatccaacgcaaggaggtcctggaacgcactagaaagatcattagcgcccctttggcgcctgacgtgccaaaaaagtctgcgggaaatgggcgtgccaagaaaaatcaggagaatggagacgggaaggccaagaagagtggacccccaaagaagaagacccgcaaacgagctgctggcaaggaacaggaggatatcgagcctttaaaaaagccaaagtctaaggaattcattgatacggatgatgataactcagaatag

SEQ ID NO: 21003 - protein, 894 aa, DROSOPHILA
MLSTYIEEAMEFYAIGKGADFKAIIEKGIASCMTTYSTYDRELYKAYALLATYLSNHAFKIIKSRPAFQAMAINCFDQLDSLRQQHDPHLQVTKGFLWMLSSSRAQDADALLISVLRNHPKNILALIGRACLAYNRQDYIGALGYFKSVLLIQPQGMADVWHNGQCLNAALALALVKFEHNDEQSYQDGKMLLTAAYKENNKNPDLLSILAGMYYADGNHKLVWSFAGNAIKFTANKHIESRNYFQIAKSYHATGQFESAKKYYLLSAKSAPDGYILPLVGVAQMYLHEGELNRSKAFLESFLTSEPDEPVVMDLLAKIYLEYKCPEKIDKAIEMLVKVVESASYHQNTNSWLNLAFAYEQKRLWAHGVNAYQKAIDIYLSQGHQIPIEWLNNLASSQLMAKMPEKALNTLDDALSKCRVMNSDNKTTNLLSLQYNRGLVLEELHMFTLAAENYKSITKEYSSYHDCYLRLGVMAIQKNNHTQAIEHLKDILVEDNLNMTARTYMGDCFKGLSLDKFATFNYNMILARQSKFTNTYVSMAMGNFCLEKLQNWIAEGNFRAARKQQEKALQCFGKILDCNPKNLWAANGIGAVLSSCNNLSAGGAIFKQIIECGNKCIPAIINSAHIALVSGQYRLAIQTYERCLKDHLPKNRVDVMHCLAKALYDNGDARKAKMWLLKVRHLVPHDPFVIFNLGLAIKKETEQALALPRPQLDELMGLDGLLKVAFKLFCHINLNHPKISVRVSAKYAEDCQNLMTELIAKKRQASESHAMEEDRVQLQKQRYRDHIEHQRQQELQREEEERVRRENLKIQRKEVLERTRKIISAPLAPDVPKKSAGNGRAKKNQENGDGKAKKSGPPKKKTRKRAAGKEQEDIEPLKKPKSKEFIDTDDDNSE

SEQ ID NO: 21004 - DNA, 5835 bp, DROSOPHILA
gtgatcagaggttgagatccaggtcgaaatcggcacaagagcactcgacagccaggaagcagcctcatacggcctaccgacaggacaccatgagactgaaggagttagacggctctcttcactagctgacaatcgacgaggcagactgggcgaacgcagcagcggataaaatggcagcgaagttggaggagaccattaccacttggcagataagcggagacgtgtcaagctgaccacttgcggccggtcacgtagcccaagattctggcggctgcgagaagcctcaaaaccagaaagaaatcaggacccgatcggatcccatagaaggcaaccaaggcaagcaccctgccgaacccttctcgtaaagacccatctgccttcgagaaggtgatcgcggcgaggctcaacacagcaatatcggctgcatggggactttctacaaaccagtacggattccggaaagaattgtcgacgctggacgcgatctccacggtcacttggtttttaggtagcaggttacttgctgcacgccgtaggtagctacttcagcaatcgggtgcttgtcctcgaatcgacatcgagatccagaaagttcgggttcatgtccggagtctcacatggctctacagtttgcttttccggaaagcaccaagatcgtgaggttccaaatctttggtgcccctaatgcgaagcaatgctttgcggcagtaccttatccggtttcacatctctactaacatcgaggctgtataataaattgttacgtagttatggtatatatgtaagtaaagaaataacaaaaaaaaaaaaaatggcgttgcatgtgaagcttatctttgtgttttctagtatttggcagatcctgttccgtttgttcctttttttttggctttcctgtcgcctgtcttgcatccagtccctctactttgaacaggctatttagggggacctgtttgagatcactagtttctatgacatctcctggggactcctgggtctgttatccagttcttatgtgcttcttggacaagaactgtaagtccagagtcttctgtggcacgtttgtagtttttagggcgtcatggatcatatgcgcttcagtctcatcggtgggcttcaacacttctgtttcagtgcttaattcggagtttgcggtcggcgaaggtgttttttgctctttaccttcaccgggggaacctacagtggtccccttctcgttaaattcgtgtgtagccatcgtggaagtttcggaattcacgctttcagtttctgatcctgtgcgaacgagctgtgaacatggctgtccggctgcttttgcagatttcgccattttgaggtccttcaataacttcattttggctataatcgagctgcactctatcatgtcgttgggcccgctaaccacattctctagctcttccttgctgaaactccatatgtcggcgatcggcttaaatcctttcgtttcgttggtaaacatgggtcgtgacttcatcagctcggcaattgtacgcttttgttgattttgcggctgaactgcgatttttggctgctccgcgacgacgggctgtgtaacaaagtgattacccgatgcctctggaaagatcgatcgtcgcccaccgctcacttttcgatccaattcaggcaaattggctttggctgcaatggctgcggctctaatccgattcaggtggccatttctggtgtagcagtgctccgaatcgcttgaggaagtctcatccccgtctttcgaaaacattactgctttttgttttcgagactggactgcgattcttggctgctcgttgacgatggaccgtgtagaaaagtgcttattcgatgtctctggagaggagatttcagacaatttggccttggctgcaatggctgcggctctcatctgagtccggcggccatttcctgtgtaacagggctccgaatcacttgaggaaacctcatcctcttctttcgaaaacaatactgttttttgttttttaggctggacggcgatttttggctgttccttgacgacgggctgtgtagaaaagcgcctattcgatgtctctggaaaggacatttcagacaatttgatattggctgcaatggctgcggctctaatcccagtccggcgaccattagctttggatgcaatggctgcggctctaatctgtgttcggcggccatttcctgtgtagctgggctccgaatcacttgaggcagcctcttcctcgtcttccgaaactgtgggatttaaaattcaattcattagtttgactgaatctaatcttatatgaaagttgctcaaagaaaaaagatttcgttgctaaccttcataccaacatttgcgttttgcgtgtcgccgcattttcagctccttggctttctctgctttatcatgcactgctggtgttgattcagcctttccagctgcattcgagagattagtctcattttcgtagccctcttctatggtgccatagtccaactgtggtcgatccctgtacttggcatagtcgatctggagatacttcaagtcgtcgcatgattcggccatgttaagagacacaaattttctcttcaggtcctggcttttgagtagggcactgcaacgctcgtctagcgtttgccaatcgagagcccatgagtattgtttatgtcgcggttggaagaccacggtcagaagatccttggtcatgttgctgggtagacgcaacgccttcagcgactcgtttattggatcgtagtcggacactggatcttcatggtttgttatggtcataatctggtgcacatcgatggtggagctcagcagttcgtacttgacgttgccaatcgctggagcagggagcccgccctcctcctgtcgatttttcatgatccacgaacagcgctttacttcgttataatttgatgatgtggggtggaggtagaaagcagtcagccagaattctgcctccataaatccatggtcagagaacaatttggctaggtcagcatagtttgcagacatcttttgctccaaatcgagcataaaatcaacggttaacccgggatgatatctccacatttctaatgcatttatttgttgcccaataattttcagcagcagagcaatcttagcaaatctccagcctgaaaaattctaaattaaaaaagcgcggtgcttagtaaagttttcgcttttgttagttctcatcacttacccgctctgccagcaatttgtacacaaagctcaaaacttcctcattgtttggtacattttgaaaaaccggatctacttgtctatcttgttcttcgcccacctcaggctgaatcttttcgtcgtcatcactgttcttgtagttgcttatgttgctggctcgatttcccttgcatatctgctgcttgtagttgagaattaggtttactagatgcggttcaatgcagctgtttcgctgttgttccatcttcttgagctcgtttagaagaaagcgctcgctgctctcgcgctcctctacatagcgatccattagctttttgaactgtggcaggtgctccaggaaatcgtgctcgttaagcgactgaagatccatcaataaatttcccagcacatagctggagtaggcatctagtatgacggcaaatgaagtgaccatacatagattgaatttcctaaatgcaattttctcaaaaaacgcattctttccgagtcgaagacggacgcaaacgcgggcaataagccgagctggcgtaaagttaatatcatgtgagctcgaaaattcctccatgatctggacatagaaccctatgttgtacatctacgaggtggttttatgacgacatttagttttgttatgttagttacatgatgaatgttttccttaccaaattatcaatcacaaagccttgattatcatccctaacaaaagcggccaagaggcatacatgaccgattagtgtaattgtgttttcatcccctttaaaggacacaaatggtgcattttcgtggattttcagccaagcagctagcatccgaagcgccagctgttttacagcctcaaagttgccggcgttaaagagctggattagtcgcagcagggccagagataccccttcctgcatgaggaaagcaacatctaagaaataaggcaatgattagatgaatccttgacgaaaattagtaatggcttaccttctcctgatgccgcttgaactttgtgttcgatgccgtgttgtttattcagctccaggttaagaaatagctgatgcaggtagggcaggctccagggcttcgtctggaactgcagaacgtacgaccagttgatattggccagttcaccaatctgatggaatgccggcattgctttggtgagggtgtagagcaaaagctgcttgaggccttcggagcaggtcttccactcttggctaaaccacatcagcagcgagtggtagaccaaaaccctgaccatgtgacgcagcgctgggtcctttagcgactcggaatccctggtaggcaggtggcacacctcccatccgtagagtaactgcgacaaccggtcatcgcccattagctcaaacacatccaaagcgctgtgcttattgcagaatacaaacattttctataaaaccaagatttaagcaatgaaaacgtgtgcataaggatttatgtacaaagcaagtccttaccgccgaaaactcgtcgtactctagtttcctcgcacaatccagaaacttttgttcatcgtgcacatcctgagaaaatattatatccattttgcagcacttaattcatggcaatgctatgtcaagtcgatttccttttttttgccggtttcgatttattttaatttagcttgaaagttgcaacgaacaacagctgaacccgattactgtaaatcgatgttaatcgaaaggggcaacgctgtctacacgaggttcatatactcgctaaactgtaaggctaggcgtatttgctaaatgtggaaggtgcattcgctaaggccattgttgccaactgaaattttattatgcaggcaaaagtaatttaaaaatttatttgaaagaaacaagaatacaaaacacttactatagaccagaagggtatacgagattcgttggtaattacatatatatgtaacaagtagaaggaagcgtttccgaccacataaaagtatatatattcttgatcacgatcaatagcgtttccgaccatataaaagtatatatattcttgatcaggaccaatagccgagtcaatctggacgtgtccgtccgcatgaaagtcgagatctcaagaactgtttgttgacccatgttgccgcgcccacaaaccgcccaaaacgggcatgccctcacttttaaaaaaaagttttgaattttttcatatttttattagtctcttaaatttctatccatttgccaaacaactcttttcgggtatctgatagtcggggaattcgactatagcatgctctcttgttgtcatttttgttttgtttttaatttggcaaaaaaaaaaccataaaaaagtcgtatgcgatttagttttagactacagtatacagtacacatcatacataattacgtttattgcattcacttacataattggcattccacattcattttacatatacggatatatgtatatggatcacacatatgtatatgtatatactattcatcatatgccgatagttgcgaccccaacaatcatcaaattgcaactaactagaaaaggcaggtaaggaaattaaatcaaatttaacacttcgactgatggtactttcgattatggggcaacgtaaatgcgtaatcttgtgacttcgattatctgtatctttatgggtaggtaac

SEQ ID NO: 21005 - DNA, 3497 bp, DROSOPHILA
caagctaaattaaaataaatcgaaaccggcaaaaaaaaggaaatcgacttgacatagcattgccatgaattaagtgctgcaaaatggatataatattttctcaggatgtgcacgatgaacaaaagtttctggattgtgcgaggaaactagagtacgacgagttttcggcgaaaatgtttgtattctgcaataagcacagcgctttggatgtgtttgagctaatgggcgatgaccggttgtcgcagttactctacggatgggaggtgtgccacctgcctaccagggattccgagtcgctaaaggacccagcgctgcgtcacatggtcagggttttggtctaccactcgctgctgatgtggtttagccaagagtggaagacctgctccgaaggcctcaagcagcttttgctctacaccctcaccaaagcaatgccggcattccatcagattggtgaactggccaatatcaactggtcgtacgttctgcagttccagacgaagccctggagcctgccctacctgcatcagctatttcttaacctggagctgaataaacaacacggcatcgaacacaaagttcaagcggcatcaggagaagatgttgctttcctcatgcaggaaggggtatctctggccctgctgcgactaatccagctctttaacgccggcaactttgaggctgtaaaacagctggcgcttcggatgctagctgcttggctgaaaatccacgaaaatgcaccatttgtgtcctttaaaggggatgaaaacacaattacactaatcggtcatgtatgcctcttggccgcttttgttagggatgataatcaaggctttgtgattgataatttgatgtacaacatagggttctatgtccagatcatggaggaattttcgagctcacatgatattaactttacgccagctcggcttattgcccgcgtttgcgtccgtcttcgactcggaaagaatgcgttttttgagaaaattgcatttaggaaattcaatctatgtatggtcacttcatttgccgtcatactagatgcctactccagctatgtgctgggaaatttattgatggatcttcagtcgcttaacgagcacgatttcctggagcacctgccacagttcaaaaagctaatggatcgctatgtagaggagcgcgagagcagcgagcgctttcttctaaacgagctcaagaagatggaacaacagcgaaacagctgcattgaaccgcatctagtaaacctaattctcaactacaagcagcagatatgcaagggaaatcgagccagcaacataagcaactacaagaacagtgatgacgacgaaaagattcagcctgaggtgggcgaagaacaagatagacaagtagatccggtttttcaaaatgtaccaaacaatgaggaagttttgagctttgtgtacaaattgctggcagagcggaatttttcaggctggagatttgctaagattgctctgctgctgaaaattattgggcaacaaataaatgcattagaaatgtggagatatcatcccgggttaaccgttgattttatgctcgatttggagcaaaagatgtctgcaaactatgctgacctagccaaattgttctctgaccatggatttatggaggcagaattctggctgactgctttctacctccaccccacatcatcaaattataacgaagtaaagcgctgttcgtggatcatgaaaaatcgacaggaggagggcgggctccctgctccagcgattggcaacgtcaagtacgaactgctgagctccaccatcgatgtgcaccagattatgaccataacaaaccatgaagatccagtgtccgactacgatccaataaacgagtcgctgaaggcgttgcgtctacccagcaacatgaccaaggatcttctgaccgtggtcttccaaccgcgacataaacaatactcatgggctctcgattggcaaacgctagacgagcgttgcagtgccctactcaaaagccaggacctgaagagaaaatttgtgtctcttaacatggccgaatcatgcgacgacttgaagtatctccagatcgactatgccaagtacagggatcgaccacagttggactatggcaccatagaagagggctacgaaaatgagactaatctctcgaatgcagctggaaaggctgaatcaacaccagcagtgcatgataaagcagagaaagccaaggagctgaaaatgcggcgacacgcaaaacgcaaatgttggtatgaagtttcggaagacgaggaagaggctgcctcaagtgattcggagcccagctacacaggaaatggccgccgaacacagattagagccgcagccattgcatccaaagctaatggtcgccggactgggattagagccgcagccattgcagccaatatcaaattgtctgaaatgtcctttccagagacatcgaataggcgcttttctacacagcccgtcgtcaaggaacagccaaaaatcgccgtccagcctaaaaaacaaaaaacagtattgttttcgaaagaagaggatgaggtttcctcaagtgattcggagccctgttacacaggaaatggccgccggactcagatgagagccgcagccattgcagccaaggccaaattgtctgaaatctcctctccagagacatcgaataagcacttttctacacggtccatcgtcaacgagcagccaagaatcgcagtccagtctcgaaaacaaaaagcagtaatgttttcgaaagacggggatgagacttcctcaagcgattcggagcactgctacaccagaaatggccacctgaatcggattagagccgcagccattgcagccaaagccaatttgcctgaattggatcgaaaagtgagcggtgggcgacgatcgatctttccagaggcatcgggtaatcactttgttacacagcccgtcgtcgcggagcagccaaaaatcgcagttcagccgcaaaatcaacaaaagcgtacaattgccgagctgatgaagtcacgacccatgtttaccaacgaaacgaaaggatttaagccgatcgccgacatatggagtttcagcaaggaagagctagagaatgtggttagcgggcccaacgacatgatagagtgcagctcgattatagccaaaatgaagttattgaaggacctcaaaatggcgaaatctgcaaaagcagccggacagccatgttcacagctcgttcgcacaggatcagaaactgaaagcgtgaattccgaaacttccacgatggctacacacgaatttaacgagaaggggaccactgtaggttcccccggtgaaggtaaagagcaaaaaacaccttcgccgaccgcaaactccgaattaagcactgaaacagaagtgttgaagcccaccgatgagactgaagcgcatatgatccatgacgccctaaaaactacaaacgtgccacagaagactctggacttacagttcttgtccaagaagcacataagaactggataa

SEQ ID NO: 21006 - protein, 1137 aa, DROSOPHILA
MDIIFSQDVHDEQKFLDCARKLEYDEFSAKMFVFCNKHSALDVFELMGDDRLSQLLYGWEVCHLPTRDSESLKDPALRHMVRVLVYHSLLMWFSQEWKTCSEGLKQLLLYTLTKAMPAFHQIGELANINWSYVLQFQTKPWSLPYLHQLFLNLELNKQHGIEHKVQAASGEDVAFLMQEGVSLALLRLIQLFNAGNFEAVKQLALRMLAAWLKIHENAPFVSFKGDENTITLIGHVCLLAAFVRDDNQGFVIDNLMYNIGFYVQIMEEFSSSHDINFTPARLIARVCVRLRLGKNAFFEKIAFRKFNLCMVTSFAVILDAYSSYVLGNLLMDLQSLNEHDFLEHLPQFKKLMDRYVEERESSERFLLNELKKMEQQRNSCIEPHLVNLILNYKQQICKGNRASNISNYKNSDDDEKIQPEVGEEQDRQVDPVFQNVPNNEEVLSFVYKLLAERNFSGWRFAKIALLLKIIGQQINALEMWRYHPGLTVDFMLDLEQKMSANYADLAKLFSDHGFMEAEFWLTAFYLHPTSSNYNEVKRCSWIMKNRQEEGGLPAPAIGNVKYELLSSTIDVHQIMTITNHEDPVSDYDPINESLKALRLPSNMTKDLLTVVFQPRHKQYSWALDWQTLDERCSALLKSQDLKRKFVSLNMAESCDDLKYLQIDYAKYRDRPQLDYGTIEEGYENETNLSNAAGKAESTPAVHDKAEKAKELKMRRHAKRKCWYEVSEDEEEAASSDSEPSYTGNGRRTQIRAAAIASKANGRRTGIRAAAIAANIKLSEMSFPETSNRRFSTQPVVKEQPKIAVQPKKQKTVLFSKEEDEVSSSDSEPCYTGNGRRTQMRAAAIAAKAKLSEISSPETSNKHFSTRSIVNEQPRIAVQSRKQKAVMFSKDGDETSSSDSEHCYTRNGHLNRIRAAAIAAKANLPELDRKVSGGRRSIFPEASGNHFVTQPVVAEQPKIAVQPQNQQKRTIAELMKSRPMFTNETKGFKPIADIWSFSKEELENVVSGPNDMIECSSIIAKMKLLKDLKMAKSAKAAGQPCSQLVRTGSETESVNSETSTMATHEFNEKGTTVGSPGEGKEQKTPSPTANSELSTETEVLKPTDETEAHMIHDALKTTNVPQKTLDLQFLSKKHIRTG

SEQ ID NO: 21007 - DNA, 3881 bp, DROSOPHILA
aatgttatcaatgattctgcatcaactcactccagtcctggtagcccgaattactgaggccacagcacttgaactcctgctgggcaaagtcaatgaagttctgcaggtcgggatcgtcgcggtacgagtggatgatcttgtgcgtgaactgcttctccaaaaaggtgttcatgtactgcgggcacacgaagcagacgatggctgttggcgcagacagagaggaaggtagagaaagttgatgacaatacgaaatcaggtgcccgatggcgtgactcaccgatggccatctccagcaggaagaaaagcagcaggcacatggagtagaacttcagtaggaatgtgttctcgcgcagtgcgcccacgcagccggagaagctgaccagaaagatgaccgtgccggccaggatcatcaccagcgagatattgaggaatacgtcgtagaagttctccagccgcaccgatccgttcgcgtcctcccacttgtccctgaacgcatagacgccaatgcccaggagcaggccgccaaagagccagaacacgaagttcagcaggaagatcatgtacttgacgcactggctcacgtaggtgaagtgatgcggatgcatcacctcgtgcacctcgatgccgctgtagccacgccccccggccatgccgacgcccccgagcccagcaccctgatatcggtagttgctcatcctcgccgtttatctgtatccgtatcttcaactttaaccactcgctttgccaccgatttcactttgcgtccgcttcagtcgcccgtttatctcgtttacccaattagcattggcagtggcagttgcacattcgcttgataatcactctttatttatctaatctccttttattagcgtagtaatattgcacgaaaagtaaagtgtacaaacaatggacacaatcggatggattcgtatcgttcgtgttatcgattaacgatagcggcgcacagctgttcgaaacggggagccactacactgtgcagcaaaactgtgcaacaagttgaacaaggtttttgaaacttaagcaatttgtcttctgtactcaaatcaaagtatttggcgccttgggaacggtaactttgcagtccaaccgtacgccgtgttggccagtgtaatcactatcattatcactccgaagccataaaattggaaacaaaatcgtttcggcactgacctttgagccgccggtacaacgtctggggatcgcggatagatggatcacagccattgcgccatatgtgaatcagcagtcgatagagtccatgcaaatcccacagagagagaaagagacgacttcgacgcggtggccactatcgggaattggaaactggaaattgggcactggcgatcgggaaacgataagcaatcgcggatcggcgctgatagcagcagaatacaaaatacctagcttggctaattgctgttccagttgcagctagtgcttgactgccaccatgaacatcctgctgcgcttaatcgtcttcgccctggatcctctgggtctgggccgacgtttcctcattcggccggccgtgaatctgggctggaatgtctacgatcgcgtgcgcagcaaggcggacgagaaggtgggcacggtgcgagagctggtcctccggctgggcctcatcgccttcgccgtggtgctcatcatctggctggcggtcttcatgtacgccgccttctactacgtctacatgccggccatatcgcacacccgacccgttcacatgcagttcaagtgagtagcttcgaatgtgaaggaaatcgatgtggctacaggttttcttcctgtgccatgtacatttatctaaatataggccatttgtccataaatatatgtagacctaatctgcttatcagtccatgcgattggctattgcaagctagttggtaattgtcaagttgtttgattcatagttagccgctctagacttagtgcccaataaaacaatgccgttgaattccgcagaacctgcctggagaccagcacgccctgcacctttccgcacgcgcacgtctcgctgacaaagaagcagcaactcctgatggttggccaggcgtacaaggtgatcgtgaacatcgacatgccggagtcgccgcaaaatctcgagctgggcatgttcatggtgtgcgccgagatgagggactacgactcgatgctgaggggtcactcctgtcggtctgccatgatgcgctatcgttcgccgctgatccgcatgatctccacgtgggtcctgagtccgctctatgtgcttggctggaaagaggagttccagcaggtgccagttgagatattctcgcggtatctggaggagcgacaacatcccataacggatgtctacgtggagatacagtcgcagaagatccagttctacacggtcaccctgcacatagttgccgattttaccggtctgcggtacatcatgttcaactggcccgtattgtcggccatagtgggtatgttggcgcatatacctccccatagcaaccttcgctaatcctatttctatttttcctttccagccattagcaccaatctgttctttatactggtcgtctttctgctcagctggtaccactggtccgacgccaagtggctgcatagcgtgcaaatcaagtacgcccggctcacgaagtcgctcgagcccggcgtaatacactccaaagcgagcagcctgcgcgacgacgacgacgacctggttgcctacagtgataagtccgatattgcggacgtgggcggcgacacgctgagcgacgtcgatgccgacgacttggtgctggtcaagaaatcccgcagtggcaagcgcgaatcgcccgatgcgctgcgtaagcgtcccacaaagaagaccaccgcggaccattgaaaagtggatggaggcggagatgatatgagatgatatggaacgaaagagggaccaccattaaccaccgaaggctagaccaacgcccgtgcgacgcttgagccaaagactaaatagatttaggactaagttagtgaacacagccagctgaagtattccggcggattagcttcaagcttcaactggttcttacttaagtggtggacaaaagtgtatcatagtataggtattaattattgatccagttagagattgccttgtagattgctgaactttgcattttcgatgcagttgctcattcgttgttatctatgcccagttgggaaccttcccattgcaagccaattagcttaagaaaaaagcattccatttgtacatgaaattttagcaacaaacaaagtcgaatccaatgaatttgtaaacgaacataaattaaaatgtttctcttgagatttgacaaggagcacgcgcatctttaggcttcagcctcgtcctgtctcttatcctgcggcggcgatccgtctggccccaaattgggatctggatcttgcgcttccggctgtttctgctgctcctgcggccattcaacatattcgtcgaagagaaacattcggatcaaggtgagctggatgttgagaatatagtgcacgttgaccatcttgtcgccgcgatccttgtactccagcagggcatcctcggccgatactggtctactcacgtgatggcggccctgccgcaaccttcgccgcatcaaacgctgcctgtccatggagtccagtttccggctcacgttttccgccaccgtacgcccattgcggacgtagttcctccgccagcagggcagcttgcggaagcgtcctaagacgcccgagaactcgacgaccagaaattcgaagaaagtgatccgattctcccgttccgagtccctgatcgtcttcgccacggtaaagtagtcgttgatcagggacacaaagacattgatcagcagcacaatgatgacgaa

SEQ ID NO: 21008 - DNA, 1584 bp, DROSOPHILA
caaaactgtgcaacaagttgaacaaggtttttgaaacttaagcaatttgtcttctgtactcaaatcaaagtatttggcgccttgggaacggtaactttgcagtccaaccgtacgccgtgttggccagtgtaatcactatcattatcactccgaagccataaaattggaaacaaaatcgtttcggcactgacctttgagccgccggtacaacgtctggggatcgcggatagatggatcacagccattgcgccatatgtgaatcagcagtcgatagagtccatgcaaatcccacagagagagaaagagacgacttcgacgcggtggccactatcgggaattggaaactggaaattgggcactggcgatcgggaaacgataagcaatcgcggatcggcgctgatagcagcagaatacaaaatacctagcttggctaattgctgttccagttgcagctagtgcttgactgccaccatgaacatcctgctgcgcttaatcgtcttcgccctggatcctctgggtctgggccgacgtttcctcattcggccggccgtgaatctgggctggaatgtctacgatcgcgtgcgcagcaaggcggacgagaaggtgggcacggtgcgagagctggtcctccggctgggcctcatcgccttcgccgtggtgctcatcatctggctggcggtcttcatgtacgccgccttctactacgtctacatgccggccatatcgcacacccgacccgttcacatgcagttcaaaacctgcctggagaccagcacgccctgcacctttccgcacgcgcacgtctcgctgacaaagaagcagcaactcctgatggttggccaggcgtacaaggtgatcgtgaacatcgacatgccggagtcgccgcaaaatctcgagctgggcatgttcatggtgtgcgccgagatgagggactacgactcgatgctgaggggtcactcctgtcggtctgccatgatgcgctatcgttcgccgctgatccgcatgatctccacgtgggtcctgagtccgctctatgtgcttggctggaaagaggagttccagcaggtgccagttgagatattctcgcggtatctggaggagcgacaacatcccataacggatgtctacgtggagatacagtcgcagaagatccagttctacacggtcaccctgcacatagttgccgattttaccggtctgcggtacatcatgttcaactggcccgtattgtcggccatagtggccattagcaccaatctgttctttatactggtcgtctttctgctcagctggtaccactggtccgacgccaagtggctgcatagcgtgcaaatcaagtacgcccggctcacgaagtcgctcgagcccggcgtaatacactccaaagcgagcagcctgcgcgacgacgacgacgacctggttgcctacagtgataagtccgatattgcggacgtgggcggcgacacgctgagcgacgtcgatgccgacgacttggtgctggtcaagaaatcccgcagtggcaagcgcgaatcgcccgatgcgctgcgtaagcgtcccacaaagaagaccaccgcggaccattga

SEQ ID NO: 21009 - protein, 370 aa, DROSOPHILA
MNILLRLIVFALDPLGLGRRFLIRPAVNLGWNVYDRVRSKADEKVGTVRELVLRLGLIAFAVVLIIWLAVFMYAAFYYVYMPAISHTRPVHMQFKTCLETSTPCTFPHAHVSLTKKQQLLMVGQAYKVIVNIDMPESPQNLELGMFMVCAEMRDYDSMLRGHSCRSAMMRYRSPLIRMISTWVLSPLYVLGWKEEFQQVPVEIFSRYLEERQHPITDVYVEIQSQKIQFYTVTLHIVADFTGLRYIMFNWPVLSAIVAISTNLFFILVVFLLSWYHWSDAKWLHSVQIKYARLTKSLEPGVIHSKASSLRDDDDDLVAYSDKSDIADVGGDTLSDVDADDLVLVKKSRSGKRESPDALRKRPTKKTTADH

SEQ ID NO: 21010 - DNA, 2787 bp, DROSOPHILA
tatgtatgtacgccatgttcgtgtgtcgtaattggcagccctgcatcgcggcgaactgatgacatcatgcgccttcctgggttccagcggccaatgctccaaattcctcgtacatacgcagtgaccaacggccgacgttgacacactattttattttattgccacgagctggcctaaaacgaaatttgcatgtaagcacacacacacacacacgcgtgaattaaaaagacattagaatcgagcgaattggatttccccgcgctcaacaattggccaatgctgcccagaagagaagaaagtgatgccaatctttttgatttttttttttttttaacgagtagaaacaatctatatcctttacctttaaaattgcacaattatgcaattgcacaaatatgcaatgtttaatatatttgtaatctaaagcttaagttgtaaagtctatacacacaaatacataatatatgaagaaatgctttctaaaaccattcacgattttataacattaatttactaggaaaaaaaaacgaaatggttacttgatctaaaaactagacatcaccttcctgctctgccaacagcttcttgtgatcaaaggcatccgcatcctgctgcctattgcagcccaggcatcgtcgaatgccatagaacaggacgaccagaacgagggagatcagcgaggaggcaatgggcacgaccaggacgagatccagttgcggctgctgcagctgactggattgcagcagcacaatgggcatggtcatgttcagcacgctggcctcgatggccaaagttagtgcgtcggtggaggatcggcaaaggatcttggacagcagataagtggatagatagccggcgaggggcagacatacggcagctacaagaatctataggtccatataggtcaaaattagttgttgccatttcgaattgtatatcaaatggggaacggcactcacctgccaggtgaactcgtagaagacgaacgagttgagacccaccgtcaggcccacgaggcacaagctgagtacgacggacagtggcttcaggaagcgaaagatgaacctagtggtccgcggaaggcagagtcgcagcagcacaccgatggccagacaggccaccagggcagctgctcctccggaaagctggccaaacggcactgttagctcatcgtcctcgtagagtatccggcccagaaccaatatccaaatgggcagcaaggccagggccagcaggctattgatcgtggtggtggccacagaaagattgatatttcccttaaggaagacggcgcacacattggccagtccgccactgggcgaaagtgccgtatagaacagggccagctggagtggccaactgtctggccaaagagcacgacccagtccgaatcccacggcgggcatcagcacaaatcgactgaccacacccaccacaggtcccaccggtcggcagatgatgcccgccaggcgctgcatatccaatactgttccgagattgagaaacatcagcagagccaaggcggcggacacataggtggtgatgcgttcgtccaccacctgtgttctgagcactgttattggcaggggttttggatatgtctccgtcaccgcaccggacttcagttccacctccagtgaactgtatccaaagcgaactccagtcacatatagcgctccccgccagctgcccaacagatcgaaatcctccttctttatctccagcggtggcgatgacgccctccgatcatccttggagtacaccacaaagtagtaatccagcgaagagtccttcggtaacacattgtatatgtgcaaatccacgctccaagtcgaatcctcaaaaaaattcagctcgtctcgatcataatccaccagccaattgccggccaggtcgccatactcagatcggacaccttgcaatcccagaatcatcagcactcccaccgccacaagcagccgtccgatatttttattcacattgcccatgctgcgtcgttacaccaactgaccaacaactctgactactccgacgaatccgagtgctggagtgggtcgtggatcacaaagaggctttatctggccatcgagcagacggttcgatttgctcttatcggacgggctcaggtgcgaaccggaggtgtgaataataatatgaataaatcaggttggtttgtaaatgtaaaggtcttggtgggaatttctaattcaattgagtgcatcttatcgtcgttgtgggcaatgataagcatattaacttagcgtatctatgggaaagtcgaacgaacaatgggtcaacaaaaaactaaagcaaagaagaaaaggagcagaaataataaaaataaataaaatctataaaaatgctgaaatattatcaattcaaatttagttcatttttcaaaaatttcaattgttttattttttaaaacctgtgactgtacaaatccgctacctgcttgtctaagttatattgggaattcctttgtttgttgttatttcgcattgcaatatattgcactttgtttagatgagctctaaacaatttgctactgattacggccacaaagaaggcgaattgttaaaataacatttcgatcgggggcaataaattgcttggctggctgtgggaacttcgaagtcacccggtaataaaacgctttaagattggttgggtttgtttctgtttttattatacccattattcgtggagtaaaagggtagactagatccgttgaaagttatgtaacaggcagaaggaagcgtttccgaccatattatatatatatat

SEQ ID NO: 21011 - DNA, 1365 bp, DROSOPHILA
atgggcaatgtgaataaaaatatcggacggctgcttgtggcggtgggagtgctgatgattctgggattgcaaggtgtccgatctgagtatggcgacctggccggcaattggctggtggattatgatcgagacgagctgaatttttttgaggattcgacttggagcgtggatttgcacatatacaatgtgttaccgaaggactcttcgctggattactactttgtggtgtactccaaggatgatcggagggcgtcatcgccaccgctggagataaagaaggaggatttcgatctgttgggcagctggcggggagcgctatatgtgactggagttcgctttggatacagttcactggaggtggaactgaagtccggtgcggtgacggagacatatccaaaacccctgccaataacagtgctcagaacacaggtggtggacgaacgcatcaccacctatgtgtccgccgccttggctctgctgatgtttctcaatctcggaacagtattggatatgcagcgcctggcgggcatcatctgccgaccggtgggacctgtggtgggtgtggtcagtcgatttgtgctgatgcccgccgtgggattcggactgggtcgtgctctttggccagacagttggccactccagctggccctgttctatacggcactttcgcccagtggcggactggccaatgtgtgcgccgtcttccttaagggaaatatcaatctttctgtggccaccaccacgatcaatagcctgctggccctggccttgctgcccatttggatattggttctgggccggatactctacgaggacgatgagctaacagtgccgtttggccagctttccggaggagcagctgccctggtggcctgtctggccatcggtgtgctgctgcgactctgccttccgcggaccactaggttcatctttcgcttcctgaagccactgtccgtcgtactcagcttgtgcctcgtgggcctgacggtgggtctcaactcgttcgtcttctacgagttcacctggcagattcttgtagctgccgtatgtctgcccctcgccggctatctatccacttatctgctgtccaagatcctttgccgatcctccaccgacgcactaactttggccatcgaggccagcgtgctgaacatgaccatgcccattgtgctgctgcaatccagtcagctgcagcagccgcaactggatctcgtcctggtcgtgcccattgcctcctcgctgatctccctcgttctggtcgtcctgttctatggcattcgacgatgcctgggctgcaataggcagcaggatgcggatgcctttgatcacaagaagctgttggcagagcaggaaggtgatgtctag

SEQ ID NO: 21012 - protein, 454 aa, DROSOPHILA
MGNVNKNIGRLLVAVGVLMILGLQGVRSEYGDLAGNWLVDYDRDELNFFEDSTWSVDLHIYNVLPKDSSLDYYFVVYSKDDRRASSPPLEIKKEDFDLLGSWRGALYVTGVRFGYSSLEVELKSGAVTETYPKPLPITVLRTQVVDERITTYVSAALALLMFLNLGTVLDMQRLAGIICRPVGPVVGVVSRFVLMPAVGFGLGRALWPDSWPLQLALFYTALSPSGGLANVCAVFLKGNINLSVATTTINSLLALALLPIWILVLGRILYEDDELTVPFGQLSGGAAALVACLAIGVLLRLCLPRTTRFIFRFLKPLSVVLSLCLVGLTVGLNSFVFYEFTWQILVAAVCLPLAGYLSTYLLSKILCRSSTDALTLAIEASVLNMTMPIVLLQSSQLQQPQLDLVLVVPIASSLISLVLVVLFYGIRRCLGCNRQQDADAFDHKKLLAEQEGDV

SEQ ID NO: 21013 - DNA, 3920 bp, DROSOPHILA
aattggattaccgcaggcggcgattcgcgtcaaatgaaatgcaatcaaaaaagtaaaatgcaacaaacaaaaacaatggccaatcaataaatgccagcacgcacacacatacttgcgttcttttggatacagcgacgtacgaagaatttaaaatacgtacgatttttaaacggggagttgggaaaaataaagattaacttaaaggctcaattcatgcttatgaatttacttatgacccttacttgttcgtataaattttatgtttgataatataagtaagtatatggtgcaattagatgcattaccaaggcactcagcgaaggcaataacgcccgcgaaaccaatcaccttggttctttctggcagtggccacctcagcacaccatcgtacatggcgttccacagcagttgcccgaatactgatccttggggcatatcgcacgttaccctatgctcacgtgttaagtaaagtaaagtaacatcattggatcgccagaaccacgttttccagtgtactgcgactgcttcttgcagtcggaatccctgcgatttcttgagttgctgccaaggattctcagcagcagcccagaaaagtatgctaccaccagcgaaaagatcgcggaaatttgcttgtttttccgtcttcaaacaattttccctttcacacccaattctttttttttaatccgattttatttggatttggatgtgttatgtgtatgtgtgtgtgtgtatgtgtgggagagtgtgtgtgtgtgtgtgggagagtgtgtgtgtgtgggagagtgtgtgtgtgtgtttgtgaaatagtgtctgtgtgtttgtgggatagtgtgtgtgtgtgtgtagtttgatcgagatgtcggctcttttggcgaaattagaacatgtttaaaatctacgtttgcttgatcatttggttgttggtgctctgcaacagttggatcttggaattcgatttagtttcttatttagagttgcagtgactacggatgcccgcttactccttgagtgctttacgcttccttttttttggggtaggttccttgttctttaatgtgtcttcctcatcttcgttattatctaaataagacttttggttcttcttgggactagcggacagcggtgtgctttccttgttggtatcaccagcggccctttcgtcggtcttctcctcgtcatccttctcctcgtcatcctcctcctcctcgcaatccttcatctccttctcgtcatccttctcctcctccttcttttcctccttattctcctccttctcctcctcctcctcctcctccttcttttcctcctccttcttccccttctccaacttttcctcctcctcggcccccaggtcatcatcgggctgaggatcgtcggtcttcttggccgcggcagcagcagcttttttggcagccgcaaccctactcgggcctaaaccaaatttacagaagatggtaatggcaaccggcaccgcaatggccactatgacaatgccccagatcgctcgattggccctagctagctcgactaccttattcccgaatgattcacgatcgatgtagagacgcttgatgtcgaagctgttggcagcaaagtcacgggccaactccacatcgtccgtgatgatcaggttatcgaagagaatatcgctggacatggaccacagctccagacccacagcgttgattggcgtcatttggaagggcttcagatcctcaaagaagtctggattggctatcttcctgggagcccacttgccctggttgttggggttctcgatcattggtgcactccacttgcccttgtagttgggattggggatgagcggagccttccacttgccacagccgggggccttcttgcacactgggttctccaccagaggagcctcccactcgccatcgatttcggaattccaatcttcgggttcgatggcagttggatcgaaaatcatgtcgggctcatcctctagccagccatttggcatgacggcatcggtatcgggcagatgtggtggagcatcctcgtcccaatcctcgggcttgtgggcattggggtctgggatcttcttccgctcatcccacgattctggcttgtggtcattggggtcatctatctccgccggtgggttgactggtggcacaaagtcggtcagcagggaaccctctttgatgatcttgtggtctaagcgaatctcaaagctgttatcgggacggaccaccagctggtagagatggggtagcttgtccgtgaatggcactcccaaacgggcatttggctttttgcagtgcttttcggtgatgttgccatttaatggattgacgtgccggaatataaagtgcattttcaaattgttgccgcacttgtccggaccaaacatgatggtatagggtgtcttgtcattgaagcgatttagttgctccgtgccttttccggcggacaaaagcttcagatacgagccgccacagtcctgaccctcctgcaacgtaagctcgtactgcaccaccagcggcttgttcgacttgaaatcgaacggctggcgaaagggggcggctatggccgcatgcttggccttcgacttgagcaccagacccagatcgtttgcccaaaagatgcgttgcggagactcccagttccagatgccatcgtatttggctatctcatcggcgatgtcgttcttcttggcctgcgacagtacccatctctttcgggatgcctccacgtcgtcgaagtgatccgcaaagtaaaacttttcggcatcgatcaccggactcttgtaggcaaacttctcatcgccatagatggcgccgggctctatctgcacatcctccacagagttttccgactccggggccaaatagccggttttggccgcactcagcagcaacaaaatggcgaagagcattttccaagccattttcacacacttttcgcttgctcgcttactcagagttggaatagataaggattgactgaattgagccttgcgtttttttaatatagcgacgttcgaagaaattaacgatttttaacgattttttgtgaaaagtggttgacttgactgaactgagccttaatgcgtatgactttattgacgccgcttgcttgtttgtataaattttggatttgacttacatagatagcttagtaataggtaatacgattatgatttttaaaatgtagataatattataagcacttcatttatttgaaacggtctaacactaccttctaccgctactacagaaaatgtgagaattgaatctagattcggttacggatgttcctgcggtcttcggatattgggcttacataagcagcctccgctaaggtcaaagcactctttttccatttgccaatctggctgcgtgtgtgtatgtgtgagcgcgccagtgtgtgtgcgtgtgtgtgtgtgtgtgtgtatcgagcataaaagtaggtcagttcgatatttcgccacactcacacacacacggaggcatgaagcatagggtagcgttctcacacacacacagagtggcagtggatgtgccaatatgagcatatatttatgtgtgtctgtttccattcatgacactcgcaaaattctgtttgccgaattaatttttggccattcgctgggtcgatgagtcatgcgaaaaaccgcaaacaagaattgaaataaaaaacaacccgagccggaatttgtgtcaatatgcaaatgacacatgacaaacacatgagcgaaacgcaaaacgttttccttagccaacccaaggtatcgatttggcaatataacacagaatatctgctaccctattaattgttgaacaaaattcgatggcaaggaaaggactaaaaaactaaaaaaaaaaacaaacagaaacagcaaaaaactgaacgaagttagcatgttgttagtcaatgaattttgcatg

SEQ ID NO: 21014 - DNA, 1752 bp, DROSOPHILA
atggcttggaaaatgctcttcgccattttgttgctgctgagtgcggccaaaaccggctatttggccccggagtcggaaaactctgtggaggatgtgcagatagagcccggcgccatctatggcgatgagaagtttgcctacaagagtccggtgatcgatgccgaaaagttttactttgcggatcacttcgacgacgtggaggcatcccgaaagagatgggtactgtcgcaggccaagaagaacgacatcgccgatgagatagccaaatacgatggcatctggaactgggagtctccgcaacgcatcttttgggcaaacgatctgggtctggtgctcaagtcgaaggccaagcatgcggccatagccgccccctttcgccagccgttcgatttcaagtcgaacaagccgctggtggtgcagtacgagcttacgttgcaggagggtcaggactgtggcggctcgtatctgaagcttttgtccgccggaaaaggcacggagcaactaaatcgcttcaatgacaagacaccctataccatcatgtttggtccggacaagtgcggcaacaatttgaaaatgcactttatattccggcacgtcaatccattaaatggcaacatcaccgaaaagcactgcaaaaagccaaatgcccgtttgggagtgccattcacggacaagctaccccatctctaccagctggtggtccgtcccgataacagctttgagattcgcttagaccacaagatcatcaaagagggttccctgctgaccgactttgtgccaccagtcaacccaccggcggagatagatgaccccaatgaccacaagccagaatcgtgggatgagcggaagaagatcccagaccccaatgcccacaagcccgaggattgggacgaggatgctccaccacatctgcccgataccgatgccgtcatgccaaatggctggctagaggatgagcccgacatgattttcgatccaactgccatcgaacccgaagattggaattccgaaatcgatggcgagtgggaggctcctctggtggagaacccagtgtgcaagaaggcccccggctgtggcaagtggaaggctccgctcatccccaatcccaactacaagggcaagtggagtgcaccaatgatcgagaaccccaacaaccagggcaagtgggctcccaggaagatagccaatccagacttctttgaggatctgaagcccttccaaatgacgccaatcaacgctgtgggtctggagctgtggtccatgtccagcgatattctcttcgataacctgatcatcacggacgatgtggagttggcccgtgactttgctgccaacagcttcgacatcaagcgtctctacatcgatcgtgaatcattcgggaataaggtagtcgagctagctagggccaatcgagcgatctggggcattgtcatagtggccattgcggtgccggttgccattaccatcttctgtaaatttggtttaggcccgagtagggttgcggctgccaaaaaagctgctgctgccgcggccaagaagaccgacgatcctcagcccgatgatgacctgggggccgaggaggagaccgacgaaagggccgctggtgataccaacaaggaaagcacaccgctgtccgctagtcccaagaagaaccaaaagtcttatttagataataacgaagatgaggaagacacattaaagaacaaggaacctaccccaaaaaaaaggaagcgtaaagcactcaaggagtaa

SEQ ID NO: 21015 - protein, 583 aa, DROSOPHILA
MAWKMLFAILLLLSAAKTGYLAPESENSVEDVQIEPGAIYGDEKFAYKSPVIDAEKFYFADHFDDVEASRKRWVLSQAKKNDIADEIAKYDGIWNWESPQRIFWANDLGLVLKSKAKHAAIAAPFRQPFDFKSNKPLVVQYELTLQEGQDCGGSYLKLLSAGKGTEQLNRFNDKTPYTIMFGPDKCGNNLKMHFIFRHVNPLNGNITEKHCKKPNARLGVPFTDKLPHLYQLVVRPDNSFEIRLDHKIIKEGSLLTDFVPPVNPPAEIDDPNDHKPESWDERKKIPDPNAHKPEDWDEDAPPHLPDTDAVMPNGWLEDEPDMIFDPTAIEPEDWNSEIDGEWEAPLVENPVCKKAPGCGKWKAPLIPNPNYKGKWSAPMIENPNNQGKWAPRKIANPDFFEDLKPFQMTPINAVGLELWSMSSDILFDNLIITDDVELARDFAANSFDIKRLYIDRESFGNKVVELARANRAIWGIVIVAIAVPVAITIFCKFGLGPSRVAAAKKAAAAAAKKTDDPQPDDDLGAEEETDERAAGDTNKESTPLSASPKKNQKSYLDNNEDEEDTLKNKEPTPKKRKRKALKE

SEQ ID NO: 21016 - DNA, 4585 bp, DROSOPHILA
atgctagttagtaatttggaagtcttttcttttcgcatccgaaaaagctgagtaacctgatgcgagatacttgattatttggtctactttgtttgtataccctagttggctactacatttgcgactcaatatcagtatatttatagttgatcattatcaacaggcacgtcattctgtccgcccgtcggtcctttccgaaaagttcgttaaaaggaatgtaacaggcagaaggaagcgtttccgaccatataaagtatatatattcttgatcagtttcaatcgccgagtcgatctggacatgtccatctgtccgtatgaacttcgagatctcaagaacttgtattagtcttgtaaatttttatcgatttgcaaaaaaaaaaaaaaaaaaaaaatacggtagcttgtcgaacgagtgtgccgaccacatatttggtttcataatggcaaatctagttgaattggttcagtattttaagacaatatgaagctaactaacataatgtaatttcttatgtgatcatcgtattttatagtacatggtcaactggacgcagtattggtgacggttggcctgatccctcatctgataacgagaataaagactggtctgttgctcagccaacttcagcagcaactgcttacactgatctggtccaagagtttgagccaggcaagccatggaaggtaaaactgttaatttacataaaatgtaaacatatccaagcagaagtttgattttaagggttcacagatcaaaagcatagaagatgatcccagcattacaccaggaagcgttgctagatctccattgtctattaattcgacgccaaaagatgctgacatatttgccaataccggtaaaaattcaccgactgatttaccgccactaagtttatcgtcgtctacatggagttttaatccaaaccaaaattatccgaggtaatattcaaatgtgaaaatatatatcccaaatatcagaatcgattatatttcaatacagtcacagttggtctgacaatagtcaacaatgtaccgccacttcggagctttggacaagcccgctaaataaatcatcgtctcgaggtcccccgccaggattgactgccaattcaaataaatctgcaaatagtaatgcgtcaacgccaacaactattaccggaggtgcgaatggatggttacagcctcgaagtggcggtgttcaaaccacaaacactaattggacaggtggtaacaccacttggggctccagttggttgcttttgaaaaatctaacagcacaggtatgttcaaaatctaaatttttctcaccatacacagttactaatgtatccaattactatttcaattagtcgtacatttaaatttttttttatattattattgtttctatcgatataccagaaaaatattggaaaaatgttgagtaatagctggcagcttttgtggggctcccgcaggacgaacttcggatgatgcgttcgggtgcattctctttaacgacaaatttcaaacctctactcaacccacaacacctatcacccgtatctttatcttgcttttgttaaataagcctcaaaaactaaatggaagttatcgatgactttaataactttatattgaaagtttggctatcagaacagcatcatgagcaccaacatgcaacttaataattggaaaaaagaagtttgtgacaagggaataagaacttcagtcaagtatactttataacaagctcacacaatcctttcacacatcccttggaggaagactttttctaaacattaaaaaagtaacccaaaagaccagtacaatagaatcagtacagtagaccaaataataaacatatgtatggatctcaatattcccttttcgttgcatagtaggcaacgaaacactccgataaattagtgttaaaaaacaccacttatatattatccaaacttcaactccagcgccaggcacatcaaccactcaaatgcccacttaatagaagaatgcctccctaccacatgaccactttactaaaggtcctttcctttttataactacgacaaaaacctttcgcaaaaacctttaacataaaaaaaacaataactttctgacaaaccgaaaaaaaataaaattgttatctctcatctaatgtaaaatcattgtcaccttggtcgagagaaagcccttggcagcttatttgtttacttataatttccaacttttagttcgttttataaaaataatgtgagtacaaaaaatatatatagacaacaatttgtttcattgagtacctatatacttatcaacatggtaggaaactatgcaaagaaggcaatgttatcccgaaacttgtggagtaaatgggcatacaaaattcgttgaaagatgtatgaggtcgaaatctttctaatctttaactaaatattaataaattaaaatgtagaaacatccgtagtgtttatttcaagatctataaattttatattttgtaatgaattcttcaatgactagtatagttgcattagcattattattattttttcatgtaattactttttttcagattgatggtcctactttgcgtacactgtgtatgcagcatgggccccttgtcagctttcacccgtatttgaaccaaggaattgccttatgtaaatatactactcgtgaggaggcgaacaaggcgcaaatggcgttaaacaactgtgtcctcgccaacaccacaatatttgctgaatctcccagcgagaacgaggtgcaaagcattatgcagcacttaccacaaactccttcctctacaagctctagtggaactagtggtggcaacgtcggaggcgtcggcacttcagccaataatgcaaacagtggttctgcagcttgtctgtccggaaacaatagcggcaacggaaacggcagcgcgagcggcgccggcagcggcaacaatggcaacagtagctgcaacaacagtgccgccggggggggcagcagcagcaacaacacgattaccactgtagcaaattcgaatcttgttggttctagtggctctgtctcaaattcctctggcgttactgctaactctagtactgtttctgtagttagttgtacagcgagtgggaattccataaatggggcaggtactgcaaacagttctggttcaaagagtagtgcaaacaatttagctagcggccagtctagcgcttctaacttaactaatagcaccaattcaacatggcgacaaactagccaaaaccaagctcttcaaagtcaaagcaggccatcaggcagagaagctgactttgattatatatctctcgtttattccattgttgatgattaaaagatcaattaccagttccattggtcattggccattgactatcgcattctgtgactcaagacacacacacccaaaagcttcaaattatatgatactaagtatgtatgaaaagcaagaccatgttgtgaggaatacaaaagtggatcgactgatagacgaatggacttagaattttgtatgcctgtagatttatttttcttcatcgttcatagatataacttcgatatgtaagtttaaatttaaccaatataaaaaaacatccaacatacatatgtatgtatatgtcaaaaaaaaaaaaaaaaaaaaaaatggcatgcttgatggtttgcaaaccttcctatttaagtaaagtgttttgactctggctcccaaagctttccttgggaaacgggaaaaattctctacagtgtatatgtgcgcatgcaaactcatttggtaaattacacattaataaatatgtattacaacaactatacatatgtttatggaaaataaaaattttcagtaacgactgaagtcgagtgtcggtagcattaagggacaaagtcgtctaatgttattatctaatttgcagcctgtattgtccaagatacaatatgtaatagatgcagtgtatatcttttgtgtacatagatatatgttagggcgacgtcctatttttctgcttgtgcatatcgatcaaatgcctacttttcctgagtgtttttgtgtttccagtaaggaaaaaatacctgtgttatattcattagaggaagttgtaatcgtattacggttttgctttcatcaaagcattcccaccgaaaaagttcggctatacattataaaatcacaataaaaatatctaagaagttatttgttgcctttaaatattgagctattattattctgcttgggaatgaataccattaatagatatcatgtctgtttagtaaaaccaagtgatttaaaaagaacgtgtatctgaatttattacatagatgagagagacaccaatatacgaaaataaatacggaacaattcgtacataatttgtatttagatacataagtcaaatgctaagtcaaatgcaatgcttcagtatcagtggtatattcctaaaatggatcactattgtagaagatcaagcgatattcggccgtctgcctgccaatgcgtcgagatctgaagaactatatgaaatagagatgtaataaaccaaacaaactatatttgcaatatccttacagaggtatattaatttcaagaaatgcaggagta

SEQ ID NO: 21017 - DNA, 1311 bp, DROSOPHILA
tcacagttggtctgacaatagtcaacaatgtaccgccacttcggagctttggacaagcccgctaaataaatcatcgtctcgaggtcccccgccaggattgactgccaattcaaataaatctgcaaatagtaatgcgtcaacgccaacaactattaccggaggtgcgaatggatggttacagcctcgaagtggcggtgttcaaaccacaaacactaattggacaggtggtaacaccacttggggctccagttggttgcttttgaaaaatctaacagcacagattgatggtcctactttgcgtacactgtgtatgcagcatgggccccttgtcagctttcacccgtatttgaaccaaggaattgccttatgtaaatatactactcgtgaggaggcgaacaaggcgcaaatggcgttaaacaactgtgtcctcgccaacaccacaatatttgctgaatctcccagcgagaacgaggtgcaaagcattatgcagcacttaccacaaactccttcctctacaagctctagtggaactagtggtggcaacgtcggaggcgtcggcacttcagccaataatgcaaacagtggttctgcagcttgtctgtccggaaacaatagcggcaacggaaacggcagcgcgagcggcgccggcagcggcaacaatggcaacagtagctgcaacaacagtgccgccggggggggcagcagcagcaacaacacgattaccactgtagcaaattcgaatcttgttggttctagtggctctgtctcaaattcctctggcgttactgctaactctagtactgtttctgtagttagttgtacagcgagtgggaattccataaatggggcaggtactgcaaacagttctggttcaaagagtagtgcaaacaatttagctagcggccagtctagcgcttctaacttaactaatagcaccaattcaacatggcgacaaactagccaaaaccaagctcttcaaagtcaaagcaggccatcaggcagagaagctgactttgattatatatctctcgtttattccattgttgatgattaaaagatcaattaccagttccattggtcattggccattgactatcgcattctgtgactcaagacacacacacccaaaagcttcaaattatatgatactaagtatgtatgaaaagcaagaccatgttgtgaggaatacaaaagtggatcgactgatagacgaatggacttagaattttgtatgcctgtagatttatttttcttcatcgttcatagatataacttcgatatgtaagtttaaatttaaccaatataaaaaaa

SEQ ID NO: 21018 - protein, 247 aa, DROSOPHILA
MQHGPLVSFHPYLNQGIALCKYTTREEANKAQMALNNCVLANTTIFAESPSENEVQSIMQHLPQTPSSTSSSGTSGGNVGGVGTSANNANSGSAACLSGNNSGNGNGSASGAGSGNNGNSSCNNSAAGGGSSSNNTITTVANSNLVGSSGSVSNSSGVTANSSTVSVVSCTASGNSINGAGTANSSGSKSSANNLASGQSSASNLTNSTNSTWRQTSQNQALQSQSRPSGREADFDYISLVYSIVDD

SEQ ID NO: 21019 - DNA, 2335 bp, DROSOPHILA
gtcggttctcggagggatttcgattttcgatttgtatgcccaaacgcgactggatggactagcgaggcaaatttacagttggaatgagtaatttgaatgaatctgagttggagattattattgggacgcaagtggtggctctatgatcgagttatcgagtagttatcgaacgatcgaatattgcaaagttactcacgacagaaacgagtacggatatgagcatatacatcgatatatatatatatgtatatatattatatataaatagttagtagactgaagtttggtatgtatgcagtttgatgcgatagcggtgtcatatcatacaagagcggatgcactcaacagatctcggttcccaatggactagccatcgccgagtgtttgtaccactacttaaatgcatcgtgatatcaaggttctcttactggaaatggctttagctacctaggaactttactttactcgacatcgttaccttcgcctgcgtcataaagggtcataaagattgattagacagttacatatagttatagtacataggtttgcatatcgattgcactttggtttgttgctgtttttcgatttcttttcgtttgtcttttgttgaaatcatagtggaaagaaattcaagtttgacctaaatacacatctgcataaatatcgaaaaagttacatatatatagttttgtataatatatccgtttaaatatagtttggtaagtcgattatatagcacataggtatatagatgtttatatacttatatgactagtacagcgtataataatattagttataacagattcgtaaaaaagaagacagaactgaaaacgaaaaatcaaccgaaatatgtttcgaaaatcaaagttatctaagggaagggaatcaaatcaagtgtctttgggacttgggcgttacacttatagtatgtatgtggtcagataaattcgatatatgggtatgcatatagggtgactgactggctgggcgtacttactcagtggactcaaccgtgggcgttgtcggcattatcatcaggatgcagttgacgagaattgtggtgatgatgaatagggaaaataatggatgcactagaatgtaaatggccacacgacgtatcggattgaatggatcgagcatccacattgcttttgatgcagaaaagcgaaaaatatcttttcctttgcttacaactacgaatgtgctaaagctattactacgaagtccagccaattccatgcatctctaagatacgtaaacgggcataaaatgaaacctcgtgccatcactttaacagctgattcaaatgtgtagattccggtgaatatcaccctaaaaacgaattgaatttcgaaatgcaatttgttgttgtcttcttggcttttatgcacttcaaatgtagcttgaaatgttgattttttatttttattttttttttttttggttagactgccttagatgatgggtcatcaacacaattaatgaaaaaaaatacgtgaagaacagacacacaaaaactaaaaccaattgttaaaggttgaccaagaaaatagatgtttaactgttacacagaaatcgaaaatcaaatattgattaagagttagttgcattgagtggtgaaagaattgcgcttaaatttaggctacacttcttatggctcccaatttcggtacgctccacaattccatccaacgttgttttaccatttgcatttcggattgtcgtagtgttccaaggatatacgtactcgttaaaactaacttaaatgattagcctaacctttggcatcgggttgtgtgaatgatgccacaaccttaaccagatagtaactgaatttgagattcataaattgcctttccatttgtcccagatttatgtactgtaccacaacagtcacgtcaactcaactggcactctcacacacatcaagagaatataacgatatctaaagatatattcatgcattttcacaaaactttgttaacttagtaaattcacttagaaatggcttaaaacaattcctgccttacttgaagaatttagtaaactcacttaaattgaatgtgctagctactcaaaccaaagcgaaaactacctaattgagttcctggaagtatacttaacgattgaaattaacccattatattccataatcacagcaacatttcttgggtgcacaggtactgaaagaaatgctttgcattccacatcaaaaggatacttggcaagtgctcgagcgtcctaattactgaattgcagatgcagatagacaattgtcaatgtcaataatggttaatacttaaccaccaaccgcttgacgctgcctttgtct

SEQ ID NO: 21020 - DNA, 6527 bp, DROSOPHILA
gcatcgtgctaagcggcgggcgctaatcgaacatggcgcctcggatatagttgtagctttaatgtagcaggcgacatccatgtgcctcatgccttggaaatctaaggctctcatcgttggccgcatagacaatgacagaagattccgactcgatatctgaggaagaacgcagtttgttccgtccctttacccgcgaatcattggtgcaaatcgaacaacgcattgccgctgaacatgaaaagcagaaggagctggaaagaaagagagccgagggagaggtgttaatctattgttgcccaaaccattctgtgcagatccgatatgatgacgaggacgaggatgaaggtccacaaccggatcctacacttgaacagggtgtgccaatacctgttcgattgcagggcagcttcccgccggaattggcctccactcctctcgaggatatcgatccctactacagcaatgtactgacattcgtagttgtaagcaaaggaaaagatatttttcgcttttctgcatcaaaagcaatgtggatgctcgatccattcaatccgatacgtcgtgtggccatttacattctagtgcatccattattttccctattcatcatcaccacaattctcgtcaactgcatcctgatgataatgccgacaacgcccacggttgagtccactgaggtgatattcaccggaatctacacatttgaatcagctgttaaagtgatggcacgaggtttcattttatgcccgtttacgtatcttagagatgcatggaattggctggacttcgtagtaatagctttagcttatgtgaccatgggtatagatttaggtaatctagcagccctgcgaacgtttagggtgctgcgagcgcttaaaaccgtagccattgtgccaggcttgaagaccatcgtcggcgccgtcatcgaatcggtgaagaatctgcgcgatgtgattatcctgaccatgttctccctgtcggtgttcgcgttgatgggcctacagatctatatgggcgtgctcacgcagaagtgcatcaagaagttcccgctggacggttcctggggcaatctgaccgacgagaactgggactatcacaatcgcaatagctccaattggtattccgaggacgagggcatctcatttccgttatgcggcaatatatccggtgcggggcaatgcgacgacgattacgtgtgcctgcaggggtttggtccgaatccgaattatggctacaccagcttcgattcgttcggatgggctttcctgtccgccttccggctgatgacacaggacttctgggaggatctgtaccagctggtgttgcgcgccgccggaccatggcacatgctgttctttatagtcatcatcttcctaggttcattctatcttgtgaatttgattttggccattgttgccatgtcgtatgacgaattgcaaaagaaggccgaagaagaagaggctgccgaagaggaggcgatacgtgaagcggaagaagctgccgccgccaaagcggccaagctggaggagcgggccaatgcgcaggctcaggcagcagcggatgcggctgccgccgaagaggctgcactgcatccggaaatggccaagagtccgacgtattcttgcatcagctatgagctatttgttggcggcgagaagggcaacgatgacaacaacaaagagaagatgtccattcggagcgtcgaggtggagtcggagtcggtgagcgttatacaaagacaaccagcacctaccacagcacaccaagctaccaaagttcgtaaagtgagcacgacatccttatccttacctggttcaccgtttaacatacgcaggggatcacgtagttctcacaagtacacgatacggaacggacgtggccgctttggtatacccggtagcgatcgtaagccattggtattgtcaacatatcaggatgcccagcagcacttgccctatgccgacgactcgaatgccgtcaccccgatgtccgaagagaatggggccatcatagtgcccgtgtactatggcaatctaggctcccgacactcatcgtatacctcgcatcagtcccgaatatcgtatacctcacatggcgatctactcggcggcatggccgtcatgggcgtcagcacaatgaccaaggagagcaaattgcgcaaccggaacacacgcaatcaatcagtgggcgccaccaatggcggcaccacctgtctggacaccaatcacaagctcgatcatcgcgactacgaaattggcctggagtgcacggacgaagctggcaagattaaacatcatgacaatccttttatcgagcccgtccagacacaaacggtggttgatatgaaagatgtgatggtcctgaatgacatcatcgaacaggccgctggtcggcacagtcgggcaagcgatcgcggtgtctccgtttactatttcccaacagaggacgatgacgaggatgggccgacgttcaaagacaaggcactcgaagtgatcctcaaaggcatcgatgtgttttgtgtgtgggactgttgctgggtttggttgaaatttcaggagtgggtatcgctcatcgtcttcgatcccttcgtcgagctcttcatcacgctgtgcattgtggtcaacacgatgttcatggcaatggatcaccacgatatgaacaaggagatggaacgcgtgctcaagagtggcaactatttcttcaccgccacctttgccatcgaggccaccatgaagctaatggccatgagccccaagtactatttccaggagggctggaacatcttcgacttcattatcgtggccctatcgctattggaactgggactcgagggtgtccagggtctgtccgtattgcgttcctttcgattgctgcgtgtattcaaactggccaagtcttggcccacacttaatttactcatttcgattatgggacgcaccatgggcgctttgggtaatctgacatttgtactttgcattatcatcttcatctttgcggtgatgggaatgcaactgttcggaaagaattatcatgatcacaaggaccgctttccggatggcgacctgccgcgctggaacttcaccgactttatgcacagcttcatgatcgtgttccgggtgctctgcggagaatggatcgagtccatgtgggactgcatgtacgtgggcgatgtctcgtgcattcccttcttcttggccaccgttgtcatcggcaatcttgtggtacttaaccttttcttagccttgcttttgtccaattttggctcatctagcttatcagcgccgactgccgataacgatacgaataaaatagccgaggccttcaatcgaattggccgatttaaaagttgggttaagcgtaatattgctgattgtttcaagttaatacgtaacaaattgacaaatcaaataagtgatcaaccatcaggtgagaggaccaaccagatcagttggatttggagcgaaggcaaaggcgtttgtcgttgtatatctgcagagcatggtgacaacgaactggagctgggccacgacgagatcctcgccgacggcctcatcaagaaggggatcaaggagcagacgcaactggaggtggccatcggggatggcatggaattcacgatacacggcgacatgaagaacaacaagccgaagaaatccaaatatctaaataacgcaacggacgacgacactgccagcattaactcatatggtagccataagaatcgaccattcaaggacgagagccacaagggcagcgccgagacgatggagggcgaggagaagcgcgacgccagcaaggaggatttaggtctcgacgaggaactggacgaggagggcgaatgcgaggagggcccgctcgacggtgatatcattattcatgcacacgacgaggatatactcgatgaatatccagctgattgctgccccgattcgtactataagaaatttccgatcttagccggtgacgatgactcgccgttctggcaaggatggggcaatttacgactgaaaacttttcaattaattgaaaataaatattttgaaacagctgttatcactatgattttaatgagtagcttagctttggcattagaagatgtacatctgccacaaagacccatactgcaggatattttatactatatggacagaatatttacggttatattcttcttggaaatgttaatcaagtggttggcgctcggcttcaaagtgtacttcaccaacgcgtggtgttggctcgatttcgtgattgtcatggtatcgcttatcaacttcgttgcttcacttgttggagctggtggtattcaagccttcaagactatgcgaacgttaagagcactgagaccactacgtgccatgtcccgtatgcagggcatgagggtcgtcgttaatgcgctggtacaagctataccgtccatcttcaatgtgctattggtgtgtctaatattttggctaatttttgccataatgggtgtacagctttttgctggaaaatattttaagtgcgaggacatgaatggcacgaagctcagccacgagatcataccaaatcgcaatgcctgcgagagcgagaactacacgtgggtgaattcagcaatgaatttcgatcatgtaggtaacgcgtatctgtgccttttccaagtggccaccttcaaaggctggatacaaatcatgaacgatgctatcgattcacgagaggtggacaagcaaccaattcgtgaaacgaacatctacatgtatttatatttcgtattcttcatcatatttggatcatttttcacactcaatctgttcattggtgttatcattgataattttaatgagcaaaagaaaaaagcaggtggatcattagaaatgttcatgacagaagatcagaaaaagtactataatgctatgaaaaagatgggctctaaaaaaccattaaaagccattccaagaccaaggtggcgaccacaagcaatagtctttgaaatagtaaccgataagaaattcgatataatcattatgttattcattggtctgaacatgttcaccatgaccctcgatcgttacgatgcgtcggacacgtataacgcggtcctagactatctcaatgcgatattcgtagttattttcagttccgaatgtctattaaaaatattcgctttacgatatcactattttattgagccatggaatttatttgatgtagtagttgtcattttatccatcttaggtcttgtacttagcgatattatcgagaagtacttcgtgtcgccgaccctgctccgagtggtgcgtgtggcgaaagtgggccgtgtccttcgactggtgaagggagccaagggcattcggacactgctcttcgcgttggccatgtcgctgccggccctgttcaacatctgcctgctgctgttcctggtcatgttcatctttgccattttcggcatgtcgttcttcatgcacgtgaaggagaagagcggcatcaacgacgtctacaacttcaagacctttggccagagcatgatcctgctctttcagatgtcgacgtcagccggttgggatggtgtactggacgccattatcaatgaggaagcatgcgatccacccgacaacgacaaaggctatccgggcaattgtggttcagcgaccgttggaataacgtttctcctctcatacctagttataagctttttgatagttattaatatgtacattgctgtcattctcgagaactatagtcaggccaccgaggacgtgcaagagggtctaaccgacgacgactacgacatgtactatgagatctggcagcaattcgatccggagggcacccagtacatacgctatgatcagctgtccgaattcctggacgtactggagcccccgctgcagatccacaaaccgaacaagtacaagatcatatcgatggacatacccatctgtcgcggtgacctcatgtactgcgtcgacatcctcgacgcccttacgaaagacttctttgcgcggaagggcaatccgatagaggagacgggtgagattggtgagatagcggcccgcccggatacggagggctacgagcccgtctcatcaacgctgtggcgtcagcgtgaggagtactgcgcccggctaatccagcacgcctggcgaaagcacaaggcgcgcggcgagggaggtgggtcctttgagccggatacggatcatggcgatggcggtgatccggatgccggggacccggcgcccgatgaagcaacggacggcgatgcgcccgctggtggagatggtagtgttaacggtactgcagaaggagctgccgatgccgatgagagtaatgtaaatagtccgggtgaggatgcagcggcggcggcagcagcagcagcagcagcggcggcggcgggcacgacgacggcgggaagtcccggagcgggtagcgccgggcgacagaccgccgttctcgtggagagcgacgggttcgtgacgaagaacggccacaaggtggtcatccactcgcgatcgccgagcatcacgtcgcgcacggcggatgtctga

SEQ ID NO: 21021 - protein, 2131 aa, DROSOPHILA
MTEDSDSISEEERSLFRPFTRESLVQIEQRIAAEHEKQKELERKRAEGEVLIYCCPNHSVQIRYDDEDEDEGPQPDPTLEQGVPIPVRLQGSFPPELASTPLEDIDPYYSNVLTFVVVSKGKDIFRFSASKAMWMLDPFNPIRRVAIYILVHPLFSLFIITTILVNCILMIMPTTPTVESTEVIFTGIYTFESAVKVMARGFILCPFTYLRDAWNWLDFVVIALAYVTMGIDLGNLAALRTFRVLRALKTVAIVPGLKTIVGAVIESVKNLRDVIILTMFSLSVFALMGLQIYMGVLTQKCIKKFPLDGSWGNLTDENWDYHNRNSSNWYSEDEGISFPLCGNISGAGQCDDDYVCLQGFGPNPNYGYTSFDSFGWAFLSAFRLMTQDFWEDLYQLVLRAAGPWHMLFFIVIIFLGSFYLVNLILAIVAMSYDELQKKAEEEEAAEEEAIREAEEAAAAKAAKLEERANAQAQAAADAAAAEEAALHPEMAKSPTYSCISYELFVGGEKGNDDNNKEKMSIRSVEVESESVSVIQRQPAPTTAHQATKVRKVSTTSLSLPGSPFNIRRGSRSSHKYTIRNGRGRFGIPGSDRKPLVLSTYQDAQQHLPYADDSNAVTPMSEENGAIIVPVYYGNLGSRHSSYTSHQSRISYTSHGDLLGGMAVMGVSTMTKESKLRNRNTRNQSVGATNGGTTCLDTNHKLDHRDYEIGLECTDEAGKIKHHDNPFIEPVQTQTVVDMKDVMVLNDIIEQAAGRHSRASDRGVSVYYFPTEDDDEDGPTFKDKALEVILKGIDVFCVWDCCWVWLKFQEWVSLIVFDPFVELFITLCIVVNTMFMAMDHHDMNKEMERVLKSGNYFFTATFAIEATMKLMAMSPKYYFQEGWNIFDFIIVALSLLELGLEGVQGLSVLRSFRLLRVFKLAKSWPTLNLLISIMGRTMGALGNLTFVLCIIIFIFAVMGMQLFGKNYHDHKDRFPDGDLPRWNFTDFMHSFMIVFRVLCGEWIESMWDCMYVGDVSCIPFFLATVVIGNLVVLNLFLALLLSNFGSSSLSAPTADNDTNKIAEAFNRIGRFKSWVKRNIADCFKLIRNKLTNQISDQPSGERTNQISWIWSEGKGVCRCISAEHGDNELELGHDEILADGLIKKGIKEQTQLEVAIGDGMEFTIHGDMKNNKPKKSKYLNNATDDDTASINSYGSHKNRPFKDESHKGSAETMEGEEKRDASKEDLGLDEELDEEGECEEGPLDGDIIIHAHDEDILDEYPADCCPDSYYKKFPILAGDDDSPFWQGWGNLRLKTFQLIENKYFETAVITMILMSSLALALEDVHLPQRPILQDILYYMDRIFTVIFFLEMLIKWLALGFKVYFTNAWCWLDFVIVMVSLINFVASLVGAGGIQAFKTMRTLRALRPLRAMSRMQGMRVVVNALVQAIPSIFNVLLVCLIFWLIFAIMGVQLFAGKYFKCEDMNGTKLSHEIIPNRNACESENYTWVNSAMNFDHVGNAYLCLFQVATFKGWIQIMNDAIDSREVDKQPIRETNIYMYLYFVFFIIFGSFFTLNLFIGVIIDNFNEQKKKAGGSLEMFMTEDQKKYYNAMKKMGSKKPLKAIPRPRWRPQAIVFEIVTDKKFDIIIMLFIGLNMFTMTLDRYDASDTYNAVLDYLNAIFVVIFSSECLLKIFALRYHYFIEPWNLFDVVVVILSILGLVLSDIIEKYFVSPTLLRVVRVAKVGRVLRLVKGAKGIRTLLFALAMSLPALFNICLLLFLVMFIFAIFGMSFFMHVKEKSGINDVYNFKTFGQSMILLFQMSTSAGWDGVLDAIINEEACDPPDNDKGYPGNCGSATVGITFLLSYLVISFLIVINMYIAVILENYSQATEDVQEGLTDDDYDMYYEIWQQFDPEGTQYIRYDQLSEFLDVLEPPLQIHKPNKYKIISMDIPICRGDLMYCVDILDALTKDFFARKGNPIEETGEIGEIAARPDTEGYEPVSSTLWRQREEYCARLIQHAWRKHKARGEGGGSFEPDTDHGDGGDPDAGDPAPDEATDGDAPAGGDGSVNGTAEGAADADESNVNSPGEDAAAAAAAAAAAAAAGTTTAGSPGAGSAGRQTAVLVESDGFVTKNGHKVVIHSRSPSITSRTADV

SEQ ID NO: 21022 - DNA, 7167 bp, DROSOPHILA
gagaaccaataaaaaaaagcatctttgattacatgtttcttcaattttgccgttgtttatttgttaataaaaaacttaaaatcttgttgtaatacagtacacaatcgtcgggaggaattttcgtttgcgatagcaataacattttcgttcacctacgatctatcaacctttgcgatggatttttataattttgtttttttttttttgggtttattttttttctttagggattggttgaattgaatctcttctggttttttatttttttaacacacgggggggatatgtttcaatagaatttgcttgctgtgttagtacatccaagttatacaatacaatatagttttattggctacgaaaaaaattgtcttaaaactatttaatatatgccattcataatatatatttcgttataaatatcaatacttcgttgtacaccgatagagggggcagggaaacggaacccgttccaaaatccccgcttctgcactgcccagcccgcttttcagatgacagactttaatttttttttttttttggatccgatcctgggatcccacacacacacacacacacactctcattcatgcatctgcacattcacactgaggaacggattgaatactatacacttagatgtcgcactacagtatacattatacattatacataggtttccaaaaaaaaaaaaaatccatataacacatgtacgagcagaaaaagcttagtttcggagcaattccagttttcagaggggggggtggggtacttagtggcattggttgcgggtgttgcggggtcgcgcctgaggaggagtgccagccatttaatggtcaagctgtggcacagccccaccacctgaagctccacctttttgtgtaatgcagcacgccaccaaatgtattcttcttaaaatacgattcacacacaaaaaaaaaatataaaaacaaatttgactaaggaaatcatctagaaatcatcgccatggatcagcagtctggacattagacggaaatcggcgcattcgtggccgccggcgattgctgttgcggctgctgttggtggtgctgatggtgatgatggtggtggtgacccatgtggtgatgacccagatgatggtgctgctcctgatggtggtggctcagggtcagatgatgatgctgctcctgctggtgttgctgctgcagctggtgatggtggttgtattgctggtgctgtgtcttcagcagcatggagcggtacatttcggagaggagactccacatgggcggcgagtccttggccagatccacgggtgatcccgccggcaggaaggcggtgggcggtgcctggctggtggcagcggcagccgctgcggcggcaaacatctgggtctgcagcaggcgcagatgatgatgctcctcgaggtccagaacgggcagtgggagcatttgccgccggctggtcatgtaggcactgtcgctatccgggtccagatccattttgatgctcgtctgtggtggattggcgctagcgctggcggaggaactagaggcggaggaggcggctgccgtggaacaggcggagctggaggcggtgctgtcgtgacgcttacgcttgcccagcaactgatccatggagaaggcatcgctgggcgagcgcttctcacgctccagctcatgctcctgttcgggttcgtgctccttgtcggattccacatcctgttcctgctccttttccgcctcccgctcccgttcctgctcctgctcctgctcctgttcccgatcctgctccgacttgcgacgcttgtgaaggctgaaatccaatggctggtcagctgcccgctcctcatcggcggcaatgctactactgctggccaggctcaagctgcagtgcatctcctcatcctgctcattatcccgttcgtgttcctcctgatcctcgctggaggccgccggactagagctattggcctgcatgtccacgtacacaaagtcgttgtcatcttcgggatcagcatcctgttcattgtccaccgatccagaatcgggatcctgacagccggtggaaagcaggcccaagccatgtagacccgcctgtccgccgaacatgacgtacggatggtgaccatgatgcggcggcggcggtggcagaagtccgggaaaggcaaccggaagtcgtccggcgacagcggccgctgctgcggctgttccgggcgagaaaaccggaaactgctgggcagtgcggccatcgtgcggcgagatcttgcgccggatgtgtggcgaatggagtttgggattcggattggcgctatggcgattcctcgaacgcctcgaactgaacaccatattgcagccctccaccgtgcacttgtgcatctcgcgaagatgcacggccgaaaagtgaatcttaagggcgcccttgtcgcagaaggtcttgaagcaaatggagcactgtactcgtttctttcccgtggctggattgataaactgaccggccagattgatgggcggtgagccccagcgacgaggctttaaggatgaacctgatccagtgcccgatcccgctgccgatcccgatccagagccactggatccgccgggtgagctggccggagaggcggcatttggctgcgggtgtgacggtagatgggagtgcacatgctggtgggaatgtgggccatggcccagcagataagccggtgacatgaacggattcattatgtgctccatgtcgtctgtggtggattttgtttctatggtcgcgctggcgatggcgatggcgatgactggtggtgcctggaaaacaaacaagaaacagaaacgaatcgttaggagtgtcaatcagggagtgtcaatcaggaagtcagtgaatcggtcagtcctaatcgaaaactattgccagggttgcggggcaaatccgattgcgcaactacaactgggaaactggaatcaaccttatcgccgagagtcagcagggcaaattgttgaatggtctgtggtgccggggacatggacattgactcctggacctgggacattgggcagtggtcattgatgcgcaattagagtgcgaaaagtcaagacggtcgaataagtcaaggggagaaaactttattttgggggggggtctcaattaatcagtggattacagcgattagttggtcattgctgtaagatacattctgaaatccagatttaaaagaaagtctttaaggctgccagctgtgtgcttcaaaaaaaaaaaaaccccattgctgttcaaatggctttttcattaattaatattcgatatccttaagatatagattaatatctgaggcgaatgtatatgtacatatgactgcattgccacgccaaaagcactaatctatagcattggaaagcgctctaaagtcatatctcaagtgtattaccgaaattcccaagtgaaagcttccaaggagcttagccaactttgtgcaaatccagctagatttattggtaagacacacactgcttacaataactcagacaagcgaacatttatatcggcgacaccgatggcggcatatctttcatgtcgagccgatagtacagtagaacaactagagttgccatgttttgtattttgaaataatcaaaaggggtatcccagtgactgacgctacatcatttgtttaatctttatcattttggttcctatgcacccaatttctgtcgtagccaaggcccactgtacactaacactggcgcattacttgtgtaagtgcacattgcctcatttactcgagcgaaatcttttacagctttttcggttcttctggccattaaaatcgcctctgacaacgtcgacggcgacgacaacatgcggcgatcagtgtcggacttcgactttggatccgatcggtcggagttaaagccaaaaccaaaaccaaaagcaaagctaaagccagagctagctcattttttttattgtggactccgttcgctaccgtaattgtgagcagtcgacttgacgttaaaaacagaaacaaatcaggggtaaaaaaaaaaaaaaagaagtgaaccgaacccaggggcgtcacaaaactggggacaattgcggtgagatgcggatgacgatggtgatgatcgtgtgtgcgatgtcgtggctggctatctggattcgatctcaaaagtcgaacacacattcgcattcgcttgcccaatgccagctaaaaagttaagccgaaaaccacatacgactatggctcacacatacaggcatacaggtaacacgcacacagttgcaggaagccaggagatggtcgctttttatggggctcattagtaacgatgacaacaatagcattaaaatgagtgtatgtacacacggcgaaaatgcgaaagcgcaagaaaaaaaaaagaagagcaaaaaggggggaaaaaaaacttaattgtcaggtacttggaagtaatcagtttctgactaggtgccgaaaatattgttaccattcaagaaatagagaatgacccaaagatgttgcaataattttctagatcattataagttaactatatcatatgagttgaaggtgcctatacctttttatcttccaagaatcttttaaaaaagagattcaactcaaaaaaaaatatagatcttttaacatttcaatataaaacaattcaagatctaagcatcataacaatcttgcatagcacaataaggcgcaacggaaaacaataacaacctctctattttctctcagtgcacgcggtcgacagatcgaggtgagtatgcatgtacatgggtaattatttttgtcaaacgcttaaaatgtcttaagccaccgatggtgaaagggggggtgatgttgggcagctgggggtaggggaaaaaccaatcacaacttttgatggctctcggacgaaacgttttttgattatcggcagtggcaaaggcagcaaaatgttgaaagtacccaagacaagaaacgacaagattgaagaattccgagagttgggagacgctttagatggtagatggtagatccaagatctgtggagtacggtgtgtggcagttggggatggaagatgccgagatgtgagcaatccggcggctataattgctgttgtagttgctgttaatagtagtacattataataagcaggagtcgatgggcacaaggggcatgcaaggggcatgcgatggtccaaagatgacaacgccgatggtccggacatcaacgagaaaaacagagctcgaaaaccgcagacaaaaatcttaattacaactttgacatttggcgtttcccccgaagacatcacttttttgtcgtcgaagctcacgcagcaaatagacaaaaatgggtttacgaacattggattaacaagctgttttcaatttagcaaagtcaggatattataagaaaatccatagactagaggtaaaagatggcagcacatcaccagagatcccatgaaaatggtaataccatattaatgccactagcagcctatgtgatcctaacaagatcattatttaccacgaaaagaatcctattgttgcgttcctatttcataacacaattcttgaatgggtaatatttttatggcaccaggatttctttttagaaaatactcctctgatctcgaaaaatattcactatgacttcacttgaatttgaattctttgcttgaagtgccgacggcaaatcaactttactcgaactatacataccttttgctaatttagcagcgagttgtagatattttattgtattttggtttattgctgttttttttttttgttttagattttctcactttgtcacaggtttgagatttaaaaaaagggtttctttcgctttgttttgttttgatattttgttgcgtaaaaagttgataaattcagatggtagaattcactgttggagctgtgtgctgttgttgttttcatgcccgtggtgcatttatttttgttgcattttgctgagatattaaaaaagttggtcgttcacagttgacgatgacacacacacacacacacacacgctcgtatgcacgcacacttatgcactgggtcgcgcggcagagagaagagtggactggacgcgaatatgcggatgcgaatatgtgaatatgcggagtggcaaacgaagtagcgacgaagatgcggatgtgcggagagcagggacagcagagatccacttcttcgaatgtcgtgggtgacactgattgtcgatttgtcgtttcaccaacgaatttgtgcggcgactgcgacgccggcagcgcagcgggcagagagcgagcgacaaatgcggcgacaccgacaccgacacaccgactgactgacacaaacacacacgcacacgcggggtgggtgacatttggctctctctcgctcgctctcccgctcgctcttgcgccctctctctttcactctttcgctcttgcacctggaagagtgtgagagagcgcgctattggaattggccttcgtcacattgtcgtcgatgggtcattaggcactcgcccgagtgcgagcgagagatccgcccgcacttgagtccatcccgctcgcccagtcggcaaagcagtgcgaggcaagagtagccaccactctcttactcacgccgcgaaagagcgccgtcccgtgcgtgcgagcggcttggcacgctcgtgcggctatctcgcgcccgctcgcacactgtcgtctgagtggacgaaaccgtttcgttgggttgacacatgcgacatgcgacgtgtgtgtgtgtggtcagtgcggcacacacattcacacgcactgccgccagccaaagagaacgcagcgctcgctctcgccgcttgctggtatgggtgccttgggttcgatggtgtgagtacatggccgggcactatagtgtgacagagcgagagagagggagccggagcacaagagcgcaagagggagagagcaacgagagtgaaatggcaatggccacagtatacagtacacagtacgtaatttgtcgctgctgcgacgtcactttttgtcttgggcttctcctctctgcttctcttcacgaaggttcttttgaaatttttgtcatttgatgtcttgtccactcggtgctgtgccctctcgccgtccctatcgcacccgcacgaatggccgcgttgagcggctctctttgttttgcgattgcgctgtgcatctgtatgggtgtgtgtgtgggtgcgaatg

SEQ ID NO: 21023 - DNA, 2261 bp, DROSOPHILA
cgacattcgaagaagtggatctctgctgtccctgctctccgcacatccgcatcttcgtcgctacttcgtttgccactccgcatattcacatattcgcatccgcatattcgcgtccagtccactcttctctctgccgcgcgacccagtgcataagtgtgcgtgcatacgagcgtgtgtgtgtgtgtgtgtgtgtcatcgtcaactgtgaacgaccaacttttttaatatctcagcaaaatgcaacaaaaataaatgcaccacgggcatgaaaacaacaacagcacacagctccaacagtgaattctaccatctgaatttatcaactttttacgcaacaaaatatcaaaacaaaacaaagcgaaagaaaccctttttttaaatctcaaacctgtgacaaagtgagaaaatctaaaacaaaaaaaaaaaacagcaataaaccaaaatacaataaaatatctacaactcgctgctaaattagcaaaaggcaccaccagtcatcgccatcgccatcgccagcgcgaccatagaaacaaaatccaccacagacgacatggagcacataatgaatccgttcatgtcaccggcttatctgctgggccatggcccacattcccaccagcatgtgcactcccatctaccgtcacacccgcagccaaatgccgcctctccggccagctcacccggcggatccagtggctctggatcgggatcggcagcgggatcgggcactggatcaggttcatccttaaagcctcgtcgctggggctcaccgcccatcaatctggccggtcagtttatcaatccagccacgggaaagaaacgagtacagtgctccatttgcttcaagaccttctgcgacaagggcgcccttaagattcacttttcggccgtgcatcttcgcgagatgcacaagtgcacggtggagggctgcaatatggtgttcagttcgaggcgttcgaggaatcgccatagcgccaatccgaatcccaaactccattcgccacacatccggcgcaagatctcgccgcacgatggccgcactgcccagcagtttccggttttctcgcccggaacagccgcagcagcggccgctgtcgccggacgacttccggttgcctttcccggacttctgccaccgccgccgccgcatcatggtcaccatccgtacgtcatgttcggcggacaggcgggtctacatggcttgggcctgctttccaccggctgtcaggatcccgattctggatcggtggacaatgaacaggatgctgatcccgaagatgacaacgactttgtgtacgtggacatgcaggccaatagctctagtccggcggcctccagcgaggatcaggaggaacacgaacgggataatgagcaggatgaggagatgcactgcagcttgagcctggccagcagtagtagcattgccgccgatgaggagcgggcagctgaccagccattggatttcagccttcacaagcgtcgcaagtcggagcaggatcgggaacaggagcaggagcaggagcaggaacgggagcgggaggcggaaaaggagcaggaacaggatgtggaatccgacaaggagcacgaacccgaacaggagcatgagctggagcgtgagaagcgctcgcccagcgatgccttctccatggatcagttgctgggcaagcgtaagcgtcacgacagcaccgcctccagctccgcctgttccacggcagccgcctcctccgcctctagttcctccgccagcgctagcgccaatccaccacagacgagcatcaaaatggatctggacccggatagcgacagtgcctacatgaccagccggcggcaaatgctcccactgcccgttctggacctcgaggagcatcatcatctgcgcctgctgcagacccagatgtttgccgccgcagcggctgccgctgccaccagccaggcaccgcccaccgccttcctgccggcgggatcacccgtggatctggccaaggactcgccgcccatgtggagtctcctctccgaaatgtaccgctccatgctgctgaagacacagcaccagcaatacaaccaccatcaccagctgcagcagcaacaccagcaggagcagcatcatcatctgaccctgagccaccaccatcaggagcagcaccatcatctgggtcatcaccacatgggtcaccaccaccatcatcaccatcagcaccaccaacagcagccgcaacagcaatcgccggcggccacgaatgcgccgatttccgtctaatgtc

SEQ ID NO: 21024 - protein, 568 aa, DROSOPHILA
MEHIMNPFMSPAYLLGHGPHSHQHVHSHLPSHPQPNAASPASSPGGSSGSGSGSAAGSGTGSGSSLKPRRWGSPPINLAGQFINPATGKKRVQCSICFKTFCDKGALKIHFSAVHLREMHKCTVEGCNMVFSSRRSRNRHSANPNPKLHSPHIRRKISPHDGRTAQQFPVFSPGTAAAAAAVAGRLPVAFPGLLPPPPPHHGHHPYVMFGGQAGLHGLGLLSTGCQDPDSGSVDNEQDADPEDDNDFVYVDMQANSSSPAASSEDQEEHERDNEQDEEMHCSLSLASSSSIAADEERAADQPLDFSLHKRRKSEQDREQEQEQEQEREREAEKEQEQDVESDKEHEPEQEHELEREKRSPSDAFSMDQLLGKRKRHDSTASSSACSTAAASSASSSSASASANPPQTSIKMDLDPDSDSAYMTSRRQMLPLPVLDLEEHHHLRLLQTQMFAAAAAAAATSQAPPTAFLPAGSPVDLAKDSPPMWSLLSEMYRSMLLKTQHQQYNHHHQLQQQHQQEQHHHLTLSHHHQEQHHHLGHHHMGHHHHHHHQHHQQQPQQQSPAATNAPISV

SEQ ID NO: 21025 - DNA, 8075 bp, DROSOPHILA
aatgaatctaaaatgaaaggccaaaaccatatagaagctaatttagagcgcaactatttcacaaatcctcacctggttatgtactcgagggtcacgggatcctcgacattgagacgatggctctggcactccacctgggcacgattgatcatgatgcgagcgtcggccgtgagaccggcaaaagccattacaacgtggttgtcgagcatgcaaatcttgcgcacctttcgatcctcctgcagttgggccaccgacttcttctccacgccaagcacaacgcagttggcgccgcgaactccgacctgcgaggcgaaaaattggaaaagtccatgtttgtttcggtttggcggcactgcgaacggtactaaattgcacttaccgcagtcgatcccttgcgaacggcctcctgggcatactccacctgcaggaggtgaccgtcgggagagaatatggttacagcacgatcgtagcgtgaggacatcttgttgctttattcaatagctgaggtacttgcagaatattaacttatagctttttccttctcgaattcgccaggcaatgatgatgcttttttgaggaaatgccgcagtgtgaccgcagcatgggttcgatgaaaattactaaattaataccgtttcgcagtgaacgatatatcgttgctgaaatcatgtatcagaatcaattcaattcttgttacttcagtctatttaatattctattccatttagtctatttaaatatttaatttaatacttttgtaaaccgttttacagcttcagggctgtaaataatttagtaaaatatcaattaattttttttcacattatctgttattattgttatttaataatacaaatttataatacaaattattttcaatatatatatatatatatgtattaataattataaccaacgactgttacttaaatgtacaaaatgcaatcgctatgccggccctggtaatcggtgttcatcgacagcttgctgcagccctcgtcgtcgctgtaattacaatgtgatgtgcatttgtttttgttaataagaattgtccgattaaacatttagattatctgtttttaaacaatgcgatcacggtgatatcggttcgtaaaggttttacacaccgtgtgattttgtttcagtgcgttttgttgttcgtttcgtaaataagtgggcttcattttgcccaaaaaagacgggagcccagacagctgatcacagactttggctcacacctgctacaaaaagataatatttattcgaaaacctggcattcggatcgaatttagcagctgccagcgtatttatataagaacaatttgattgattatggcgctgcccagaaaactgatatccaagatctgtaagtaaaccgaatgttcgaaagtaccgttgtatattcccacacacacacaagcacgtagaaatacgactgcatgtatatatgtgtgtgtgcgtgcgtgtttgaaatcctatcgtaaattctagtgttgcatgcaacttcagtaacttttaaaacaataccacgcgttcttataaacaatgcagatatccaataggaaaatccccaggtgcacatatgtatgtatgtagatacatatgaacattgagtgcagctgcagctgaattgttcgttttaaagtaattaatatcttgttttacaacgcaatatcaatatcaaataaacatcatacggcttcttcagactttaaaataatatttgtatatagcctttagaaaacttcaattcaatcccaagaactatagaagttcaaaaaggttttaatctgggaacaagttttcaatttctttgaaatgcgtacatttacgtacatatgtatgtacatatatactgtacatatgtatgtatgtacatcgatttcctagctttattttatctgttttgcttttcaaaatactagtaatccttgtcattcataaatgtggataacgtaaaaggtacttatttatttatatcgacacagtttcctttgaaaagattcaaaaatcattataaaattgtatttattgagtatatactaatacgaaaatatcatatttttattattatatatttgttgtaagttttccttttgatcttgaaaagctgttgtttaaagcatagcttaatctgaacatactaactatatcatcatatcatgaaaacttgccgaagaggactaaccaattctcatcctttgcagacgatataaaggcacatgatagcagggtcacgagccttgatcttggcgaaactggacgagtgctggtcaccggaggagaggatcgcaatgtgaacctctgggcgattggtcaaaatgagtgctttatggtgaatatactaactacttcctaaatatatgtatgtactaatcggtgaccctttcctttcagtctctgacgggccacaatcgttccatcgattgcgtgcgttttgcttataaggataactttgtctactccgccgacgacatcggtataatccgaagatgggatctgaattcacagaaaatctactccacgctaaatggccacatgaagagtgttcgcactctggactttaacccgtctggagaatatgtggtgtccgggagcaatgataccaccgtcaggtgagccaaggaccgatatataaatagtcagagtaacccatgagtcattcggaagctctagtttccttatcaagtggcagatttaaagtttattcgttgattgaaaagggatggcgatattctccctccctcttttagctgtgcttaatcctatagaatcgcgtattttgggtttaataatctacacaaaagaaaaatctcatatttagaaattagaaattttatatcggtttaatgcacatacatattagatgcattgtatctatatggtcttttcttagatatcacttgacctatatatgtgtaaaacaaagataatatgactcactacattgcacaaaaggggacaggctgacaaagataatatcactttgtgttgtttagctaaagttgatatttcttttgggatctcatatatcttatctctcagatctattacatccatgatcttaaacaacattgcattttcagttatgtgatgttttattgggagttttataaaagtgttacaaaaaaatacttctaccaccacgggcgtttaaacaattgcatatgtataggcatatttgttatagtgtatgtacaaaaaaaaacggacgcgaaacgaattataaagtcaatgataatccattgcgactaaggcagactatgtgtctctaggtgatccgcgcttacagcttggcctgtgagctcttcaggtcgacataggcgccggatatgacctccttgccggtctccacgaccacggtgcggaagttgatgcgtgtgccctgcttccacaagtccacgcgcaaagtctggcccggaattacgggtccggagaagcgcactttgacagccttgaacagagccgggttgttgtccgcaaactgagcgagcacggcgcgcaccgagaagcccagtgtgcagagtccatggaggatgggtgtcttgaagccggccagcagggccatctggggatcgatatgcagggggttcttgtcgccggacagacggtacagcgccgcctggtcctcgctggtcgtatactggacggttgcgtccggttggcgattgggcgccggctgcagcggaactacaccagcgatgggatccttcttgcctccgaatttgccagcgccgacaatgaaagtggtgctctggttgcgcaccaacaggcggccactttcgtcgaacgactcgctattggtgacgaccacggcgccggatcccttgtccataacatcgaagaccttgccgttggtcagcaaagtgccactggtgggcagatcgtcaacgatctctaggtactgttcgccgtgcagaatgttgctgaagtccacttggctgttgggcaaagccttgctgagcagcttgtcggtggacatttgcagcagaaggccgggcagaacgaagaaagttggaatggcggcgaaatcggcatcgttttcgtacaggaagcgcatgtccttcgcgtttttgacggatgccccaatgcccagggcgtaggtaataagctctttgctattgaactcgaaggcatcctcgatggcgtcgccgccgccttccttgagcttctcaagcacttccagcagggtgccggaggcctctgcgatggcacccaagtgcttggccttggacatgtcggtcacattcgaccacacatccttgacgtactcaatggtcacggggtcgtccagcgaaggacgcagcacagcgcccttgccgcgaaccatgtgcagcttggtggcccagccggcggcactctcgatatagctacctgtggatcggagaagagggagagagaaaacgtttaataaaccctatatatacacacatgtacacatattcctgataaacggtctaagttcaaacgctatcagtatgaatttccctaatcaggcagattatgttgaccatttggattggactactggacatattaaagatgacttagcagtggttggccaaaaattgcataattttgtagttctcaaagggttaaattgatacaaattgatatgataatcaattctgagataatgcaattctcgcataacttcggatcccacttaccattatcctcgcaggactcgtggcacaagtaggccactacgggagcaatcagcttgggcttcagctcgttgaagagaatgtcgggcagaatgccctcggtcattcgactggcggcagttggcacgatgacgttgcaaagaacattgttgcgggctccctcgatggcaaccgtgttggccaatccgatgaggcccatcttggcggcagtgtagttgacctgcccgaaattaccatagatgcccgagttggacgatgtcatgatgatgcggccatagttctgcttcttcatgtacgggaatgccgcctgggtgcacttaaagctgcccttcagatggacatcgttgaccagattccagtcctgttcgctggtcttcaccagactcctgtcgcgtagaatgccggcattgttgaccaggatatcgacgcgtccgaaagctttgatggccgtctcgatgacctttgccccatcgattaccgagttgtagtcggccaccgcctcgccgccggccttacggatctcatccaccacaatgtcggcggcccgctgcgatgctccatcgccggagtgggtgccacccagatcgttgaccaccaccttggcgccacgctccgcgaagagcagtgcgtactcgcggcccaaaccggcaccagctcccgtcaccaccgccacacggccatcgtaacgaagttttccatcggatgaggacatggtctgtctattggtcaatagcaatcgcaatttctggtttcgctgcacaaatccggtctctgcggcaacgctttttcggctgtaaaacacgaatgaaccgatgaaaataaactggttggctaataatcgaacaagaaaggagagtagcactacttttcaatcgtacttaatctcaagcgataatgctatctgccctgccctcgcatatgtgagtgtaactctggactcttcggctgaagaacgttacccaggcgatatggtccaagtccaggggttcacggttcatagtcaagtgcttttcggatggcaccgaaatcgccgaaatccgagatacaagatacatttgcacagtgacgacagcacagttattcgaaccgcgtgaaatggcccacacacacacacattaaacaagggttaacttacagttctcgtagattcgccgtatgatggtatggtatgcccgaatatgcacagattaacccagtatcagtggtacaaagtgcatcactattcgctgccgagataattttgcaatcgtttaatcggttcaacccatgaaaatgcactaaaatatactgcccgcattcatacgtttgtgagcactagaaagtagtgccgtcaaaatgctggaaagcagtgcatcgcggacgtaaacctcggttcggaacttcgctaagccgtagcaaagactccaacccgttttcattttccagacgattaaatttaaaaatgaacaattatggaaattacacttatcttccacatttcaaattcaactatgtctctttatttaacatagaaatgtataaaacaacaataaattgagcaacaataaatgaattaactaggagattacatatattattgaaactttatgaattacatatgctttgttgcttatttagcaaactattaactttcatatgtctgcaatctcaggctttgggacgtgcagaacgaaaacaactgcattaaggtatgtcgcggccacatgtcccacgtgaattccgtaaaattctcgccggatggtctttggattgcctctgctggcctggagggttccatactcatctgggacatacggaagagcaaacagataatggagttcatagccgatccgccggttacggctatcacatgcgtgcaattccatccgtttgagttcctgctggccgccggtcgcgtcgatggcaccgtttccatttacgatctggaacaccagcagctcgtctcgcagaccacgcacttctatggccaggccatcaggtgtataacctttaggtgagtcctgcaaagaataatccgcaatcgtgaattgatttatgaaaagaaatagtaatatagtaattttgccaaaaagtgcataaattctaattatctgcatgttaaactttatttatttcagtgacaatggcgagtgcctttttgttggcagttcttcgggcatttcggtaattggatgggaaccggatcgtgagctggaccatataaaaagcacctggtcctccttggcggacatgaaagtggtcaacaataagttggtaagtgaaagcacttactcattaagcgaagcacccttccaaatctcgtcatccccgttatcttttttgacaaaaataatcagtattttggtcagaatattctaaaaaatggtccaaatatggagtgtcatacctcgttgagtttgtttttttaatccaaatcgatttgcattcaaatttgggaattctaggttttttaaattttttgcaaattttgatgataaaattttgattataaaaaaggcgaaaaattggccaaaaactaattttacaaaatccgtccaaaagtgaaaggggtggttagtattggtaattaggagcacaaaacggtatttcttttggcggtgtggccatttttagtcaagttatacccagaaaaccaatcttaaatattgcattttatgccaaaactggtttcactgattttatgcgaaaaaaataatcggtattttgagcaaaacattaaaaataatggcacaaatatggaatgtcataacttgttgagtttccgaatcaattcgcattcaaatttaggaaatctaggtttttcactttttgaaaaaccaatcttagatcttaaatgtaaaatgtctacaaatggaatatccaataaaaaccattgcacttccttttgtagatctgtggttgtcatgagatcgacaccgtttcaatcaacaccatcagtctggatcgagtgataccattctatcagccgccaaactcactacccaactttaagcacaactcgacgaaccgaaagagctttacacgtggcaaccagaagttcaggctgtcagttggcggtgccaagccggcacaggtgcaggaggagcacgagggcgacaagagtggattgtcctcgcccaactatagtctggaggttgtgaacgaggcggtgctggagtcggcggagacttctccaatgtcctcgttgccacctgtccacttggcttcgatggccggatcgtcggcggacttggcgccgcatcatgtcgtatatggcggagcaatcgattctgccctaaggcagggtaagtactccagagtgcctgataatatggccagctatggcagtagttacggggccatcgatacccgcctgatgtccttgaacgaacccagttcactgcacaagccggacatttacaatctata

SEQ ID NO: 21026 - DNA, 1273 bp, DROSOPHILA
cgtcgctgtaattacaatgtgatgtgcatttgtttttgttaataagaattgtccgattaaacatttagattatctgtttttaaacaatgcgatcacggtgatatcggttcgtaaaggttttacacaccgtgtgattttgtttcagtgcgttttgttgttcgtttcgtaaataagtgggcttcattttgcccaaaaaagacgggagcccagacagctgatcacagactttggctcacacctgctacaaaaagataatatttattcgaaaacctggcattcggatcgaatttagcagctgccagcgtatttatataagaacaatttgattgattatggcgctgcccagaaaactgatatccaagatctacgatataaaggcacatgatagcagggtcacgagccttgatcttggcgaaactggacgagtgctggtcaccggaggagaggatcgcaatgtgaacctctgggcgattggtcaaaatgagtgctttatgtctctgacgggccacaatcgttccatcgattgcgtgcgttttgcttataaggataactttgtctactccgccgacgacatcggtataatccgaagatgggatctgaattcacagaaaatctactccacgctaaatggccacatgaagagtgttcgcactctggactttaacccgtctggagaatatgtggtgtccgggagcaatgataccaccgtcaggctttgggacgtgcagaacgaaaacaactgcattaaggtatgtcgcggccacatgtcccacgtgaattccgtaaaattctcgccggatggtctttggattgcctctgctggcctggagggttccatactcatctgggacatacggaagagcaaacagataatggagttcatagccgatccgccggttacggctatcacatgcgtgcaattccatccgtttgagttcctgctggccgccggtcgcgtcgatggcaccgtttccatttacgatctggaacaccagcagctcgtctcgcagaccacgcacttctatggccaggccatcaggtgtataacctttagtgacaatggcgagtgcctttttgttggcagttcttcgggcatttcggtaattggatgggaaccggatcgtgagctggaccatataaaaagcacctggtcctccttggcggacatgaaagtggtcaacaataagttggtaagtgaaagtattttggtcagaatattctaaaaaatggtccaaatatggagtgtcatacctcgttgagtttgtttttttaa

SEQ ID NO: 21027 - protein, 296 aa, DROSOPHILA
MALPRKLISKIYDIKAHDSRVTSLDLGETGRVLVTGGEDRNVNLWAIGQNECFMSLTGHNRSIDCVRFAYKDNFVYSADDIGIIRRWDLNSQKIYSTLNGHMKSVRTLDFNPSGEYVVSGSNDTTVRLWDVQNENNCIKVCRGHMSHVNSVKFSPDGLWIASAGLEGSILIWDIRKSKQIMEFIADPPVTAITCVQFHPFEFLLAAGRVDGTVSIYDLEHQQLVSQTTHFYGQAIRCITFSDNGECLFVGSSSGISVIGWEPDRELDHIKSTWSSLADMKVVNNKLVSESILVRIF

SEQ ID NO: 21028 - DNA, 5823 bp, DROSOPHILA
tggcgcaggtggaatgcctggcgtgctcgcccctgtcaaaggcacaggcatcggcgagtgccttgagtagctgctcgtcccttgtgttgcgccagccgagccaaccgacctccggctggctgcatcgggccaagatggcacccgacttttggtgccgccagacgacagccggcagccttcgtgatccccggaagttggccacgttgtggagcatctcatcggtgatacagcagggcacaagcaatttgggtggatacgagggacagagcttaaaatcggcattggccgtggagatgcgccacgagcccttcagatcgaatcccaagcgggcaacctcgttcttaaagtcgctttcatagcgcactgatcgttgcaggcgattgctcatggcggctgagatggtctcgctggcaggatcgggcagaggattcgacgctgtgacgttggctgttggctttgccaagccattgtgtagcgttaggcaacgatccttggcaatcaggccgtttccgttggcctgggcgctaacgataccgcttccattgccacttccgagcacatcgcaggtccaggagtagaagggaaaggcgaagagtgtctccagtgactcgggaaccccgatcatcagatggatccggcgctgccagtcggagcactgttccgccgacggaaaggagcagcgcacagtgctggcatccttacaattgacaatcagctggaacagatctcgcacctgtacggattcgattaatcccaatggaacgtaggtctcgtagccggttgactgcttggaaaggaatatccgataattggacagggcgaggataccatcatccgtgcgccccaggtacttaatcgattcgccggccactagtggtatatatactatagattagcatgtgttatcggttacagcatatgggggaacacctacactcttgaaacgggacgaacagctgggagtcttccttctccatttgtgactttggatacgattcggcggcacggataaagcaaatcgatggaggcggtgatccatcggacattgtgtgaatcggctaaaagaatacttaacatgtaacgtattcgaaattacttatttgcttatatttaggcaaggcgatttgggtgtcattggaaatccggttatcgcttataagtgcatatatctcttatatccaccatccgaatacataattacgcacaacagtgtgtgtgcgatgttattgggacgattcgatacgtatagtatagtggctcccataaataaataaataatactatgcacatatgtgcatgtgcattaagcagtgcacaaacaaagccaaataaatgtcactgggatgataaattgggcacaatcaacacttttagaacaaatcgaagttaatatttgagtttttgagtgtcgtggtggcaatatagataatgcactgcatatatatgcacgtatggatgtacaatgtacaatgaacatacatttatgtgagcacacacagttgcagttccacaaggtgcgcaatatatagtatgcacatatttgtgtgtcgctgcattacatacgcacgcacatatataccaatagactagattatcacgatttcatagccaataggcgaaaaatggccgattatcgtactcaacgtattctaatggccgtgtatgttgtcataaacaaagtaattaaacatttacgcatgtgtatgtttgcataaactcatatgtatatttgtctatgtaggtatgtttgtgtttcgatatttcggggagcaacaataacacattacaatcgtacatatgtatgcacacacatttggtttttggattccacaaaccgttcgctcagcagacttttcggggtatttagctcaaaacgtattgccgaattgaaaacgcgcttggcttctagattttctcgctctatttaccaccataaaatccataagcgtcagctattataaacaaagatttgcaaatgttgttgcacatacatatgtatgcatatgtattcatttagacactttttgtttcatttccattgaaattgctatcgttgtttgctgctatcgctgttatcgctgctgttagcgatggccaagtcatgtgactaagctatcgttactcgattgccgatgagatgtgcattcgagactaaccaacactggccagccgataaaatcaaccaaaaatttgtaaaacttaataattgtgcgtacgtttgcattccattccagctgatgtgtaactgaaatcagaaaaaaagagaaccgatcgcttggactctccgccggtgcacgcaattctacgcccactcctcgccagccgcattcgccattcggaagccgaacaagaatgtttggagccagaatcggaatcggaaagcttgggccgtgtgtggccctagttgcggtgagtcgacgtgttccgttctgtctggtcatgttgctggtcactggagtggctcacccgctcgatcagcgggcggggaaacagtggggaggggccggccagacagccccggcttttttttggctccccctaaccaaataactaactaaccagaactgacatcctatggaatttacagattctacagctactccagtacacacagccggccgatgccgccggagccgtgcccatgaccagtgataatatcgatatgaccctaggtgagatatgcccataccataaccatcacagtcatccccatgccattcccgctgccagcgtgagcgggaatcaattagccgacttgtcccattgacgtgtcactaaacaaaatcactggctcgctcaattcggcactgccaacgtggtaaaataagttttatgcgctttcgtaaaggacaaggtgtggaatttggataaaacttaattagggcggtttatatttcatgctgcatcggtccgatagtccgccaaaatgggcactagccattggtcggcagttctttgctcagaatgtccgaagtttggtctttgcatgaataggtcctttttatacggtgtgtcctgtacacaatcctgcggtaatactatattgtttttttaaagttatttttttttattatccaaacgttaacttttacagtaaagcctggccttaggcttgcaccccttaaattttaactttcggaagttatggaatagtaggatgctagaaatttcttgactttaatatgtatattcagcgacaaatttaaatatattccataaaaatacatatgcatttaaattattaatacataaacccgtaattcaatattgatataaatatattaccaaatatatgtttttaaaagttattatatttagtatctgaacggagttgtattctacgcatcaacaattttacacacaatttggtgcctacattaaaaacacgttttgttttcttgcagcgtctaatgaattggttttccttaatttttatgcggagtggtgtcggtttagtaatattttagcacctatattcgcggaagctgcagataaggtgagtcaaatggatcgccagtaaaagcttacaaacaatgcgatacattcatatacattttatatcgaataaatacgtggcattcaatcgaatttctcttacagattaaagaggagtttccagaggctggaaaagtggtgctaggcaaggtcgattgcgacaaggaaacggccatcgcgtcccgtttccacataaacaagtatccaacattgaaaattgtacgcaatgggcagctcagcaagcgcgaataccgaggacagcgttcagccgaagcgttcctcgagttcgtcaagaagcagctggaggatcccattcaggagttcaaatccctgaaggatctggagaacctggactcgaagaagcgcctcattctgggctacttcgatcgtagggaccagccagagtacgacatattccgcaaggtggcgacaaatctgaaggaagactgccagttccacgtgggcttcggagatgccgcccaggccatgcatccaccaggtgaattctatcaaacgcaccaagtcatgccaagccaatactgaatgtcagcttttttggtctattacaggtacacctatcatagtatttagacctgatgtagctctgtctcatgagaacgatgagacctacactggcagcctacaaaatttcgatgagctcaaaatttgggtccaagagaagtgtgtacccctggtgcgggaaataacatttgagaatgcagaggaacttacggaggagggtctgccgttcctaattctcttccaccacccaaccgatcataattctatcaaggattacaagtcgatcattgagcgtcaattgctggatgagaaacgtaagatgaatcatcgtgttgtttactttgcatataagcatttggtttgacattgtattttcgaaattttgcagagaacgtcaactttttgaccgccgatggcaagcgattcgcgcatcctctgcaccatctgggtaaatccgaggatgacttgcccttgattgccatcgactcgttcaagcacatgtatctgttcccccacttcagtgacatgtactcgccgggtaagctgaagcagttccttcaggatctctacagtggcaagctgcacaggtaattgttatacagccgcctttgctaacaccatggggctcaattactaaacggtctgctgctttgctttccagggaatttcattacgggccggatccctcaaatgatattgaacctgacccacacactggcaagggtacatcgccaccagagtccaaattcaaggaacttggcccatccaagcatcgctacaccctgctagaaaaagatgaactgtaatataataataataatgtatattgaaaataaaagaaaataatacaaaaatgtaataatgagcaaccttctctgaaagcagatcagcaggtgagcggttatccatgcaaatagcgggcgcagcagcctcaattctcttcaatgcaattctaaaaataaaaagtctggatttaaccacctttgttattgcaaaaagaaacagttgctgaattatccacaaattgcacgcgtcacttttcaagttttcctcgttttgttgttaaaaattacgctggagatttcggcgaggcgaacttattgaattctttggaatccccttcttagtcagctaagctggaaatgaatgatgtcaacttccgaattcaaagcagtgattttgattttctctatatatatatatatatacacatatatatgagctatatatgtatacatatatatatgtttattcgtatgtaccatgttacagttacagttgttaaattagattacataattatataatataattcagtcaaaacgagcgataaccgtgtgtgtgttgggataaaaatcggttcaaatgaagtcgtgtgctggcaattatcatttaaaagttgctctgactgttaattttaaaagtacatttaaaagcgtactctcgctacaattaataagtaaaagtgaaaaaaataggtgccgcgttcggctggctaccatgcgcttaatatggtctcgagcgcatgcctccatcgtttctcatcggtccaccatcgcggcgattgccgccaccacctccacggccaccgcgtcctccgccattgttgtcattgaagcgggagtagccaccaccaccgccgccgccgcctccgcctccctgcgagttgccaccgcgatctctgttgtgatatccaccgccgccggatccacgatcatttcctcggtcgtagcctcctccgccaccaccgccgccgtagccgccgcctccaccacctccgctagagccctcgtcgtcgcccttggg

SEQ ID NO: 21029 - DNA, 1434 bp, DROSOPHILA
cggcacggataaagcaaatcgatggaggcggtgatccatcggacattgtgtgaatcggctaaaagaatacttaacatctgatgtgtaactgaaatcagaaaaaaagagaaccgatcgcttggactctccgccggtgcacgcaattctacgcccactcctcgccagccgcattcgccattcggaagccgaacaagaatgtttggagccagaatcggaatcggaaagcttgggccgtgtgtggccctagttgcgattctacagctactccagtacacacagccggccgatgccgccggagccgtgcccatgaccagtgataatatcgatatgaccctagcgtctaatgaattggttttccttaatttttatgcggagtggtgtcggtttagtaatattttagcacctatattcgcggaagctgcagataagattaaagaggagtttccagaggctggaaaagtggtgctaggcaaggtcgattgcgacaaggaaacggccatcgcgtcccgtttccacataaacaagtatccaacattgaaaattgtacgcaatgggcagctcagcaagcgcgaataccgaggacagcgttcagccgaagcgttcctcgagttcgtcaagaagcagctggaggatcccattcaggagttcaaatccctgaaggatctggagaacctggactcgaagaagcgcctcattctgggctacttcgatcgtagggaccagccagagtacgacatattccgcaaggtggcgacaaatctgaaggaagactgccagttccacgtgggcttcggagatgccgcccaggccatgcatccaccaggtacacctatcatagtatttagacctgatgtagctctgtctcatgagaacgatgagacctacactggcagcctacaaaatttcgatgagctcaaaatttgggtccaagagaagtgtgtacccctggtgcgggaaataacatttgagaatgcagaggaacttacggaggagggtctgccgttcctaattctcttccaccacccaaccgatcataattctatcaaggattacaagtcgatcattgagcgtcaattgctggatgagaaacagaacgtcaactttttgaccgccgatggcaagcgattcgcgcatcctctgcaccatctgggtaaatccgaggatgacttgcccttgattgccatcgactcgttcaagcacatgtatctgttcccccacttcagtgacatgtactcgccgggtaagctgaagcagttccttcaggatctctacagtggcaagctgcacagggaatttcattacgggccggatccctcaaatgatattgaacctgacccacacactggcaagggtacatcgccaccagagtccaaattcaaggaacttggcccatccaagcatcgctacaccctgctagaaaaagatgaactgtaa

SEQ ID NO: 21030 - protein, 375 aa, DROSOPHILA
MTSDNIDMTLASNELVFLNFYAEWCRFSNILAPIFAEAADKIKEEFPEAGKVVLGKVDCDKETAIASRFHINKYPTLKIVRNGQLSKREYRGQRSAEAFLEFVKKQLEDPIQEFKSLKDLENLDSKKRLILGYFDRRDQPEYDIFRKVATNLKEDCQFHVGFGDAAQAMHPPGTPIIVFRPDVALSHENDETYTGSLQNFDELKIWVQEKCVPLVREITFENAEELTEEGLPFLILFHHPTDHNSIKDYKSIIERQLLDEKQNVNFLTADGKRFAHPLHHLGKSEDDLPLIAIDSFKHMYLFPHFSDMYSPGKLKQFLQDLYSGKLHREFHYGPDPSNDIEPDPHTGKGTSPPESKFKELGPSKHRYTLLEKDEL

SEQ ID NO: 21031 - DNA, 4667 bp, DROSOPHILA
taagtgcatatatctcttatatccaccatccgaatacataattacgcacaacagtgtgtgtgcgatgttattgggacgattcgatacgtatagtatagtggctcccataaataaataaataatactatgcacatatgtgcatgtgcattaagcagtgcacaaacaaagccaaataaatgtcactgggatgataaattgggcacaatcaacacttttagaacaaatcgaagttaatatttgagtttttgagtgtcgtggtggcaatatagataatgcactgcatatatatgcacgtatggatgtacaatgtacaatgaacatacatttatgtgagcacacacagttgcagttccacaaggtgcgcaatatatagtatgcacatatttgtgtgtcgctgcattacatacgcacgcacatatataccaatagactagattatcacgatttcatagccaataggcgaaaaatggccgattatcgtactcaacgtattctaatggccgtgtatgttgtcataaacaaagtaattaaacatttacgcatgtgtatgtttgcataaactcatatgtatatttgtctatgtaggtatgtttgtgtttcgatatttcggggagcaacaataacacattacaatcgtacatatgtatgcacacacatttggtttttggattccacaaaccgttcgctcagcagacttttcggggtatttagctcaaaacgtattgccgaattgaaaacgcgcttggcttctagattttctcgctctatttaccaccataaaatccataagcgtcagctattataaacaaagatttgcaaatgttgttgcacatacatatgtatgcatatgtattcatttagacactttttgtttcatttccattgaaattgctatcgttgtttgctgctatcgctgttatcgctgctgttagcgatggccaagtcatgtgactaagctatcgttactcgattgccgatgagatgtgcattcgagactaaccaacactggccagccgataaaatcaaccaaaaatttgtaaaacttaataattgtgcgtacgtttgcattccattccagctgatgtgtaactgaaatcagaaaaaaagagaaccgatcgcttggactctccgccggtgcacgcaattctacgcccactcctcgccagccgcattcgccattcggaagccgaacaagaatgtttggagccagaatcggaatcggaaagcttgggccgtgtgtggccctagttgcggtgagtcgacgtgttccgttctgtctggtcatgttgctggtcactggagtggctcacccgctcgatcagcgggcggggaaacagtggggaggggccggccagacagccccggcttttttttggctccccctaaccaaataactaactaaccagaactgacatcctatggaatttacagattctacagctactccagtacacacagccggccgatgccgccggagccgtgcccatgaccagtgataatatcgatatgaccctaggtgagatatgcccataccataaccatcacagtcatccccatgccattcccgctgccagcgtgagcgggaatcaattagccgacttgtcccattgacgtgtcactaaacaaaatcactggctcgctcaattcggcactgccaacgtggtaaaataagttttatgcgctttcgtaaaggacaaggtgtggaatttggataaaacttaattagggcggtttatatttcatgctgcatcggtccgatagtccgccaaaatgggcactagccattggtcggcagttctttgctcagaatgtccgaagtttggtctttgcatgaataggtcctttttatacggtgtgtcctgtacacaatcctgcggtaatactatattgtttttttaaagttatttttttttattatccaaacgttaacttttacagtaaagcctggccttaggcttgcaccccttaaattttaactttcggaagttatggaatagtaggatgctagaaatttcttgactttaatatgtatattcagcgacaaatttaaatatattccataaaaatacatatgcatttaaattattaatacataaacccgtaattcaatattgatataaatatattaccaaatatatgtttttaaaagttattatatttagtatctgaacggagttgtattctacgcatcaacaattttacacacaatttggtgcctacattaaaaacacgttttgttttcttgcagcgtctaatgaattggttttccttaatttttatgcggagtggtgtcggtttagtaatattttagcacctatattcgcggaagctgcagataaggtgagtcaaatggatcgccagtaaaagcttacaaacaatgcgatacattcatatacattttatatcgaataaatacgtggcattcaatcgaatttctcttacagattaaagaggagtttccagaggctggaaaagtggtgctaggcaaggtcgattgcgacaaggaaacggccatcgcgtcccgtttccacataaacaagtatccaacattgaaaattgtacgcaatgggcagctcagcaagcgcgaataccgaggacagcgttcagccgaagcgttcctcgagttcgtcaagaagcagctggaggatcccattcaggagttcaaatccctgaaggatctggagaacctggactcgaagaagcgcctcattctgggctacttcgatcgtagggaccagccagagtacgacatattccgcaaggtggcgacaaatctgaaggaagactgccagttccacgtgggcttcggagatgccgcccaggccatgcatccaccaggtgaattctatcaaacgcaccaagtcatgccaagccaatactgaatgtcagcttttttggtctattacaggtacacctatcatagtatttagacctgatgtagctctgtctcatgagaacgatgagacctacactggcagcctacaaaatttcgatgagctcaaaatttgggtccaagagaagtgtgtacccctggtgcgggaaataacatttgagaatgcagaggaacttacggaggagggtctgccgttcctaattctcttccaccacccaaccgatcataattctatcaaggattacaagtcgatcattgagcgtcaattgctggatgagaaacgtaagatgaatcatcgtgttgtttactttgcatataagcatttggtttgacattgtattttcgaaattttgcagagaacgtcaactttttgaccgccgatggcaagcgattcgcgcatcctctgcaccatctgggtaaatccgaggatgacttgcccttgattgccatcgactcgttcaagcacatgtatctgttcccccacttcagtgacatgtactcgccgggtaagctgaagcagttccttcaggatctctacagtggcaagctgcacaggtaattgttatacagccgcctttgctaacaccatggggctcaattactaaacggtctgctgctttgctttccagggaatttcattacgggccggatccctcaaatgatattgaacctgacccacacactggcaagggtacatcgccaccagagtccaaattcaaggaacttggcccatccaagcatcgctacaccctgctagaaaaagatgaactgtaatataataataataatgtatattgaaaataaaagaaaataatacaaaaatgtaataatgagcaaccttctctgaaagcagatcagcaggtgagcggttatccatgcaaatagcgggcgcagcagcctcaattctcttcaatgcaattctaaaaataaaaagtctggatttaaccacctttgttattgcaaaaagaaacagttgctgaattatccacaaattgcacgcgtcacttttcaagttttcctcgttttgttgttaaaaattacgctggagatttcggcgaggcgaacttattgaattctttggaatccccttcttagtcagctaagctggaaatgaatgatgtcaacttccgaattcaaagcagtgattttgattttctctatatatatatatatatacacatatatatgagctatatatgtatacatatatatatgtttattcgtatgtaccatgttacagttacagttgttaaattagattacataattatataatataattcagtcaaaacgagcgataaccgtgtgtgtgttgggataaaaatcggttcaaatgaagtcgtgtgctggcaattatcatttaaaagttgctctgactgttaattttaaaagtacatttaaaagcgtactctcgctacaattaataagtaaaagtgaaaaaaataggtgccgcgttcggctggctaccatgcgcttaatatggtctcgagcgcatgcctccatcgtttctcatcggtccaccatcgcggcgattgccgccaccacctccacggccaccgcgtcctccgccattgttgtcattgaagcgggagtagccaccaccaccgccgccgccgcctccgcctccctgcgagttgccaccgcgatctctgttgtgatatccaccgccgccggatccacgatcatttcctcggtcgtagcctcctccgccaccaccgccgccgtagccgccgcctccaccacctccgctagagccctcgtcgtcgcccttggg

SEQ ID NO: 21032 - DNA, 1435 bp, DROSOPHILA
caacactggccagccgataaaatcaaccaaaaatttgtaaaacttaataattgtgcgtacgtttgcattccattccagctgatgtgtaactgaaatcagaaaaaaagagaaccgatcgcttggactctccgccggtgcacgcaattctacgcccactcctcgccagccgcattcgccattcggaagccgaacaagaatgtttggagccagaatcggaatcggaaagcttgggccgtgtgtggccctagttgcgattctacagctactccagtacacacagccggccgatgccgccggagccgtgcccatgaccagtgataatatcgatatgaccctagcgtctaatgaattggttttccttaatttttatgcggagtggtgtcggtttagtaatattttagcacctatattcgcggaagctgcagataagattaaagaggagtttccagaggctggaaaagtggtgctaggcaaggtcgattgcgacaaggaaacggccatcgcgtcccgtttccacataaacaagtatccaacattgaaaattgtacgcaatgggcagctcagcaagcgcgaataccgaggacagcgttcagccgaagcgttcctcgagttcgtcaagaagcagctggaggatcccattcaggagttcaaatccctgaaggatctggagaacctggactcgaagaagcgcctcattctgggctacttcgatcgtagggaccagccagagtacgacatattccgcaaggtggcgacaaatctgaaggaagactgccagttccacgtgggcttcggagatgccgcccaggccatgcatccaccaggtacacctatcatagtatttagacctgatgtagctctgtctcatgagaacgatgagacctacactggcagcctacaaaatttcgatgagctcaaaatttgggtccaagagaagtgtgtacccctggtgcgggaaataacatttgagaatgcagaggaacttacggaggagggtctgccgttcctaattctcttccaccacccaaccgatcataattctatcaaggattacaagtcgatcattgagcgtcaattgctggatgagaaacagaacgtcaactttttgaccgccgatggcaagcgattcgcgcatcctctgcaccatctgggtaaatccgaggatgacttgcccttgattgccatcgactcgttcaagcacatgtatctgttcccccacttcagtgacatgtactcgccgggtaagctgaagcagttccttcaggatctctacagtggcaagctgcacagggaatttcattacgggccggatccctcaaatgatattgaacctgacccacacactggcaagggtacatcgccaccagagtccaaattcaaggaacttggcccatccaagcatcgctacaccctgctagaaaaagatgaactgtaa

SEQ ID NO: 21033 - protein, 375 aa, DROSOPHILA; identical to SEQ ID NO: 21030

SEQ ID NO: 21034 - DNA, 4605 bp, DROSOPHILA
gaaactgtacattccattgatgaaacatcacgtgattcgttgcactcctttggcaagtctgcaaatttcgtaatttcctcagggcataaaactaaactacttgatgcactcaggtccaatggtgtttctagtgattcctggtcaggcaaattcatttcattggattctaaattcagcacacgtggtaaatcatttctttgattggtattgcataaatcttacccacgtgttccttcagctcattttctttgctcaacttgcaggtgctcatgcagttgatcagggttccgtaattgatcaaatggttgatttgaaggagtgccgagttgcaggggcacttgtggagcatcaaagttccgtagttgataaaggtttttatctttagtgttggtggataggcatttcccttgcatctgcctgtcctcatcaatccgtaattggtcacgttatccgtattcagcaattgtaagtcgtttcccgatttactcctgcactggcatttccgatcgaatataactccgtggtttgaaattgtgctcgacataacgatttccttttaatttcgcagaattgtacagtttcgtaaagttgaaaagcaataagtttcgatatcgattgttaccagagctgccgttcgtttagcgcgtgttcgattcgcacatcgcgttcgattttaaaagcttgatgtctacccagtgttggacaatctctaaatttaatggtaataaggcatttaaccatttaataactatagttcaaaacaaaaattgagtttttcagctaattcaaagctgaatcaatatttatattttaaaaatttgttaggtccttaaagcttacatttttattggatatatgcataacatatttaagtgcctgggatggaaagatataacacaatgagtaaattgagcagacattcgaatcctcttcctaagaatcctaggccttaattacaactattcctgagcaccttccattccactagtgaccgtcaatcctacggatgtggatgtggattcctggccacccttaacgaaggtcgacgtgatcctccggctggaacattcgcacttgtagctgcggaaagccggggcagacgcggattgacaggtgggcccatgactcggtcgacaggatccatttggttgtcgatttgaggcaggggcgaggccggcgaccactctgaactggaactggagccgggtgagtcagatctttgggcaaatgtgacaatttaataacttcttctcggatcaatattgtagttatcccaaaatgaatccttaccccgcagtatagatgggcggtagtttccgttcatagttgctggtgctgggtgttaccacgccagcatgtatctcctgctggtaaagcccataaagctcacgcaactcatccggcagatccacgttgccctcttcgatgagccttctctgggagctgatgatgtcctcgcagaggcgtcgctgtctttctgccctaagcagttgaagatcacgcctgcgcagctccgcctggcgagccagccgctccgcctgcagcgataccttgtccgcctccaactcgtggacacggcagaggagtgctagcagttcgcgttcctcgtcactgctaatgcgctccggaagttcctgttcggaaaggaagatactattgcccacaaatggataaatgcaccccactaagactcacatcctccagtttgactcctttctgacggcattgctccagctcgtgctccgtcctctcgcggatttccttgtagcggcgggtctccttctctatagccgccagttctccccaggcatttttcaaagccaccgatccttctgattcaatgtctgcggaaaaacaaaccaaatatgatgatttcgtgatcagtaatatgtgggagaaaacacaccgtcatcgcccattgcatcatatagttttccaatgcgtccttgccagtgggagataatcatatgctgccgctcagcgtccagttccaagcccagtagatggctctcggcctcgaggagtttcctgcgcagtttcatctgctgcttgaaggtgagaacaatctgttcgcgcaggtaacggagttcggtcttgcgctgttcgtcctgttcctggacagcttccgatccagctccagatccagcggtcccagcagagcctgaagctgctgcggctgccgctgctgcagctgctccactccgaggcctttcggttagcatcttggtgcgcagacgtgatacttcatcgcgcagctccgaaacgagactttggtagtgtttggtgggaaagtccttgaactcatcgatgtacacggagttttggagcttggtagtgatgctattagctcggtcggcgtaaaccagagtgttcttggtctcatcgcggtgcttactttccggtgcaacatgggcaatcattacggtcttgcagcgaccactcagcgcctccttgagcagcctggttagcttggagtcccggtagttgacatacctggcaccgccggatagtccgttgataacgttgcccagtgccagcaagcttcgatttatgtgggcaccttcctgcaatcgtttacccctattctttgttttcttagcccgctccgatccggccagatcggtgagaaagagtcgtccttgcttggtgcccaacggcgtccttgcctgaaccataatactcaaaagggcgtgactgcgtgaggaagtttgattcgcggccgtcggctccatggtcctggccttgtttcccttgagcaacagacttacaacctcctttctgctggaagtggtaatctccgagagaccagccacggtgatgcgctggccacgatgatcctctcgcagctccaagggtcctccaggattaaggagatcccttatgagctcgttgtatatctccaggtaggatatggaaacgcgacacgaatacgcctccgctgactcgatgtgactgaatatatcttctatggcgcgcaccattagcccgatgtcctggctgctcacgtctgtggaatcacaggatgctgtgggtggggcacgatcgctggtctgcggttttttgcgcggcacaggtcccagcatggtgtgcgtctttccggatccagtggctccataggcgaaaacggccgcattcagaccgttaaggacatctctgactaaaggagccgtagtcgttttgtaaacctgctcctggctatcgttctcccggaatacatgatcgtacgaatactgccgtggacgactctttccgccatcatcgtacagaagtgatccgccggagatgacttcgatgcagcgttccgtggcctccatactgggtcgaacccgaactgcaacctaaagaagattaggaagttattattacgtactaaagcaactgattaaaaaaaaggaagaacttcttatcccatcatatcttcaattgtaatattaaattctaaatttaagtaattgtttctgaaatagtatattctccatagagtatatactcaccactaatctctcctcctgcgccggttgagctgtagcaatggatcgtccttgggaggagttgctgcctccactgctgcccgaccagctgctcgctccagcactggtcgccatcactgcgatccttcagataaatggcaaatagcaatggatatgtgggtgggtagtccttgtgcagccacgtgccgcctggcctggttgatgacctgacctggacaggaccattacaaatcgtgtcaatttgttgtcaacaatcgtaaaactgccatcagcgcgggaaacacccaacgaactcctaatggacttgtgaatttgcgcgccaaggtctcgcctctttacagggaatttctctgtgaaggagggtccttggagtcccatggctcttgtttacctgtggcccaaagaactcaaggagctaaaggagctggcgtgggccataaatcaagccgtgaacttgaacacccaaaaagtgcctgcgtgtctccgcatgcaaatcaaatggagcagttcgatggtcatcgagagggtactgtacctgaactgggaaccctgaagtcctcaagagtctattaaccttcaagggttcagattatggatcaaaattccaataaaaaggtgatggatctctaaaaaaaataatgttgcccacaatactaaacacaattttacctatattacaagacttccaatatttctaatcatatgtttcaaatcatatatggattcttgaaagttccagccaattttttctttttcgcatggtgttgtccataaaattgaagtgcataaaattcaaattaaatgaaagtgttgccggaaatagaagtgtcaatccattcacgctaatccataatctttgtccgtgtgccaaacatgttgtgacctctgaacccaaacacccaacacctgtcactcactataaaggaaaacttccatagccccgcagccaactgtcgcttccccaaagccataattaatttcatttgcctaagagctggtcaattataaaacgtgggacttattgagtgccaacggtttggattattcattttaattccatgttcccattcaggtgccatgaatttgtgatggaacagcccataacaaaaagacc

SEQ ID NO: 21035 - DNA, 2187 bp, DROSOPHILA
atggcgaccagtgctggagcgagcagctggtcgggcagcagtggaggcagcaactcctcccaaggacgatccattgctacagctcaaccggcgcaggaggagagattagtggttgcagttcgggttcgacccagtatggaggccacggaacgctgcatcgaagtcatctccggcggatcacttctgtacgatgatggcggaaagagtcgtccacggcagtattcgtacgatcatgtattccgggagaacgatagccaggagcaggtttacaaaacgactacggctcctttaacgcacaccatgctgggacctgtgccgcgcaaaaaaccgcagaccagcgatcgtgccccacccacagcatcctgtgattccacagacgtgagcagccaggacatcgggctaatggtgcgcgccatagaagatatattcagtcacatcgagtcagcggaggcgtattcgtgtcgcgtttccatatcctacctggagatatacaacgagctcataagggatctccttaatcctggaggacccttggagctgcgagaggatcatcgtggccagcgcatcaccgtggctggtctctcggagattaccacttccagcagaaaggaggttgtaagtctgttgctcaagggaaacaaggccaggaccatggagccgacggccgcgaatcaaacttcctcacgcagtcacgcccttttgagtattatggttcaggcaaggacgccgttgggcaccaagcaaggacgactctttctcaccgatctggccggatcggagcgggctaagaaaacaaagaataggggtaaacgattgcaggaaggtgcccacataaatcgaagcttgctggcactgggcaacgttatcaacggactatccggcggtgccaggtatgtcaactaccgggactccaagctaaccaggctgctcaaggaggcgctgagtggtcgctgcaagaccgtaatgattgcccatgttgcaccggaaagtaagcaccgcgatgagaccaagaacactctggtttacgccgaccgagctaatagcatcactaccaagctccaaaactccgtgtacatcgatgagttcaaggactttcccaccaaacactaccaaagtctcgtttcggagctgcgcgatgaagtatcacgtctgcgcaccaagatgctaaccgaaaggcctcggagtggagcagctgcagcagcggcagccgcagcagcttcaggctctgctgggaccgctggatctggagctggatcggaagctgtccaggaacaggacgaacagcgcaagaccgaactccgttacctgcgcgaacagattgttctcaccttcaagcagcagatgaaactgcgcaggaaactcctcgaggccgagagccatctactgggcttggaactggacgctgagcggcagcatatgattatctcccactggcaaggacgcattggaaaactatatgatgcaatgggcgatgacgacattgaatcagaaggatcggtggctttgaaaaatgcctggggagaactggcggctatagagaaggagacccgccgctacaaggaaatccgcgagaggacggagcacgagctggagcaatgccgtcagaaaggagtcaaactggaggatgaacttccggagcgcattagcagtgacgaggaacgcgaactgctagcactcctctgccgtgtccacgagttggaggcggacaaggtatcgctgcaggcggagcggctggctcgccaggcggagctgcgcaggcgtgatcttcaactgcttagggcagaaagacagcgacgcctctgcgaggacatcatcagctcccagagaaggctcatcgaagagggcaacgtggatctgccggatgagttgcgtgagctttatgggctttaccagcaggagatacatgctggcgtggtaacacccagcaccagcaactatgaacggaaactaccgcccatctatactgcgggatctgactcacccggctccagttccagttcagagtggtcgccggcctcgcccctgcctcaaatcgacaaccaaatggatcctgtcgaccgagtcatgggcccacctgtcaatccgcgtctgccccggctttccgcagctacaagtgcgaatgttccagccggaggatcacgtcgaccttcgttaagggtggccaggaatccacatccacatccgtag

SEQ ID NO: 21036 - protein, 728 aa, DROSOPHILA
MATSAGASSWSGSSGGSNSSQGRSIATAQPAQEERLVVAVRVRPSMEATERCIEVISGGSLLYDDGGKSRPRQYSYDHVFRENDSQEQVYKTTTAPLTHTMLGPVPRKKPQTSDRAPPTASCDSTDVSSQDIGLMVRAIEDIFSHIESAEAYSCRVSISYLEIYNELIRDLLNPGGPLELREDHRGQRITVAGLSEITTSSRKEVVSLLLKGNKARTMEPTAANQTSSRSHALLSIMVQARTPLGTKQGRLFLTDLAGSERAKKTKNRGKRLQEGAHINRSLLALGNVINGLSGGARYVNYRDSKLTRLLKEALSGRCKTVMIAHVAPESKHRDETKNTLVYADRANSITTKLQNSVYIDEFKDFPTKHYQSLVSELRDEVSRLRTKMLTERPRSGAAAAAAAAAASGSAGTAGSGAGSEAVQEQDEQRKTELRYLREQIVLTFKQQMKLRRKLLEAESHLLGLELDAERQHMIISHWQGRIGKLYDAMGDDDIESEGSVALKNAWGELAAIEKETRRYKEIRERTEHELEQCRQKGVKLEDELPERISSDEERELLALLCRVHELEADKVSLQAERLARQAELRRRDLQLLRAERQRRLCEDIISSQRRLIEEGNVDLPDELRELYGLYQQEIHAGVVTPSTSNYERKLPPIYTAGSDSPGSSSSSEWSPASPLPQIDNQMDPVDRVMGPPVNPRLPRLSAATSANVPAGGSRRPSLRVARNPHPHP

SEQ ID NO: 21037 - DNA, 3349 bp, DROSOPHILA
tttaagaatattctatagactatggttgcaattttgaacaggcagagcattgaaaaaacgtatatttagaatagttttacaacgaaacgctcgaatcagattgataatacttgacgtagttattgccatttgctctacaaacatacatatttacaatattttattgccttatatttaagacagcgaaagcttaaaaagcttagtaaacaattcgcggggttatttttgtgccggtagcaaatacatatgtacatacatacataaatgcacggacaatcacaaagatacccgccgtagtagctaaactaacattataaaatggcattattaataaaagtcaaattaagggcatcttggcacagttttgtcgtgtgacacccgctaggaaattggtagctccttgagaacttttgatggactatctcacacacacaaccagccccccttccacccacgcgagtggaaaataccggttggaaaaggtacaggtacccgtcctgcgtacctagccaaggtaaaagctatcaaaatgaagtgtaccaatgctggcttttataagtttaattaactgagttgcttgcagggtttcttttaattaattatgattataaatcaatttctggacaatcatttacattttccttggcttgctagctagcatatagtatttaacaaaaaatacataatttcaacaactttagggcctgcattcaaagcctaaatgcactaaatgcaaggtacgcggcagctcaatgatgtgtatacagcgctgtgggcgtggcagcatcgtccaattgcccaacggggcggcattgttatcgcacggcccactatctcctccgaaatctccagcgacacccatcaagcgcgtccgcaaacaccccacaaacacttgggctcgggtctcgttctcgtttttgggttcacctctggcgtggttatcgccgaatattaaaccggttgcgctgccgtctaattgctcaaacgcatgtacgctgtgccaagtggcggtcgacagcaatagctcctccatagctccttcttaaatccaactccaccgaagtaaatcggcaaaagtaaataaacaaagatgtcggcaaagaacgagaaagttggcattgtgggcaggtgagttggagcaggaagctgttattcgctaggatatccaggtgctgactggcggtgttaccattccagcggtctaattggtcgctcctggtccatgctgttcgcctcggtgggctaccaggtggtgctgtacgacatcctgcccgagcaggtgtccaccgctctgactgccacgcagaaggagctgcaggatctggaggccaagggcctgctacgcggcaaactgaccgccgcccagcaattcgcctgcatctccggcaccaacgacctcaaggagctggtcaagggcgccatcttcgtccaggagtgcatccccgagcgtctcgatctgaaaaaggcgctctacaagcagttggacgccgtcgtcggacccaacaccatcctctccagctccaccagcacttttctgccctccctcttcagcgcggatctgaaaaacaaggccaatgtgagttgaattcttgagattagtgagccatagtatatctccaccttgagctgattacttggtaaaaagaatagttaatcgtaatacatacaaacagcttattgttttaagaaacattcttagctgcaattgctttaatttaaagctgcgccgtccttgtgcccaatttgattcgcatttatttggatttcgatgtgatcgccgcaatgactaagcccaattacgcttgatttcgtgaacaggttttggtctcgcatcccgtcaacccaccgtactacgtgcctctggtcgagatcgtgcctgcgccgtggacgaaaccggaatgggtgaagaagacccgtgccctgatggaggagattggccagaaaccagttacgctgtcgcgggagatcgagggcttcgccctcaaccgcatccagtatgccatcctgaacgagacatggcgtttggtcgaggccggcatcctgaatgtcaaggacatcgatagcgtgatgagcaatggactgggaccgcgctacgccttcctgggtcccctggagacggcccatctgaatgccgagggcatggccaactatttcgaacgctactcgaacaccatctatgcggttagcgagacaatgggaccgacaccgaaaatggagggccccgtcgccgtcgaggtggccaagcagctgggcgagatggtgccgctggatcagttggcccaacgccgcaactaccgcgacaactgcctcacccagttgagcattctcaagaacaagctcaaccagtaaactcattattatcttgctgctgcgtttttttttttttgttttttcttcattgttgtgatatgctagcgccacatacgttaaatatacggaaattgcttaactgataatctctttttattgaattattcctcgctggtctttcaagacagctgcgaaaagcgaaattaatagggagtgtgctttgcaagctactagttctaggtattacatcaatggacaaatccttaaaacgtaggatacttgtggtcaaacggcttcacctgcctcttaaatgctatttttattctcttctgatatgcttggcttactattaaatctcttctttaatcaactccacttcagtggaatttcaaaaacatagggaaatgagaaagggatttcaagcactatgagttcgcaaggtaacttagtgggttagtgagtagttaacaaagataaattaactaattagttcgttcagttcgagtggaaattaaatataaagtactggctccactgctaatccgtttcgaaacgaaaactaatttgctaacgtttagtatggagtgcagactgcatatcagttcgctttatcttgtgacgtcggccaaaaaaaaaaaaaaggaaaaacaaatggaacaaacaaaaatatatgggggagatagccaagccgttttcacattgtcggtttatctgcaaggttaaaaacttgacctcagacatcacattcgaattcactttcaggcgacattgcgccaccgcccacgggccaaggaagtgctcccccattccccattcctacgcaatgcacgctctctatcctctagccggaaccgctcttcttgcagaagctcggccccctaatgctgggcgtcgaataggaggtatttgacagggatcccgatcctgcggtcatggccattggcttcagggatctgcgctgctgggtgcgcatttgtggcagtggtgtgctcgtgcaggatatgttttgggcgggtttggtcctcgatgagatgggcgt

SEQ ID NO: 21038 - DNA, 1038 bp, DROSOPHILA
ccaagtggcggtcgacagcaatagctcctccatagctccttcttaaatccaactccaccgaagtaaatcggcaaaagtaaataaacaaagatgtcggcaaagaacgagaaagttggcattgtgggcagcggtctaattggtcgctcctggtccatgctgttcgcctcggtgggctaccaggtggtgctgtacgacatcctgcccgagcaggtgtccaccgctctgactgccacgcagaaggagctgcaggatctggaggccaagggcctgctacgcggcaaactgaccgccgcccagcaattcgcctgcatctccggcaccaacgacctcaaggagctggtcaagggcgccatcttcgtccaggagtgcatccccgagcgtctcgatctgaaaaaggcgctctacaagcagttggacgccgtcgtcggacccaacaccatcctctccagctccaccagcacttttctgccctccctcttcagcgcggatctgaaaaacaaggccaatgttttggtctcgcatcccgtcaacccaccgtactacgtgcctctggtcgagatcgtgcctgcgccgtggacgaaaccggaatgggtgaagaagacccgtgccctgatggaggagattggccagaaaccagttacgctgtcgcgggagatcgagggcttcgccctcaaccgcatccagtatgccatcctgaacgagacatggcgtttggtcgaggccggcatcctgaatgtcaaggacatcgatagcgtgatgagcaatggactgggaccgcgctacgccttcctgggtcccctggagacggcccatctgaatgccgagggcatggccaactatttcgaacgctactcgaacaccatctatgcggttagcgagacaatgggaccgacaccgaaaatggagggccccgtcgccgtcgaggtggccaagcagctgggcgagatggtgccgctggatcagttggcccaacgccgcaactaccgcgacaactgcctcacccagttgagcattctcaagaacaagctcaaccagtaa

SEQ ID NO: 21039 - protein, 294 aa, DROSOPHILA
MLFASVGYQVVLYDILPEQVSTALTATQKELQDLEAKGLLRGKLTAAQQFACISGTNDLKELVKGAIFVQECIPERLDLKKALYKQLDAVVGPNTILSSSTSTFLPSLFSADLKNKANVLVSHPVNPPYYVPLVEIVPAPWTKPEWVKKTRALMEEIGQKPVTLSREIEGFALNRIQYAILNETWRLVEAGILNVKDIDSVMSNGLGPRYAFLGPLETAHLNAEGMANYFERYSNTIYAVSETMGPTPKMEGPVAVEVAKQLGEMVPLDQLAQRRNYRDNCLTQLSILKNKLNQ

SEQ ID NO: 21040 - DNA, 4783 bp, DROSOPHILA
gcactttatctcgcaataatttcaatttcccatcgtgctccgatatgaaggagccgtaatcccgtaggatatcctcggcaaacatagctgaaatagaaaatatatagataagaatagtattccatagctgatatcggcgttttcatacacatagagctttgctcttccttcatgtctaccaattttaaaaatattattgttttggttttctcatggcaaatttagggatggggcatttcaagtgggtggattccgattcgataacgctaaattctcgatatcttttgtttaaacaagcgtagttaaaacccaaaaactgtgtaaaatcgaaaatcgcgattaattgaatggaaaagttggtagcatgtctattccgataaatgatttatttatacaatttataagcaaaaataatcctcagataataaattcattttatttatataagaagcaatataaatttttgattcaagaaacagcggtaaaaatacataatcgtaatgactatgaatatatgcaatacctagttttcattctgacttaacaaattaaatcaatttctataagtttggttatcgatttccaaggattaaaatcgtactccttgacacgaatacctgtacgtcgcagtctatttttaaaacaagacttttgtccataaacaaatttaattttgatatttaagttttggacttaaatgttttgtagaataagttatttcggatgtcttatcatagaagttttgttatcgataacaaaaggcttgtcgtgtataagggccctaaacagcgtgtatgcattagtgtatgtgtacacacaagcgttgatgttccgtttccattcgttccactggccttacaaatgccgagcaataaaatcgcgtcgtattttataagtcattgcaggaattatttaatttgagcctgaaagcagtttgaccaactgactaggcaaatttggttgtgtactactaaaaatttataggaataattagtacggcatggaaacgtctgaaataggttgattaccaaattgattcttaatggaaattcttgtttaaccattttatacacttaattttcagaaaaggccggcggcgacgaagccgagaccttatccgagccactcgagaagaccacaacagacacggccgcaaaagcggagctaaaggaaattcaagataccaatcccgacgcaaccaatttcgagccagtattgccagagaagagcaagagcaagtctccttcgccggcacccaagaatggtgatgataatgccgaggccatcgccgatcgctcgcgtagtcgcagtcgcagtgctaccaggaagagcgcatcccgctccagaagcggatcccataagtcccgcagcggatcggtgcactcggcagccagtggccggcgttcgcgcagtggctccaagcagtcgctaaacggttcccggcggtcgcggagcggctccgctccgtcccgcagtggctcccgtcattctggcgcagcaccgggatcgcctgctggatccagacgttcgcgcagcggctctagacgatcccgcagcggttctagacaatcccgcagcggctctaggcgttcccgcagtggatctaagcaatcgcaccgctcacgcagtgggtctaagcgatcccgcagtggatcacgtcgctcccgcagtggctctaggcgatcccgcagtgggtctaagcaatcccgtggtggatcgcgccgctcccgcagtgggtctaagcaatcgcgcagtggatcacgtcgctctcgcagtggatctaagcgatctcgcagtaggtccggttctagacgctcaaatgcatcgcggagcggttctcgacgttcgcgaagcggctctgtatctagacgatctcgcagtggatctggatcaaggcgttctcgaagtggctctaggcgatcgcgcagtggatctaaacgctcccgaagtggctccatttgctcccggagcggatccaggcgctctcgtagtggatcggcgcgctctcgcagcggatctcgccgttcccgcagtggttctagacgctcacgcagtggctccagacgttctaggagcggatcgagtcgttcgcgcagtggttcgggctccaggcgatcgaggagtggatcaagacgatcccgcagcggatccagtcgctcgagaagtggatctagtcgctcgagaagtggatccaggcgctctagaagtggttctagacgttctagaagcggatccaggcgctctaggagcggttccaagcgctctagaagtggatccaggcgctccaggagtggatccaggcgctccaggagcggatctaggcgctccaggagcggatcgaggcgttctagaagcggatcccgctcccgcagcccgctccattagcggtggttcgcgaaagggttcccggtctcgttccggtagtgccgcatcccagacagcttccaggcgaaaaagacgggccatcagcgaatctgatggtaaatattggctacaactttaaaagcaccttaatttatgtattatttcaatgtagacgacggaccgaaggtgacaaagaagcgtgtaaaaatcacggacacagacaatgaagaggatgagcaggacaagggcataggcaaagagaaatcacaagacaaaatcacagagagctctgacgatgagaacacaccaatttcaaatgaaccagagtaagacttcgtttccttcaggcgaatagattttaaccccacatttactgccattgcaggaacagtaactttatttccgactttgatgctatgctcatgagaaagaaggaagagaagcgagtgcgtcggcgcaagcgcgatattgatctgatcaacgacaacgatgatctgatcgatcagcttatagtcagtatgaagaacgcttcggacgacgaccgtcagctgaacatgataggtcagccggccacaaagaagatttccatgctgaagcaagtgatgtcacagctgatcaagaagcacttgcagctggccttcttggagcacaatatactcaatgtacttacagattggctagcgcccctgccaaacaaaagtctgccatgtcttcagatacgcgagagtattcttaaactgttatcagatgtaagtggcatgcttagattattatatattatattatggcttctaatgtgtggattctccatctttagtttcctaccattgaaaagggacttttgaaacagtcgggcattggcaaggctgtgatgtacttgtacaaacacccccaggagaccaagtcgaatcgcgatcgcgctggtcgcctgatttccgaatgggctcggccgatattcaacgttagctgcaacttctcagcgatgagcaaggaggagcgtcaggagcgcgatttggcgcagatgtcacgtcatcggcataagagtccggatacagagccttcctccagcagcaaagcacctaccttaaatcagaccctctccaacgaggacaagatgctgcgtcccggagatcccggttgggtggctcgcgctcgtgttcccatgccctccaacaaggactacgtcatccgcccaaagtcaaccgtcgagggtgaagtctccgcggtaagtagtccagcataaagccctggctttcgcctccacttattcattgattccattgaatctcatttcagtcgacaaaacgcaagccaaaccgctacgagaagcacatgaaacgtttcctggactcaaagcgactgaaggagagccgcagggccgttgagatatcgatagagggtcgaaagatggcactataagcagcattctagctaactttaaattaaataatagaacgaaattaaaaaaaaaaatgtatatttttgaatataactaaacgcgagaaacgctggccttttgaatttttcgggtccatttgaggcattgaaaacgataagctagaatccaaagtcaaaaggaaagagatgggagatccatgcaggccgccatcttatcaggaagctaaattagctactaaattagttgtaaatatgcacatgtgtaattgaattaatacgaattcaccgattagatattacagctttcagttgggctgcaaagtagacttaatttaattattagctgcactttgcattattacattaaacaaataaaatagttaagcaacaaaatagcaatacaaatttcacttttaacacactaatcagattctcttcgtctttccatactggcttaaacaaaaaacgagcaattaaaccattaattaaagatggaaacgttaatccttcaagaggattacttttgtatactctttcaaaggttattatatttttagtctggttgctttcatattaagttaaaaacacgaagaaaccttatgatttgtatattcattgcaaatgagaaaagcaagatcatgttttccattctaatcttaagacgtcgcgtttaatttattatgtggaaaaaaccaaagattggagaaactaaaagttaaatttgtaccattccaggtatatctcgcacaagaaatgaagtgataaatatgtcagtagagattaaacaaactaaactaaacaaaccaaatagatctttgcatttacaactcacaaacattttttaagaatattctatagactatggttgcaattttgaacaggcagagcattgaaaaaacgtatatttagaatagttttacaacgaaacgctcgaatcagattgataatacttgacgtagttattgccatttgctctacaaacatacatatttacaatattttattgccttatatttaagac

SEQ ID NO: 21041 - DNA, 2394 bp, DROSOPHILA
atggaaacgtctgaaatagaaaaggccggcggcgacgaagccgagaccttatccgagccactcgagaagaccacaacagacacggccgcaaaagcggagctaaaggaaattcaagataccaatcccgacgcaaccaatttcgagccagtattgccagagaagagcaagagcaagtctccttcgccggcacccaagaatggtgatgataatgccgaggccatcgccgatcgctcgcgtagtcgcagtcgcagtgctaccaggaagagcgcatcccgctccagaagcggatcccataagtcccgcagcggatcggtgcactcggcagccagtggccggcgttcgcgcagtggctccaagcagtcgctaaacggttcccggcggtcgcggagcggctccgctccgtcccgcagtggctcccgtcattctggcgcagcaccgggatcgcctgctggatccagacgttcgcgcagcggctctagacgatcccgcagcgtgggtctaagcgatcccgcagtggatcacgtcgctcccgcagtggctctaggcgatcccgcagtgggtctaagcaatcccgtggtggatcgcgccgctcccgcagtgggtctaagcaatcgcgcagtggatcacgtcgctctcgcagtggatctaagcgatctcgcagtaggtccggttctagacgctcaaatgcatcgcggagcggttctcgacgttcgcgaagcggctctgtatctagacgatctcgcagtggatctggatcaaggcgttctcgaagtggctctaggcgatcgcgcagtggatctaaacgctcccgaagtggctccatttgctcccggagcggatccaggcgctctcgtagtggatcggcgcgctctcgcagcggatctcgccgttcccgcagtggttctagacgctcacgcagtggctccagacgttctaggagcggatcgagtcgttcgcgcagtggttcgggctccaggcgatcgaggagtggatcaagacgatcccgcagcggatccagtcgctcgagaagtggatctagtcgctcgagaagtggatccaggcgctctagaagtggttctagacgttctagaagcggatccaggcgctctaggagcggttccaagcgctctagaagtggatccaggcgctccaggagtggatccaggcgctccaggagcggatctaggcgctccaggagcggatcgaggcgttctagaagcggatcccgctcccgcagcccgctccattagcggtggttcgcgaaagggttcccggtctcgttccggtagtgccgcatcccagacagcttccaggcgaaaaagacgggccatcagcgaatctgatgacgacggaccgaaggtgacaaagaagcgtgtaaaaatcacggacacagacaatgaagaggatgagcaggacaagggcataggcaaagagaaatcacaagacaaaatcacagagagctctgacgatgagaacacaccaatttcaaatgaaccagagaacagtaactttatttccgactttgatgctatgctcatgagaaagaaggaagagaagcgagtgcgtcggcgcaagcgcgatattgatctgatcaacgacaacgatgatctgatcgatcagcttatagtcagtatgaagaacgcttcggacgacgaccgtcagctgaacatgataggtcagccggccacaaagaagatttccatgctgaagcaagtgatgtcacagctgatcaagaagcacttgcagctggccttcttggagcacaatatactcaatgtacttacagattggctagcgcccctgccaaacaaaagtctgccatgtcttcagatacgcgagagtattcttaaactgttatcagattttcctaccattgaaaagggacttttgaaacagtcgggcattggcaaggctgtgatgtacttgtacaaacacccccaggagaccaagtcgaatcgcgatcgcgctggtcgcctgatttccgaatgggctcggccgatattcaacgttagctgcaacttctcagcgatgagcaaggaggagcgtcaggagcgcgatttggcgcagatgtcacgtcatcggcataagagtccggatacagagccttcctccagcagcaaagcacctaccttaaatcagaccctctccaacgaggacaagatgctgcgtcccggagatcccggttgggtggctcgcgctcgtgttcccatgccctccaacaaggactacgtcatccgcccaaagtcaaccgtcgagggtgaagtctccgcgtcgacaaaacgcaagccaaaccgctacgagaagcacatgaaacgtttcctggactcaaagcgactgaaggagagccgcagggccgttgagatatcgatagagggtcgaaagatggcactataa

SEQ ID NO: 21042 - protein, 797 aa, DROSOPHILA
METSEIEKAGGDEAETLSEPLEKTTTDTAAKAELKEIQDTNPDATNFEPVLPEKSKSKSPSPAPKNGDDNAEAIADRSRSRSRSATRKSASRSRSGSHKSRSGSVHSAASGRRSRSGSKQSLNGSRRSRSGSAPSRSGSRHSGAAPGSPAGSRRSRSGSRRSRSVGLSDPAVDHVAPAVALGDPAVGLSNPVVDRAAPAVGLSNRAVDHVALAVDLSDLAVGPVLDAQMHRGAVLDVREAALYLDDLAVDLDQGVLEVALGDRAVDLNAPEVAPFAPGADPGALVVDRRALAADLAVPAVVLDAHAVAPDVLGADRVVRAVVRAPGDRGVDQDDPAADPVAREVDLVAREVDPGALEVVLDVLEADPGALGAVPSALEVDPGAPGVDPGAPGADLGAPGADRGVLEADPAPAARSISGGSRKGSRSRSGSAASQTASRRKRRAISESDDDGPKVTKKRVKITDTDNEEDEQDKGIGKEKSQDKITESSDDENTPISNEPENSNFISDFDAMLMRKKEEKRVRRRKRDIDLINDNDDLIDQLIVSMKNASDDDRQLNMIGQPATKKISMLKQVMSQLIKKHLQLAFLEHNILNVLTDWLAPLPNKSLPCLQIRESILKLLSDFPTIEKGLLKQSGIGKAVMYLYKHPQETKSNRDRAGRLISEWARPIFNVSCNFSAMSKEERQERDLAQMSRHRHKSPDTEPSSSSKAPTLNQTLSNEDKMLRPGDPGWVARARVPMPSNKDYVIRPKSTVEGEVSASTKRKPNRYEKHMKRFLDSKRLKESRRAVEISIEGRKMAL

SEQ ID NO: 21043 - DNA, 4943 bp, DROSOPHILA
tatggagcagcaacgttggctcgggacattagccactgtgcgccaacaacaacacaagaggccatggtagaaccaccaacttggccgaatgcgcctcgcgattctcaagacagttcgggctttttagttgcttcacgccgtcgacgagtgacattttctatggccacataatattttcattcatttgtttcgtttcgtctcgtttagcaccggcaaacgctaagtgtgccgacccctccccacctggatatggccagatatagccgcccccctgcccagttattggccaaaacccggcacacgcctcttgatgggtgtcaaagtgcgtgcaatgtctctggaatttggcacgagtcgaatggttttccccgcttgaaaagcttttcatgtgcagcggggagctgcaaagctttctacccactgtttgtcgaactgggggaaatgaatcgaacccatcaatcaacgtcggtcggtgatttgggtgaaggatgaaagcttatgtgctgcaccgccacggaagttgtcaactgcaaagttaggtagggcaccaccggcactatatttaatcaaaaaacaataaaaaaaaaacttcaaaaaaacaattgaaagttttatccatttatttagtatttattagatttcttcaaaagaagctgaatatcttttatacgtagaacgcatcttatgttaagtcctctaccatcgtttcgattagcatataacacacgcaaacatttattaaatgttttaagttgattaagtaaagtaaaattcttcaaaagaatatatattccaaaagttccgttctttcttatcgggagagtcttgcttcccttatacctaaatccaacgatttcttttaaaacttttctgaaaacttcttacatctatgaattaaaatatatcatatattggttggttagatttgaacatcccacttattctaacagcctcttttcgcaactcgttccttgaatatgtttatcaaccgtatagttatgctacgtaagatataaaaattgtagacacactctgattaatatattgacttgaacaacactcaaagtattatttgtagatgtattgtttcgttgattaacccgattaataggtgtatagaaatgcaagctccttgggctccttcatatggccttagattacgtataagtaaagtttaggataaagtctttacttgttggtattgctcgattctttgaaattaaaagctctgctgaccgtagtatgatgtttaaagatacctttaaaataaatggttatatcgttattgatggcaatcgcatggagtttcatgattgcttaaaaattaatggttactcgctgaaatgtttaagttggtttttgggtgggatgaatacttgtactttcttttttggcttctgttgttggctgatcttaaaatagcaatcggatggggctttaaaaaaatctaagtatcacctctaaagttttttttcccaaagtgttcagggtctaaaataatttcctaacggataaatcaatgtacgtttgacgctcagctgcctcttaatctaatcgtcttacgagcgactaaactacgatctcgattatctcggtctcatcgtcgtcgaactcatcatcctcgtggttcccccaatcgttgtgatggggtgtgtttcggctccgtcagtggatatacctctcctgctatagaagcacctgcttcatttgtggtcgctgcgactctagaatgcgctgggcctgctcatgatccatgccgtctatggagcaggcgatcagctggactagattgtgtccatgcgccagaatgtggtggatcgattgcagggtcaacttggtgcagttgctcaggttgagaactcgcaaacgctttagattgcttactatattgagtacagtctcatcatccactgccatgcaactggacacacaaagtgcctccagggatggacagttttgggtcaatgcctcaaatccctctgaagtgagacggttgcagtagcccaaagatagggctcgtagctctggtaatttcagcccaaccattagagaactatccgtgacattgcgacagcccctaaggttaagttccttcaatccgcgtagtcgacttataggatagggagtgtctccatatcccatcaggccttgatccgtaatcttcatacagtattcgatgttaagatttctcagtcttgtctggtatctgtaataaatagtatttgcgtctctcagaacaagaatgttttaaaactaaaagaatactcactggcaaatggtggccattgtgcgatccgtcaccgcttggcggcagttatccaaactgaggcgtcgaagattgggcagtcgctccagcagctggcacatggagctctcgtccaaaaatatggtttcctccagatgcagctcctgcaggctgtagttaatatcgccggccagcccttgaagcaaacccgttccagtcagctctctgcagtaagccatggtcagtgcctccaaccgaccactcagctggcgcagtgcatcaatgcaattggcgttgagttggacacaaaacattagatcgagcaccttcagagtgctttgccacttgccagctacatagagcagtaattcgttggttagcgataacattccggtcaaatccagttgacggattggtgctgactccggaacggctcttaggacagcttccaacaggaccagatgacaatttcccgaaagcttgagagttcgcagattgtgcatattttcgaacgctcggcaccattcacgcgtatcaatgcccggcgagcagctgaagaataaattgacgcacaccaaggtttccgcatgatcctgtaggacatccagcagagcattttcgttgttccgccggaattcgaattgcaggtgccgcagttgcaccttgttctccgttcgtcgcagctgcaacaacattcgcatcttaagcaccgcgtccaaactcacgccatcgcattcgaatcccacaaggtgggaaaactgcttcatatccaggtcatccatcgccgccagatgctggtcatccatcgacatagtcgtggcaatggtcagaaccttaaggtttggtaacttgccatccagattccggaaaacaggagcatggcgcacttgcagatgcttcacttcgtggcccacaagacgcagaaagttctccaactggcggcactggcgtagatttcttaattcaatccgctcgaagctcaaatagcaatttccgcccttcgcatgcttgtggatcgcctccaggttgtgttgcgtcactatcaccttccctttctccatgaatcgacgacgatgaaccagatcacggcaccgccaggacaccatccgcaattgcagcaggtcattgtacgaaaggtaggacatgatctctagccacatctcgttaggcagcagttcgatggcggctttggaggaaccctccttatccttatccgagtccaacttttccggggttggaggcggtgtcggtggcgccgcaatggaacgggcgatggccagcaggggattcaagttcaactccattctgttgggggtctataaaggaaaaagggctttcgtcaaataatatttatattatattaaacgaagttatagtaaatattatttgacaatactcctagatctgactttatatcattcgaatttttacttaaccatgataataacgaataggttatctcaagcgatcctccctcgtaaaggttcgatgcacctgaccacctgttctggggccggctcagtttggttgccaaggttaagtgcgtttttccaccttcttctcttagccaccctttcagaattttccgaaatgtgtacacaaacaactcacctgagcgtagctgcagctcagcctctcgaaaagcctcttttcacggcgctgactcggttttccactcgttatcagactattccccatgcagcaactcaattcaatctcaaccttctttccgatgaagtcactgaattttttgagtattttctttcagagttttggttacaaccttgccatggattgtcaaaaatgttattaattgcttacatatgtattgtgggaacttgttttaacataatatgtgctgtctatacgttattgcgctattattctggctcgaattattacatattttgtaattatttcaaactttaagcggttataattaaaactctgttatatgtattgtctgtaaacacatttcattgctgtttggcacaatttatccctttgttttctttttttttattaaatgctgtatgcattgcgttctttccttgatttgcgtatttgtgcgattgtacgattgaattttctttgactttagctgcctactaacactctcggtaattgtgaatgatataaacaaattttcaattaatttcagcgattttcttttccaattcgacagcaacctgctgccgccgctggtcgggttacaaaatccaaatgcgaacggaaaacaaacttctcacagctgtgtatctgtatttaatgacgaaaaccgctcgtccagggccgcagataaatttccagatacttttcacatgcagatacttctgcgtatttaacacgcatgctctctcaattttatttctctctggagagccctttctctctcgatttgtttatgtttgccgccgtttgtgtgacccacataaagaaagaagcaaaaacaaaaacgccagataaggggcggccttgattttggtgtgcgtaaagagaggggagggtgcatgcatttggacaataagatagctagagagcggagagcgttaagtgtttgcgtaaacttacccccgttttgagcagtgcacgcctcggacaatattacgaaatgcacgaggggcatccactacgcacaaataatagctcaatttcatgtacagtcaagcttcgccaacgtgaactaaaaccataccaa

SEQ ID NO: 21044 - DNA, 2585 bp, DROSOPHILA
atggggaatagtctgataacgagtggaaaaccgagtcagcgccgtgaaaagaggcttttcgagaggctgagctgcagctacgctcagacccccaacagaatggagttgaacttgaatcccctgctggccatcgcccgttccattgcggcgccaccgacaccgcctccaaccccggaaaagttggactcggataaggataaggagggttcctccaaagccgccatcgaactgctgcctaacgagatgtggctagagatcatgtcctacctttcgtacaatgacctgctgcaattgcggatggtgtcctggcggtgccgtgatctggttcatcgtcgtcgattcatggagaaagggaaggtgatagtgacgcaacacaacctggaggcgatccacaagcatgcgaagggcggaaattgctatttgagcttcgagcggattgaattaagaaatctacgccagtgccgccagttggagaactttctgcgtcttgtgggccacgaagtgaagcatctgcaagtgcgccatgctcctgttttccggaatctggatggcaagttaccaaaccttaaggttctgaccattgccacgactatgtcgatggatgaccagcatctggcggcgatggatgacctggatatgaagcagttttcccaccttgtgggattcgaatgcgatggcgtgagtttggacgcggtgcttaagatgcgaatgttgttgcagctgcgacgaacggagaacaaggtgcaactgcggcacctgcaattcgaattccggcggaacaacgaaaatgctctgctggatgtcctacaggatcatgcggaaaccttggtgtgcgtcaatttattcttcagctgctcgccgggcattgatacgcgtgaatggtgccgagcgttcgaaaatatgcacaatctgcgaactctcaagctttcgggaaattgtcatctggtcctgttggaagctgtcctaagagccgttccggagtcagcaccaatccgtcaactggatttgaccggaatgttatcgctaaccaacgaattactgctctatgtagctggcaagtggcaaagcactctgaaggtgctcgatctaatgttttgtgtccaactcaacgccaattgcattgatgcactgcgccagctgagtggtcggttggaggcactgaccatggcttactgcagagagctgactggaacgggtttgcttcaagggctggccggcgatattaactacagcctgcaggagctgcatctggaggaaaccatatttttggacgagagctccatgtgccagctgctggagcgactgcccaatcttcgacgcctcagtttggataactgccgccaagcggtgacggatcgcacaatggccaccatttgccaataccagacaagactgagaaatcttaacatcgaatactgtatgaagattacggatcaaggcctgatgggatatggagacactccctatcctataagtcgactacgcggattgaaggaacttaaccttaggggctgtcgcaatgtcacggatagttctctaatggttgggctgaaattaccagagctacgagccctatctttgggctactgcaaccgtctcacttcagagggatttgaggcattgacccaaaactgtccatccctggaggcactttgtgtgtccagttgcatggcagtggatgatgagactgtactcaatatagtaagcaatctaaagcgtttgcgagttctcaacctgagcaactgcaccaagttgaccctgcaatcgatccaccacattctggcgcatggacacaatctagtccagctgatcgcctgctccatagacggcatggatcatgagcaggcccagcgcattctagagtcgcagcgaccacaaatgaagcaggtgcttctatagcaggagaggtatatccactgacggagccgaaacacaccccatcacaacgattgggggaaccacgaggatgatgagttcgacgacgatgagaccgagataatcgagatcgtagtttagtcgctcgtaagacgattagattaagaggcagctgagcgtcaaacgtacattgatttatccgttaggaaattattttagaccctgaacactttgggaaaaaaaactttagaggtgatacttagatttttttaaagccccatccgattgctattttaagatcagccaacaacagaagccaaaaaagaaagtacaagtattcatcccacccaaaaaccaacttaaacatttcagcgagtaaccattaatttttaagcaatcatgaaactccatgcgattgccatcaataacgatataaccatttattttaaaggtatctttaaacatcatactacggtcagcagagcttttaatttcaaagaatcgagcaataccaacaagtaaagactttatcctaaactttacttatacgtaatctaaggccatatgaaggagcccaaggagcttgcatttctatacacctattaatcgggttaatcaacgaaacaatacatctacaaataatactttgagtgttgttcaagtcaatatattaatcagagtgtgtctacaatttttatatcttacgtagc

SEQ ID NO: 21045 - protein, 632 aa, DROSOPHILA
MGNSLITSGKPSQRREKRLFERLSCSYAQTPNRMELNLNPLLAIARSIAAPPTPPPTPEKLDSDKDKEGSSKAAIELLPNEMWLEIMSYLSYNDLLQLRMVSWRCRDLVHRRRFMEKGKVIVTQHNLEAIHKHAKGGNCYLSFERIELRNLRQCRQLENFLRLVGHEVKHLQVRHAPVFRNLDGKLPNLKVLTIATTMSMDDQHLAAMDDLDMKQFSHLVGFECDGVSLDAVLKMRMLLQLRRTENKVQLRHLQFEFRRNNENALLDVLQDHAETLVCVNLFFSCSPGIDTREWCRAFENMHNLRTLKLSGNCHLVLLEAVLRAVPESAPIRQLDLTGMLSLTNELLLYVAGKWQSTLKVLDLMFCVQLNANCIDALRQLSGRLEALTMAYCRELTGTGLLQGLAGDINYSLQELHLEETIFLDESSMCQLLERLPNLRRLSLDNCRQAVTDRTMATICQYQTRLRNLNIEYCMKITDQGLMGYGDTPYPISRLRGLKELNLRGCRNVTDSSLMVGLKLPELRALSLGYCNRLTSEGFEALTQNCPSLEALCVSSCMAVDDETVLNIVSNLKRLRVLNLSNCTKLTLQSIHHILAHGHNLVQLIACSIDGMDHEQAQRILESQRPQMKQVLL

SEQ ID NO: 21046 - DNA, 4314 bp, DROSOPHILA
gagccaattcttttttggctttacgtgacgttggcagaacaaatcgtttttgttttagccatctgacttgtttgctcctttatggcccgctgcgctttggactttgacgcatttgcgtcgctttaatgcgattgctggttgctcattacggccaatccttactagtacttgcactttctgtgaattcgtctggggtttccatttggctgattgcattttcataacaatttggaggattactaatgcgccacgttgtccctgcatttgcatgaccttgaaccagtagccacctcattagaatttcatttgtagtcaacaaggcgcagacgacagggccacaatcgataaaaacccaaatgtattttatggccaaattacatttttactagaatgaatccatagaaagatgcggaaaataagcgggcgcggaatatgctaagctttatttgcagccatgggaataatcttaatacagcaaattcatcctttaaggtatctctagaagtaagtttagtaagcgaactttgtccgtcatttccattgagttgaatgctacattttcgaaatcttattttaaatgcgattcaatacaatatacagaatctactatgtttaagatcgcaacatttttttttacactttcttaactaaacactttaaaagcacatctgtgttacactttggtatgcatgtgaaacatttggttaactaaaacatatatctacgcaatttaaaaggcgatctattaaatttcaaggggcaagcttttcgtttttaaatttaattcctatatttaaatggtgggcgttcactagtgattgatttatgcttaccattatcgataatattattaagttatatccgcctcaggcttgtttaagagtaaatcccccgagctctgaccaaagtttaattttaagagcgccagtatgctgaatagtatgagtcaaaagattgaatattcttagactgaataattctgaatacttgaaagactagtttaggagtttttccagccgttgtccgcagctgaatgaatgaaaaacttaatgcttaagggagagtgtgcgctcgactgtgattaacttttaattgccaaatgcaaatgaatgcaaaagcagtttaaacaaaacgctttggtagcagcagcaatagcaatagacgacaaataactggcttaaacagaattcaaataaattagcatcaggaagccgcacgagagagtgagttcgagtttatcagttagttgacttggacaccgatcatggcgtactgagcggcgactggcggcttgttcgtcggattctggatgtggagtacacatagagagagagagagagagagagagagccagttaatatcgaacctatccattgattatagggggcacttgcctgcattatcgacggtttcggctgctccgccgactcaatggagaagcgctgcgtttgactggaattggttagtgccctcctcaggcggcgcgattcgatgttgtttcgcgaattcagcgaacccttcgataccttcttgccaaacagaacggcctaaaggagtgggaaatcggtaaggtaattagttaaatagaaaaattcagacattcgaattattaataaatatattaataaatatatataaatatttataatacagataaatttgaaatatagtattgcgcatactataacccccacttccgttttactcaccttgaatgcctctcggaacttgtggctcataatgttatataacagcgggttgatgcaggtggacaagtagtagaggacaccggagacataggtcatcaccgtgtagacaaactcgtgctgatcccgcagtttggccccccgtgcaggggcgtagatggcaatcagtcgctgggcgtggaagggggcccagcagaggaagaagcacaccaccacggccactaaaggggaggggggggcggtaaaagtcagtgacgtggggatgaaaatggaatggcaatggaaatggggaagacacagcgagagtcacagataaagagtcaacgattatattttttggtaatcgcaattgtcatcataaatggagagtgccaaaatgacaaacgcagtaaattggctgcagacgggttgattagcccagcttagggcatatggtcaaacagttggcatacactgagcaaaagttgaagtaaagcttctaaaatggttcttcattgcatataaagaaagatttagatatcatatttcagaatttttaatttgcaagacttttgtgagaagactaaaccttattaaaaacggagtcttctacttttgtttttgtcaaaatttcttactaatttaatcatctgaatactattaagtcatgtttacttaatggttagcggtttagagatctgtcatttaatttgtgatacccccgtactattgctggtatttttcgccagtgtatatcgtgctataattacctagcatcctgagtactcgccgggtgccatagtgattgagccgacctctcaccgagctaagttgagcccccgagccgcccatcaagcccgctgtccctgctccacttcctccgccgttgaaactcatagcggtaccggatccaccatagcgatataggatcgtatcactgggcacactcttcagctgctgccgtctggcaaccgaggcaggaccctccaccaaagtggatcgatacaggtgcacaccgataagtaggtacaacactaggataatagacatcggagccaggaagaatatgaacgtggacagctggaatgagtgcttcactatgacccgcactatgccgcattgctccactcccgaatagtgctcgattccaaattgggcagcctgcggaatggccgtaactatggccataatccaaaccaggacgatgatgcgaatggcgcgactgagtttactcatggcctggcccagaaacggatggcaaatggcaatataccgctccaccgtgaaggccgtaatcgttagcaccgtggcattcgccgatgtctccgccaacagaccacgtccgatgcagatgtactccccaaacacgtacgggtacttggaccagatgtaggacacctcctgcggaacgcccgacaacaggagcaggaaatccgagatggccagcgaaaagaggtagtaattcgtggccgtgtgcattgaacggttcttcttaatcacaatgcaggtacttatgttgcccactacaccggttatgaaaatgagggagtagaccaccgttacgggtatcacgatggccagcggatcgcgtggcggtccaagatcatggctcatattgccagcggacatggcgccggcggcctggaatttttccccttttgttttcacaaaatttccactaacagcgctaaattccactgccgtttaactgctgcggctccggctgcgactcgatgtcccctcaactatgctaattataataatttattggaggcgaccgggcggaggagggacaggtctggactcgcgcttcgcaatgctagatactcgattctaagattcagatactcgactggcacgcaaacgcaccaaattaccgacgaggtcgagatccgtataccgtattcagtattcagtattccgtattcccggctgtttttctagggggcccgacttctcttcaataagttatcgagttaatttgatttcgattcgaattctgattcccgagagcagcctgcaaccgcactccagcgcgctccaaacttatctgataagccgcggcgacatttcattcagatttgtatctgtatctgaaagccagcgacgaagcgtcgctgtttttccctcacatgaacgcggaaggtgagcgacatggttgtaatgaccgagcgtccagcgaacgtgccggctcaattaaatcttgaaaagcggcgatatcttgatgggactagccgatgttagagactaagcacaatggctccgaatacaacgcaatttttgggtaattaaaaaggctaattaacaaaaacttgtaataatgtttgctttggcccatttataaaacacttagttgggaattttgactttgtgatgcacataatcctaaataaaccacgataatgtaaacaacacatcttggaattaaaagccaaaataagatgcaataatattagatgatgcaataataccaaatgaccgaaggccaccgtgcgtatgagtaatgtccagccagcttacttgttagcttataagtaagaatattgttctttgtttatcttactaaagtatattgaaatgtaaacaaataataataattacaattcaaatctaatttagattaattaaa

SEQ ID NO: 21047 - DNA, 1287 bp, DROSOPHILA
atgtccgctggcaatatgagccatgatcttggaccgccacgcgatccgctggccatcgtgatacccgtaacggtggtctactccctcattttcataaccggtgtagtgggcaacataagtacctgcattgtgattaagaagaaccgttcaatgcacacggccacgaattactacctcttttcgctggccatctcggatttcctgctcctgttgtcgggcgttccgcaggaggtgtcctacatctggtccaagtacccgtacgtgtttggggagtacatctgcatcggacgtggtctgttggcggagacatcggcgaatgccacggtgctaacgattacggccttcacggtggagcggtatattgccatttgccatccgtttctgggccaggccatgagtaaactcagtcgcgccattcgcatcatcgtcctggtttggattatggccatagttacggccattccgcaggctgcccaatttggaatcgagcactattcgggagtggagcaatgcggcatagtgcgggtcatagtgaagcactcattccagctgtccacgttcatattcttcctggctccgatgtctattatcctagtgttgtacctacttatcggtgtgcacctgtatcgatccactttggtggagggtcctgcctcggttgccagacggcagcagctgaagagtgtgcccagtgatacgatcctatatcgctatggtggatccggtaccgctatgagtttcaacggcggaggaagtggagcagggacagcgggcttgatgggcggctcgggggctcaacttagctcggtgagaggtcggctcaatcactatggcacccggcgagtactcaggatgctagtggccgtggtggtgtgcttcttcctctgctgggcccccttccacgcccagcgactgattgccatctacgcccctgcacggggggccaaactgcgggatcagcacgagtttgtctacacggtgatgacctatgtctccggtgtcctctactacttgtccacctgcatcaacccgctgttatataacattatgagccacaagttccgagaggcattcaaggccgttctgtttggcaagaaggtatcgaagggttcgctgaattcgcgaaacaacatcgaatcgcgccgcctgaggagggcactaaccaattccagtcaaacgcagcgcttctccattgagtcggcggagcagccgaaaccgtcgataatgcaggcaagtgccccctataatcaatggatagctgcggacaacggctggaaaaactcctaa

SEQ ID NO: 21048 - protein, 428 aa, DROSOPHILA
MSAGNMSHDLGPPRDPLAIVIPVTVVYSLIFITGVVGNISTCIVIKKNRSMHTATNYYLFSLAISDFLLLLSGVPQEVSYIWSKYPYVFGEYICIGRGLLAETSANATVLTITAFTVERYIAICHPFLGQAMSKLSRAIRIIVLVWIMAIVTAIPQAAQFGIEHYSGVEQCGIVRVIVKHSFQLSTFIFFLAPMSIILVLYLLIGVHLYRSTLVEGPASVARRQQLKSVPSDTILYRYGGSGTAMSFNGGGSGAGTAGLMGGSGAQLSSVRGRLNHYGTRRVLRMLVAVVVCFFLCWAPFHAQRLIAIYAPARGAKLRDQHEFVYTVMTYVSGVLYYLSTCINPLLYNIMSHKFREAFKAVLFGKKVSKGSLNSRNNIESRRLRRALTNSSQTQRFSIESAEQPKPSIMQASAPYNQWIAADNGWKNS

SEQ ID NO: 21049 - DNA, 4677 bp, DROSOPHILA
actgggagttaaaggtcaattaggtggtgaaaagtactcagagtagttgagaccgtgcagctgcattcattacgttttcagaaatgaatcaccaactagttttcaccttgaacgccattttcaaatttcgcggcagaaaaaccacaacaaaaggcgcgagaaaaagcggaaaacaaatttgaaaacattgttccgataattgctgattatttgtgagcaatcatttcaagtaatcgaaaaataattttgaaacaggctgtcttgttaggtcaattattttttatcgtgccatttaaacaaaaattatttatatttatttatttattttccatcgtttctccaaattacatttaaaagtttgtaagacttaatactgtaaaacactattattagttattaactatagtttaaaatggcaaaatagaaaatgcgacacgcacaattgaactatcgaaacgttaatatttaaaacaagtaatttaaaataatgaatacatgtataaaaataattaatacatttgtttttaaaaagctatagaaatagctgcatatatgctttaacaatttatgcttaaaaagtctttataataatcctgtgatttcgccgtgatttttgggtttacaatgtgctgttttagaataatggttatttcaaagtgaccactatttttcaattatcttaattttttaatagtcttgtgtttatttcaactttaagttttatattttaatggctctttaaaagcaaaaaaatatttgatttttaggagtgatcgctgatcacgatgctgtaattttttgtaagatatttacttaacgaaggcgaatgcgttgtttcgattggcggtttcaaatgagcgcaagtaaatgtatttatttattataaaaattgtaaaaagggcgcatgaacgcgaccatttatccgttttgatgggggaatgggcagcacaaagtgcgtttatgggcgccctaaagtgatgtaacaattgctgcgaccgcagcagcagcgaaacgcgcggaatggaacgcacggaacgatatcgtagtatcgtacatgcggtcgcaagccatacacgatggtctctttttgtgcaactctgattcgacagtttcggcacaggtcggcagcggcatttcagattgcggagtccgccattttagctaacaaatctataaccctagcttcgtcagcgtgcagtgtgaataggggtcagttgcagtttggaattcagattgttcgcgaatattcgaaagcgtcaaagatgagtactttgcctagggtgttttttgatatgaccgccgacaacgagcccctcggtcggatcgtcatggaggtgagttatttgccctttttttttaattttaaacttaagttgaggtttttttttttgtgacatttgaccagaaagtgaaaaacacgtgatttcccataaagccatttcttacgcctaaagctaagactgtgttttacattatttgcctcaggtgataagtacataccgtttttttctttttatttttacggatttaaaacttgtaccaaatatacacacagcgcaaactcgccctctaatttataagcgacaagtgcaattactttccatgactaattgcatgacaatgcgctatgggtaaattttcaattttccaacccaattggacaggcgcgtttaatcggaaaatctctataattatctctacatcgctgaattttgagcaaacaggcaagcaggagcaccaacccccgcaaatcggccatttggtggtattatctttatagaatggaattttccttattttaattgacgtgtcggcaaactttggccgaaatggtgtgcaatttttaccggtattttatatgcatctgtgcatgtgtgctatatatgtacattccggcgtggtctgcgtatgtgtggctcatacccatacacacatgcagatcaatacacgaacataacctctaagcggtcactcgcgtatgtctgtatgttcttgtcgtgcttgcatatgtacatgtgtgcatgcgggtaatgtacgcgcagatgtacagtgtacacacagagatattcgggtgtgaatgcgcgagttctgtaaacccgtttgcaaacatgaactcactattaattccgccgatgatgtaatgtacacctaatttttgaatagagaaaaagaataggaaacgcgaatgcttgatgtatatttttagtggcctgggaataaagtcattgcccgccaagtaaaccaagccacatgtctaggattttccttccaataggacatacatatgtacatacgcacacttgaacatacatgcagtgcgcgaaaaattctgcacttcacgccgaattactacactaaacaattgaagatttatagagaagcggcattaggaaaagcatttacttgactaatttatacaattgtctcgattactgggtgaattggaaaattgctcaaattctagtgcatttgcaaagttctgtgcattatatgtattttttcccttggtatagatatgcacatacatatgaacatgcatatgtatattatcaaagggctaaaaatggcgatgaaaaaaaagcggcgtcaaaaaacagctgatcatgtttactgccgctcaacatgaattatacagaaaattgtccagtcctcaaaaaaaaaaagaaataaataagcaaaaagtagtggcaaggtcatccgagttcggataaacaaaccttgaagaactgaaaaagagtcatactttgttagcattaatttcttgtttactaacgaaatttctacccttttgtttgtattttgcagctgcgctccgatgtcgtgcccaagaccgccgagaacttccgcgccttgtgcaccggcgagaagggattcgggtacaagggctccattttccaccgcgtcatccccaacttcatgtgccagggcggcgacttcaccaaccacaacggcactggcggcaagtccatctacggcaacaagttccccgatgagaacttcgagctgaagcacaccggctccggcatcctgtcgatggccaacgctggcgccaacacgaacggctcccagttctttatttgcactgtgaagaccgcctggttggacaacaagcacgtcgtcttcggcgaggtcgtcgagggactggatgtggtcaagaagatcgaatcttatggatcgcagtctggcaagacctccaagaagatcattgtggctaactctggttctctttaagaaggtgcgatgcaaaagcaacagcaacattgcaagaagaaaaatctgttaagacgaaaaccatttgcattttctccaaaacatttttttttaccaattactgtactgtaatattacgagaaaaatacataacaaaccaacatattttcaatagacatgttgggtttcctttggccaatcaattgtatgtgggggccaaaagtgaatagaattagtgcccaccaatgtcagaaagcgttcaattggctatataatatgcattaaatctgtaactttaacatttccattcacaaaaaaaaaaacaaagaagaaaaacaatgagacgacaagagtcgagaggggcttagaaaaatgtttgatcttttgatgttggcttacttactactaataatagtattagtaatgctgattatctaattgcatatatatatatatataccaacgttctacgctatgtaccggaatcggaattgtattttcgtcttaataaatctgaataaacggcaaccaactactcaattgtttgttgtcactgctgggatctttggttttggtaaatggacatattttattggaagaatatttcggagctactcaaggtggcgtacaatagattgtattcatgctcgtaggcgttcacatgtcgttcggttatcgccactgtctggtgaagcttctcgtccagctgctccggcgccgtccgctgctggcccgccaaaatgtcgcgcaccttggagcgctccgcgttcaggtgctgcgtgatcgtctggctccagcccagctcatggaactccgtctgctggttcagcatgttgaggatgtagaccaggccgatggcgaagccatcctcgaacagcgagatcttggtctggtcctttttgtagatctttagcttctgcttgacccggtagtcaatgtagttcatgatgagcgccggtgtgatgaggtagaaggttcgcaggtggtggttatgtggattgcacaaaaagggctgaaagccttgcagaagaagctgcaatataaatccatgggttaagctggttacctaacttgttaagatcgtagactgcaccttgaagtaatttgtgctatcggaatagcactccttcatgtgacccaggctcttctcgtactccctgatggaaccctccgtagcctcgtgcactttggagcccccgcaactgaagttgctgtcgaatctggttttatacgagcgattccggaagttggcattcttgcttccagcctgcaggaggcgcacatagccaacagcgttgcctaaaagcaatatttacgtttatattttaagcattttcttgaattatggtctttaaccacctaccgacttgtgtgataaccttcctgaaaagatccatatacgtctcgccattgctggagcagcctagccttctgatcttcttaagaaaactatcggcgcgctcatag

SEQ ID NO: 21050 - DNA, 1206 bp, DROSOPHILA
gcagcagcgaaacgcgcggaatggaacgcacggaacgatatcgtagtatcgtacatgcggtcgcaagccatacacgatggtctctttttgtgcaactctgattcgacagtttcggcacaggtcggcagcggcatttcagattgcggagtccgccattttagctaacaaatctataaccctagcttcgtcagcgtgcagtgtgaataggggtcagttgcagtttggaattcagattgttcgcgaatattcgaaagcgtcaaagatgagtactttgcctagggtgttttttgatatgaccgccgacaacgagcccctcggtcggatcgtcatggagctgcgctccgatgtcgtgcccaagaccgccgagaacttccgcgccttgtgcaccggcgagaagggattcgggtacaagggctccattttccaccgcgtcatccccaacttcatgtgccagggcggcgacttcaccaaccacaacggcactggcggcaagtccatctacggcaacaagttccccgatgagaacttcgagctgaagcacaccggctccggcatcctgtcgatggccaacgctggcgccaacacgaacggctcccagttctttatttgcactgtgaagaccgcctggttggacaacaagcacgtcgtcttcggcgaggtcgtcgagggactggatgtggtcaagaagatcgaatcttatggatcgcagtctggcaagacctccaagaagatcattgtggctaactctggttctctttaagaaggtgcgatgcaaaagcaacagcaacattgcaagaagaaaaatctgttaagacgaaaaccatttgcattttctccaaaacatttttttttaccaattactgtactgtaatattacgagaaaaatacataacaaaccaacatattttcaatagacatgttgggtttcctttggccaatcaattgtatgtgggggccaaaagtgaatagaattagtgcccaccaatgtcagaaagcgttcaattggctatataatatgcattaaatctgtaactttaacatttccattcacaaaaaaaaaaacaaagaagaaaaacaatgagacgacaagagtcgagaggggcttagaaaaatgtttgatcttttgatgttggcttacttactactaataatagtattagtaatgctgattatctaattgcatatatatatatatataccaacgtt

SEQ ID NO: 21051 - protein, 165 aa, DROSOPHILA
MSTLPRVFFDMTADNEPLGRIVMELRSDVVPKTAENFRALCTGEKGFGYKGSIFHRVIPNFMCQGGDFTNHNGTGGKSIYGNKFPDENFELKHTGSGILSMANAGANTNGSQFFICTVKTAWLDNKHVVFGEVVEGLDVVKKIESYGSQSGKTSKKIIVANSGSL

SEQ ID NO: 21052 - DNA, 3385 bp, DROSOPHILA
ttacatgtgaactccaatgtcgattgcaaaagaattgccagctgtagtattttctgcggtgctgattccaaaaacgagtcgaatagacgaacgaaactaacattgcactcctccgtcatgagtttttggtaatatctgtaagataagaattcagatattcgttataaacattctaaagtgctcacttatgatgaaaagagaagataaactaaacggcagtactaccatttagggcattaagctactattaactagttttatacactgacactagcattactcactcgatctccgcctgcttgtcatcccgctccttggccaacgagtatttgaacgcatagtttaggacatagacatcgcggaagagatatgagatcacagcatttgagtacacccctcgctccaggatgcgtttttcgccggcatgagcgctcttcaagctgaaattcaaatacaaatttatcgtttagctgtagatttcgggggaagtacacgctatcgcgatatgtcacatacgtatgtatatatatgaccgatgtgaccaccatgggcaccagaatggagccaatggtccaggcgcagtatccgtaggactcctccatccagtacacgtacgccaggctccagttgatgcaaatcgagacgaagcgccacagaatggacaccacagtgagcagcatgcttagtttcgagatcggccccatcataagggcgtccacttcggttctttgctccgcggaggccatgtctcctccgcctccttattgcacatgtgccaccctagccacacacaaatatccaaggcctcgacctccaaactactctcgccttcaacttgctgacactggttttcgactaaaaaaaaaaacaaaacactgaagattagaataaagactgaattctacgagaacttgttcatttgaactagagatagatcgatcgtacgcttttatcggcggaaagccgatagtgagctgttgcatcgaaagcgtcatcgacgaagtgccatctctagccgacgggtgggatagaatctccaattgggatttccatccagtgatttcctaattaaattaattttttccaattgcccaaaggcataggcatatttcgcaaaacgaacaaatatgtttgcttgaagcgcatagaatcacaaacaaaagtgcaaatctcagagcttaaaaaccagagcaaaggagaataacggaagaggaggcaagcaaaaagacaaagaggagtgcaaaaaatacagcaaacatcatgcacaggacatatgtaagccatgcgatatacgccatttggctggttatattcgccactgccggcataatggcccagctagacctggatcagatccagacccagctgcccgaccagctgaggaagtcaaactttagcgtgaacgacgccaaggagctatttcgcaacaaatgcatcgaggtggccggcgaggaggcgggcgtcgaggcatacggcgagatcgagtccggattcatggtgctaaccgagtgcctcaatggcattgtcaactacacggcaatgcagcaggagatacaggaagcgtcgcccaagggcgaactggatgtggtcttcaacaagtactgcagccggcgttcgaatgccgtcgagtgtgtggatgcgttcacggccaaactggtgccctgtctggtgcaggaggagcgcgagggccaggatgtcattaagcagatcatccagagtctgctcaactttgtgtgccacaaggatggcgatcagatagccctgttcattgccgaaaagggacccgaatgcattgagtcccagaaggacaacattcagcagtgcgtgaacagcacgttctccgagtacctgaacgtgtcggatctgcaggacaaccgcatcaggagcatgcccaagctgacggtcggtcagaaacagtgcgacgagatgctgactctgcaggcgtgtgtggtccgtaaactggagcaatgctcggacataacaccggcgaatctcgtcgagtccatgttcaacttcattcggaaccaaacgatgtgccgtgacaatcagaaatcgccgctcgttgcggctgccgccagcggagggagtcgggtattccatcaagtgtggacccatgtgggcatctttttgctaatcctgcgattcgctctacaaaagtcttcttagttctaagtctgggcgtccgctatatatctcgaatccgaatctgtaaaacgccttctcaacgctttgactttggcattccaaagcgattaatcaaagagcacgataatcactgtttttaagcttttgcttcgcttatattaatatgcatgtagccgtggaacaggtgtccatagttcaaccgctttcggggataagcatgccaaggtgctgctgctccaggctagccagccatatcgtttttgtttggtgcttctaatttatgtaattaattgccaattgatgtatgtatgtatgtagtattgtaaacaatgcttatacttccttctagttttacttctgaatcagaaattcttctggcctttgtcatgcgtttatctaatgctttatttccgtttaatgaaatggcgtggcttgcggttctgattcgagttgggtttgtattaatctctttcatttaaattcactgagggaggcaaatggtaatctcactatttcatagtggatcgggtatgggtttgggaaatgaaatgctatatatgtaaaaacaatgaatggatatgttttgtaaatgaatatacgtatcattattgtaataataaagtgataaatgtaaaaagaaggacgagttcatttaaactgggagttaaaggtcaattaggtggtgaaaagtactcagagtagttgagaccgtgcagctgcattcattacgttttcagaaatgaatcaccaactagttttcaccttgaacgccattttcaaatttcgcggcagaaaaaccacaacaaaaggcgcgagaaaaagcggaaaacaaatttgaaaacattgttccgataattgctgattatttgtgagcaatcatttcaagtaatcgaaaaataattttgaaacaggctgtcttgttaggtcaattattttttatcgtgccatttaaacaaaaattatttatatttatttatttattttccatcgtttctccaaattacatttaaaagtttgtaagacttaatactgtaaaacactattattagttattaactatagtttaaaatggcaaaatagaaaatgcgacacgcacaattgaactatcgaaacgttaatatttaaaacaagtaatttaaaataatgaatacatgtataaaaataattaatacatttgtttttaaaaagctatagaaatagctgcatatatgctttaacaatttatgcttaaaaagtcttt

SEQ ID NO: 21053 - DNA, 1385 bp, DROSOPHILA
aagtgccatctctagccgacgggtgggatagaatctccaattgggatttccatccagtgatttcctaattaaattaattttttccaattgcccaaaggcataggcatatttcgcaaaacgaacaaatatgtttgcttgaagcgcatagaatcacaaacaaaagtgcaaatctcagagcttaaaaaccagagcaaaggagaataacggaagaggaggcaagcaaaaagacaaagaggagtgcaaaaaatacagcaaacatcatgcacaggacatatgtaagccatgcgatatacgccatttggctggttatattcgccactgccggcataatggcccagctagacctggatcagatccagacccagctgcccgaccagctgaggaagtcaaactttagcgtgaacgacgccaaggagctatttcgcaacaaatgcatcgaggtggccggcgaggaggcgggcgtcgaggcatacggcgagatcgagtccggattcatggtgctaaccgagtgcctcaatggcattgtcaactacacggcaatgcagcaggagatacaggaagcgtcgcccaagggcgaactggatgtggtcttcaacaagtactgcagccggcgttcgaatgccgtcgagtgtgtggatgcgttcacggccaaactggtgccctgtctggtgcaggaggagcgcgagggccaggatgtcattaagcagatcatccagagtctgctcaactttgtgtgccacaaggatggcgatcagatagccctgttcattgccgaaaagggacccgaatgcattgagtcccagaaggacaacattcagcagtgcgtgaacagcacgttctccgagtacctgaacgtgtcggatctgcaggacaaccgcatcaggagcatgcccaagctgacggtcggtcagaaacagtgcgacgagatgctgactctgcaggcgtgtgtggtccgtaaactggagcaatgctcggacataacaccggcgaatctcgtcgagtccatgttcaacttcattcggaaccaaacgatgtgccgtgacaatcagaaatcgccgctcgttgcggctgccgccagcggagggagtcgggtattccatcaagtgtggacccatgtgggcatctttttgctaatcctgcgattcgctctacaaaagtcttcttagttctaagtctgggcgtccgctatatatctcgaatccgaatctgtaaaacgccttctcaacgctttgactttggcattccaaagcgattaatcaaagagcacgataatcactgtttttaagcttttgcttcgcttatattaatatgcatgtagccgtggaacaggtgtccatagttcaaccgctttcggggataagcatgccaaggtgctgctgctccag

SEQ ID NO: 21054 - protein, 301 aa, DROSOPHILA
MHRTYVSHAIYAIWLVIFATAGIMAQLDLDQIQTQLPDQLRKSNFSVNDAKELFRNKCIEVAGEEAGVEAYGEIESGFMVLTECLNGIVNYTAMQQEIQEASPKGELDVVFNKYCSRRSNAVECVDAFTAKLVPCLVQEEREGQDVIKQIIQSLLNFVCHKDGDQIALFIAEKGPECIESQKDNIQQCVNSTFSEYLNVSDLQDNRIRSMPKLTVGQKQCDEMLTLQACVVRKLEQCSDITPANLVESMFNFIRNQTMCRDNQKSPLVAAAASGGSRVFHQVWTHVGIFLLILRFALQKSS

SEQ ID NO: 21055 - DNA, 3670 bp, DROSOPHILA
tatttatgcatgcaggatgtttggccactacagcggcgctcacagctggcttatacaactttcgcactggcaatcgcaagatgtcgcagctgatgatgcgaagtcgtatcgcggctcagggatttaccgttatggccctagttgtcggcgtcgtcatgacctacactgataaaaaataactacaacgatattattatgaacccaaatatataggctgaatttgcattcagttggattctgttatttttttttttttagtcccatgttacaaaaagctaatactaagggctgcaaatttgtataaatatttaaatatacgctaaccattacatagatggtatctaaaagatgcctatagataatacttataaaatgtctcaatttattgtaatcaaatgtgggaaatcttaaggggctactattaatgtgatagttttagctgtgattaaaaaatagtttcaaataaataatgcatatcatgtaaattattatgagttttgcggttatcttagttatcctgttcatcttggttgatgcaaactcttaaaatcatttaaataaatcttagaactttccttaattaagctgcacaaagagttcacaataacatttggaggaaatttaaaatattggcttccattaacgctatcaagttttaaaatatagtaattaaatcgtttatatttatatcattatagaagagtaacaatccttagtagtttattgcattgaattgcaatagagcagtgatggtgtcaaaactaagtaggtgtttcatattgaaaggtcccttagtgttttgataaccatgtagccgtacatatacagggtatacctgggtgtgtccaataggcacgggggtaactgtcccggattcaaaggtatcgccaagttactgacttttcctattcggcggcgggggagatgcgcgcgcacctccgccggagaggatagccaagtattttgggatagttactaccactcagttctgactgggatttccttgacgcaagtcagggcattgtgttgaaaggttcgaaagtgttttcaattccaagtgtggcaatagtattaattacctgttaatgggttacaaaaaggttcctaccatctcttggtgtttatcaaagtaccaaaatctctgggattaaaataatatctatgtacaaacacccatgggaatgcaaaggaattttctgctaatggctttgtttgcacttgtgtattcgaaacaaacacaaacttttagtccatctatttaaaaagtagtacttgctagagagtctaaagtgttaaaactatttcattacgggttgcgattagtcgatttttagttagttgtagaaaacctacccccaaaaacgatgttgtgaatcgaagaacacaacacagatacacatgattatgcgttggatttggatggggtacactggtacatggatacgcgggtatgctccaattgattcaatgttagttacatgtgtgctctgtacacttttagcttcatgatgaacatgctctttggcaattgtgtgggcagctgtgaccagctggccggtccaccgccggactttatattatcgatgccgccgccgccgctgccgtcctttctaatctcaaagccggcgacggtggacatcctggtgccctccaatgagtcgcagccgtgctttgccgccttcatgtgcggccatgggatgcagcacaacgagagcggaaacgcgctaatggagctggtgagaagtgattccaagagtctggagagcgtctggctgtttgtctcgtcctgcatcgggatctttgtgttcggctgcttcctggccctcatcgtgatgcggtgcagagagtaagtcatggatttgcgcgagttttggtcgtatttccgacattcctacgttttgccattgcagcagctcctttttctcgtaccacgacgccaatatcaagcagacggccattaatgccctcggcgaggcgaccaaatccaatgccttcacatccggcggaattctttatccctgcgccacggccaacagtagggatctgctccagagccagctggtcaacgatagccgtctactgtgggccacactaacgccccacggcaccaggcacttcatcatcgagaactcccaggatgggcactacgaatcggtggactatcgcggcaagtcgcacagccaggtgttccgtggctacgagaagcattcgcagtcgtttgtcaaggttggtgaactagggatagggatgctataataatgggccaaatcatgtggtctatcttaaggtgtccttaattgaataagtcatcggttgtttaaaaaacaagatagaatgtaaaacttaattcatatttctgaccttttgcagtcctttgacaacaatggcttcgttgactacgactatgaggatcccacgccattgatggactcctaccatgatgacatggactccggctaccaggagccgcacgaggtgactggctccctgaagcgttcggcgatgcgaactgtggaatcactgaacactgacaccccgaccagcggcggttcgagctccaactatcataccagcgccaatcagatcggcaacaccaagtccattagccgcaagacgacgctgtcacgtcgcatcagcgatgcctcctcccagaacggaacatccatgtaaatccatgctgtcaattgggtaatgtacatttcccatggaatggaggccattgggattgagatcggggatactcggagatgggagaagagagatccggtcatgtcgtccacaatagaaactgcagaacgcagtgaatacacgctgatattttagactatttaaaaaaaaaaaagagtgaggcacaagtgcgggctgttctcggggatcacaggagcagtgcgtccaggagaccaacccgggctaacaggattacaactgcttgaatcgtagctcattttaagcccactatggattgcatccgctggtgtaccatgtataataatcgtgcacgaaatactcgcttgtaaacacactacacacacacacgtcttttataaataatacccgcaactattaaaactatatcagataatccaactaacgctgatcggaaaggccaactattgtatctgcatatagctattaccaacctatcacttggagtccttcacgcccggatcggggtcaggggtcatgggtcaggaataaataaacatacatagattttgaaaatactctgaacacgtctcgccttcagcgctcgtttaattgttagccataagaacaataaataataataaaaattctcagtagtacataaaagtctgcaatcgcattggccatttcgctcgattctatatatattatatatatatagatatatataaagatattgtcatgggtttaagccgcagaggggattttctagcctcagaaagaaagctatagttccagaaacaatttgttatacggaaagtttaaaaaaaagagtatattatcgaagttctcgctgatttagaaagttattcgaaactaagaaatctttcgagcgaaactggctttttgattggcagatcagcatcatcaacatcagctgcatcatcgtcgtcgtcgtcatcatcatccttaaccagtatataaaatcttaggattacaaaaaaagaatgtgtagttagaaatt

SEQ ID NO: 21056 - DNA, 994 bp, DROSOPHILA
tccttgacgcaagtcagggcattgtgttgaaagcttcatgatgaacatgctctttggcaattgtgtgggcagctgtgaccagctggccggtccaccgccggactttatattatcgatgccgccgccgccgctgccgtcctttctaatctcaaagccggcgacggtggacatcctggtgccctccaatgagtcgcagccgtgctttgccgccttcatgtgcggccatgggatgcagcacaacgagagcggaaacgcgctaatggagctggtgagaagtgattccaagagtctggagagcgtctggctgtttgtctcgtcctgcatcgggatctttgtgttcggctgcttcctggccctcatcgtgatgcggtgcagagacagctcctttttctcgtaccacgacgccaatatcaagcagacggccattaatgccctcggcgaggcgaccaaatccaatgccttcacatccggcggaattctttatccctgcgccacggccaacagtagggatctgctccagagccagctggtcaacgatagccgtctactgtgggccacactaacgccccacggcaccaggcacttcatcatcgagaactcccaggatgggcactacgaatcggtggactatcgcggcaagtcgcacagccaggtgttccgtggctacgagaagcattcgcagtcgtttgtcaagtcctttgacaacaatggcttcgttgactacgactatgaggatcccacgccattgatggactcctaccatgatgacatggactccggctaccaggagccgcacgaggtgactggctccctgaagcgttcggcgatgcgaactgtggaatcactgaacactgacaccccgaccagcggcggttcgagctccaactatcataccagcgccaatcagatcggcaacaccaagtccattagccgcaagacgacgctgtcacgtcgcatcagcgatgcctcctcccagaacggaacatccatgtaa

SEQ ID NO: 21057 - protein, 318 aa, DROSOPHILA
MMNMLFGNCVGSCDQLAGPPPDFILSMPPPPLPSFLISKPATVDILVPSNESQPCFAAFMCGHGMQHNESGNALMELVRSDSKSLESVWLFVSSCIGIFVFGCFLALIVMRCRDSSFFSYHDANIKQTAINALGEATKSNAFTSGGILYPCATANSRDLLQSQLVNDSRLLWATLTPHGTRHFIIENSQDGHYESVDYRGKSHSQVFRGYEKHSQSFVKSFDNNGFVDYDYEDPTPLMDSYHDDMDSGYQEPHEVTGSLKRSAMRTVESLNTDTPTSGGSSSNYHTSANQIGNTKSISRKTTLSRRISDASSQNGTSM

SEQ ID NO: 21058 - DNA, 2783 bp, DROSOPHILA
atcagtaattcctatatatcttgaatttcaaatctttatatttttagatgaaaaccacaagcaatgattgaaaacttgaaaaatccattcagcgtataatttaactgctttaattgagcaaatcactacttttaaataagaaggcagaaaatttaagaaagtaatatttcatagaatagaatttcatagattaacgctctacctcaacacggtctaaatataatatagaatcatttttgattaaatcttaagttttaaaacagttttcaattaacaaagcatttaaacatttttaaaattattattttacctgtcacgagagcaaagagagccaccaacactaccaaagtccaactgcacttgctgtaccacatttttcaataaatattatttcgcaagctgcacgcaaattgtccgacgtcagttataattttcttttgaaattttcttttggtaacttttagagaacttttcagaaaccgaacacttcaccgaataccaggactttctactttccacttgccacttgttgatcagagtcaggtgccaacgctcttcgaattgccaacaaagtgcggtcggccaacggcttttatagcttagaagaacggtacgcaccgcacattcaccgttagtccgccgcagagataacgggtcagccaatacgaacgttactgacgactgcagagcctccagcacgaagaaatccgaacggtaccgaagccatctccatctgccaatgagctgttagacggaggagcccacgcaacaggctgccgagtgggtggtgtttagtgggcacagtgggtggcaatatggcatagtgtgggagtaacagttgcatagtaaggggaatcccaaagaatagctccatcttaaaagtttataccatagcacactttttggggcattactacgccttccttgggttaagttcatttggtgcccatcacttattttcttattttataccacaacgtcatagcaggcagaaaaagagttttgataagacacaaaaggcacatctacagtggtttatttggcctgtccttacacgatatggcagtgtgagtggtagctataagagcaggcgcgacatgtttcatagtcggatgaagtgtgtggagtgtgtagattggccatttaccaaatataacatttcattataatcatttagtttcgaacgcaattcggaagcaaaatgacagtctccaccgaagataagtgacgagataggaggatgagtattgcttggagcattatatgtatatcgtgtatatcggctttgatgtttcggaaagtgttgcaaatctattccagtttagcaaggatatcgctctcgcggaacagaacatactcgcgcttgtcgtccatatcgaccttagttccaccgtatttgggcaacagcacgcgatcgccctccttgacgccaacggacaagtgtccagctccagcaggattgcgggctccgggtccgacggcaaccaccacgccctgcatctccttgggcaccgactcctcgggcagcaggatgccgcccgcggtggtggtcttcacctcgaaacgctggattagaatgcggtccagcatgggaatcaccttcttaataacgttggacatcgtttcttaaggaagcagaaaaaatgtaacattcaaacagtataaagactattcactttgagatttcactttttgttaccttgtttgtgagagttttactatgtttttcactttttataattattatataatttttttttaattttggaagaacgatgttgttcctatactttctagctgtagactgacgaatatcaggtcgagtcaaacccaatacgacaaacagcaaaagtcaaggctatagtgatacgacctagaatttgtgtatttcacagttaactaagatctaacttgtgcgttataaaaatgtttcattaactatcatcgtaatctttaaatgaattgtgagatatatattaataatttaaaaataattcaaataatgtaagctattatttaaatataaaaaattcgcataaatccttttatttacataatagaaaactaattcgtttataggcaataattaaaggttctaattaaatgcaaaacagcagtctttcatgaacaaaaatgtttgccaagcaaacgcatacatcttcacaggctgacgacaacactgcgtatgcttatttttctcgtctagccggcttaaattaacctcagcacgtgaatcacgagtcgtgaccgtcaattgaaattccgctaattaagaacaaaacgagaaccgcacaatcaaagtcactgcagcatcagagattataaaacgttcgaaagggtgcgaaaaacatggtccactctagcgtcgttttgctttgcttctttcgtgctgctctgattaatttcccacactgcagtcaacgccacctgttggcagcttgactcactaaaaagtgcggcaggccccctgccgtctcctattttctccctttctctctctcttattcgttccctctgtatgtgtggcttccttccttgagcgtacgtgcttgtttattggtgtgcgtgagtgggtgtttgtctaaacttttggcacattaaacgctgttttgtgtggctttacctattgtttatatataccctgtaaaataagcaggctgatgcgcgtgtactcctgatatagatggctaaatattaagaatgttttttaagaggattaaatgtttaaaaaataatgagtatttcaatgtcatctgaaagaaaagtttaaatattgtgcgtca

SEQ ID NO: 21059 - DNA, 709 bp, DROSOPHILA
aacaacatcgttcttccaaaattaaaaaaaaattatataataattataaaaagtgaaaaacatagtaaaactctcacaaacaagaaacgatgtccaacgttattaagaaggtgattcccatgctggaccgcattctaatccagcgtttcgaggtgaagaccaccaccgcgggcggcatcctgctgcccgaggagtcggtgcccaaggagatgcagggcgtggtggttgccgtcggacccggagcccgcaatcctgctggagctggacacttgtccgttggcgtcaaggagggcgatcgcgtgctgttgcccaaatacggtggaactaaggtcgatatggacgacaagcgcgagtatgttctgttccgcgagagcgatatccttgctaaactggaatagatttgcaacactttccgaaacatcaaagccgatatacacgatatacatataatgctccaagcaatactcatcctcctatctcgtcacttatcttcggtggagactgtcattttgcttccgaattgcgttcgaaactaaatgattataatgaaatgttatatttggtaaatggccaatctacacactccacacacttcatccgactatgaaacatgtcgcgcctgctcttatagctaccactcacactgccatatcgtgtaaggacaggccaaataaaccactgtagatgtgccttttgtgtcttatcaaaa

SEQ ID NO: 21060 - protein, 102 aa, DROSOPHILA
MSNVIKKVIPMLDRILIQRFEVKTTTAGGILLPEESVPKEMQGVVVAVGPGARNPAGAGHLSVGVKEGDRVLLPKYGGTKVDMDDKREYVLFRESDILAKLE

SEQ ID NO: 21061 - DNA, 2636 bp, DROSOPHILA
taaagagcagtgcaggtacaaaaagccatttgtaactgctttgcttgttttgcgacacagaagacgaagcgaaaaaaaaaattaattaacaaaagggaatacggaaaaaaaccgtttgatgcctttcagtgctatttccacgaacgcagctgtatgtacatacgtgtggaacacacaaacatatgtacatcgcagcgacccgctacatacacatacacattttcattttgtgtgttcccgtctgactgtactttcaattcgaattcgaaagagaaaaaaatgttctcttatgttttaaaacaaattctccctcaattctctctgtcatacagagagaaggagtaatgcatgtgtgtatgtttgtaatgtatgaggtcacaaaaatccaaaaaaaaaaataaaatctcaattatattggccattaaaattatttattaatttttccatactatacttaagattttcgctttaaaatttatttgcggttttttaaattatttgtttaaatcgattatttatatatgtatattttaatatttattgacttcgaaatactttaaaataccagccctgttctggtttcttcgaattaaaacaatataaattattttaaatggtgaaattaatttcgttctaaaaaattcaggtatatttatttcttagggaaataaagtattatttgctgctagttttattatgttaaaaaaaggtatagacaaattagtagatgtgtaattttggtaaagggtgtgaaccatatcaaatgttaatacatgtaatatagttatattatagcaaatatattaaaaaaaagaaagaaaaaaaaggcgttgtttatttaaaaataacgtttttccattcatggcttgtttcaatctcagaacgtttcttgatgtttgtcgttttggaagtcgtgatagttcgagaaaactatcgctttattagtgtgaacgcacgcacatcgtaagcgttggtgtcatctccaattgaataatagaatttgacttgcttgatattgttttactaatattgcccgggactaagagcgatatgtcgaacaaaattgaagtctcgcttccggaggaggaactggattggatacaattgcgccaggacctgggacccgttgccgaggtggaaacgaccaaggagaagttgcagcgcaagatcaaggagaatccgctggttccgttgggtgagtgtgtttgccgggttatgtaaacaaaacaatgtacatatctcttcattgcttctattgtttattatttatgcatgcaggatgtttggccactacagcggcgctcacagctggcttatacaactttcgcactggcaatcgcaagatgtcgcagctgatgatgcgaagtcgtatcgcggctcagggatttaccgttatggccctagttgtcggcgtcgtcatgacctacactgataaaaaataactacaacgatattattatgaacccaaatatataggctgaatttgcattcagttggattctgttatttttttttttttagtcccatgttacaaaaagctaatactaagggctgcaaatttgtataaatatttaaatatacgctaaccattacatagatggtatctaaaagatgcctatagataatacttataaaatgtctcaatttattgtaatcaaatgtgggaaatcttaaggggctactattaatgtgatagttttagctgtgattaaaaaatagtttcaaataaataatgcatatcatgtaaattattatgagttttgcggttatcttagttatcctgttcatcttggttgatgcaaactcttaaaatcatttaaataaatcttagaactttccttaattaagctgcacaaagagttcacaataacatttggaggaaatttaaaatattggcttccattaacgctatcaagttttaaaatatagtaattaaatcgtttatatttatatcattatagaagagtaacaatccttagtagtttattgcattgaattgcaatagagcagtgatggtgtcaaaactaagtaggtgtttcatattgaaaggtcccttagtgttttgataaccatgtagccgtacatatacagggtatacctgggtgtgtccaataggcacgggggtaactgtcccggattcaaaggtatcgccaagttactgacttttcctattcggcggcgggggagatgcgcgcgcacctccgccggagaggatagccaagtattttgggatagttactaccactcagttctgactgggatttccttgacgcaagtcagggcattgtgttgaaaggttcgaaagtgttttcaattccaagtgtggcaatagtattaattacctgttaatgggttacaaaaaggttcctaccatctcttggtgtttatcaaagtaccaaaatctctgggattaaaataatatctatgtacaaacacccatgggaatgcaaaggaattttctgctaatggctttgtttgcacttgtgtattcgaaacaaacacaaacttttagtccatctatttaaaaagtagtacttgctagagagtctaaagtgttaaaactatttcattacgggttgcgattagtcgatttttagttagttgtagaaaacctacccccaaaaacgatgttgtga

SEQ ID NO: 21062 - DNA, 553 bp, DROSOPHILA
ttgacttgcttgatattgttttactaatattgcccgggactaagagcgatatgtcgaacaaaattgaagtctcgcttccggaggaggaactggattggatacaattgcgccaggacctgggacccgttgccgaggtggaaacgaccaaggagaagttgcagcgcaagatcaaggagaatccgctggttccgttgggatgtttggccactacagcggcgctcacagctggcttatacaactttcgcactggcaatcgcaagatgtcgcagctgatgatgcgaagtcgtatcgcggctcagggatttaccgttatggccctagttgtcggcgtcgtcatgacctacactgataaaaaataactacaacgatattattatgaacccaaatatataggctgaatttgcattcagttggattctgttatttttttttttttagtcccatgttacaaaaagctaatactaagggctgcaaatttgtataaatatttaaatatacgctaaccattacatagatggtatctaaaagatgcctatagataatacttataaaa

SEQ ID NO: 21063 - protein, 102 aa, DROSOPHILA
MSNKIEVSLPEEELDWIQLRQDLGPVAEVETTKEKLQRKIKENPLVPLGCLATTAALTAGLYNFRTGNRKMSQLMMRSRIAAQGFTVMALVVGVVMTYTDKK

SEQ ID NO: 21064 - DNA, 2750 bp, DROSOPHILA
tgagacgaactccctgaaggtaccatactacgtaaaggacaacttctattcagaatatcagggatcagtggcccgattagaggaatccgtggaagaggactttgtgaatcatctaaaacactcctgcagtcgagagaggaattatcgtaagttaggcagaggaactatactaaactgatattaacataaacgatttacaggcgactcaatgctggccaaggcgcgtacctttggcgatcgggatctgtacagaaaggcgcagaacatcaatacgccatcgtgcgagaatctgcaaaagtatttaatcacataaattagttaatgctatcacacgaaaagctactcctcaaatccaccactatttgaaaccttaactgctgggttgtgtagttattgcatattttgctttagttgttataaatgaatttcattgtctattttgtttcataatttatatgtctatttaaataccttccctctctcccccaaaaaaaaaaatgaaacggaatgaaacgtatagagctgctatgaggcatcaggttttccccaataacgtttggtagcattttcatttcgtatagaaagcaatcgggcaatatgtgaaagcgaagcaaacgcaactgccaaaaagtcatatttacacgatttacgaatataagtgggcggctgagacgaaggactttgcgtttgtttcatttagcaatcggatacataaattataaacataaattatacacggatacgacgcatcatcacatttttcttaaggacacggaacgcatgggcagtggcgatattctgaataaaattgcaagttattataactccaaaataaattcgtttagacgatgtaagcactctcactcatttgtgggcttaaaagtctttttgttttgtattgttttcttcgctagagtttataaatgtacaaataaagcagtgtgttgttacgctacataaaagaaacagacggcggattgcttcggattccacgagcacctcaattgctgatgatggcttccaaggcggccaccacatcgccgctctgctcgcggagcactttctcggcatgcgccttgctaaccagcagctcgttcatctgaaagggcagaggggaaggaaaccattacaaaaggaagatcggaagaaagttatctatgggaaaccaaaggaggaaatctaagggaactggagctaatgcaatgaactatatttgtatctctacaatgaaagggaatacttccttgtagtttcgcatacgtacaatcagttcaatgtcctccttcttgacttggaccttctggagctccttctctttggctactcgcagttcgttctccttgttacgctggttgccaaactgctccacggcctgtaaattataaaaaaaaaggatgttgttaatacaaatattgccttgctaataaatatatgaacttacgctggatatattgtccgcagagatctccttttcctcggcataatccgtcacacgttccaaatctaaaagcaagatgaagttttagtattaatactccatatttattaaggattggtgcacaatacatgatatttcatagatgccagtcatttttttgcaatttttcagtggaatgagttgcggcatgtgaaatatttatttacctgcggcgccgtcgtcatgtcgtttcacatcggatttcttttgctttttatcctgctcgtcatcctccacttcttctctgccgttgatttccgctgcttccgtcattttcaattgtttttttttatgtttaattcaataaaagttccgaaattctttgcgatttcttcacctcgtgcgattagagatggactactagcgataacacaatcgacataatttaactaataatctatgagtgtttgcttggcttttattgtaatagtttttgaagttttttatgtaatttcgaatttggaaattgtgtattttcaatatgcacttagcgctgtattaaattaattgcatttatgctgcgtgtcagcgttgccacctgtctgtttttgatcgaaagcgacagccctgtttcaaaaggcgcgcagtttgaaaagtgtgcttcaacaattgtacacttccaaccaaagaaacagtaaaatcatcaaaacgccaagaaatagtgtcatattgttaaacaataaattaaacgaagttgattttgacaagaaaggcgaggagaggagagcagttaaaagttgaccccacaagttttaagcaaaacattgacacatctttctttaaatttaaagtcaatgctaaagtttttaaccgcaaaactaattaaaaatgtctagcacatgcaacgtaagtaactgcttttggcgctttgctcgtttctttcgcacattcccaatttttttgtgctgcggtcgaaatgttaattataagtttgatgctccggctataattagattttgaagcagtagagacatgcatacttctctgctctgatgtgcgacatcctttttttagttcagctcccccgccgctcctctagtccactgtgtgtgtgtgtcactgtgtcctgtgtgtcctgttgacataatcgtttgccatcatgattaatttaattgtcactttgacgtaaaggacactcacagttcctcctgcttgcgtgcttttgcccggtttgaaaatcaagattaattagcatccatgaccatgggcggtcaacatcatttgttagggggcgtgtgcgcagatggggggttggtttgcaccaaaaaaaaaa

SEQ ID NO: 21065 - DNA, 375 bp, DROSOPHILA
atgacggaagcagcggaaatcaacggcagagaagaagtggaggatgacgagcaggataaaaagcaaaagaaatccgatgtgaaacgacatgacgacggcgccgcagatttggaacgtgtgacggattatgccgaggaaaaggagatctctgcggacaatatatccagcgccgtggagcagtttggcaaccagcgtaacaaggagaacgaactgcgagtagccaaagagaaggagctccagaaggtccaagtcaagaaggaggacattgaactgattatgaacgagctgctggttagcaaggcgcatgccgagaaagtgctccgcgagcagagcggcgatgtggtggccgccttggaagccatcatcagcaattga

SEQ ID NO: 21066 - protein, 124 aa, DROSOPHILA
MTEAAEINGREEVEDDEQDKKQKKSDVKRHDDGAADLERVTDYAEEKEISADNISSAVEQFGNQRNKENELRVAKEKELQKVQVKKEDIELIMNELLVSKAHAEKVLREQSGDVVAALEAIISN

SEQ ID NO: 21067 - DNA, 4331 bp, DROSOPHILA
acaataaatttttacattctcctcaatttcatgggggagttcttcgattttggtgggtggtgggtgcaattaaaccttgaatctgaaaattttttccgagtttacatatacacaatatataaatcaacttcattatcatatccgtatcattactcatttactcgttactcattagtcatactcatcgaatatacatcacaatcaaagtgtacgctttgtaattatacgcagtaatcggtaattataatagtaataatagtaatcataataataataataataatagttacgctttctcagtgaatttctttatttctgcttgtatttatgccttcgatttttacttttagtttttactttactttaaatttaatttattttactttccgttttgttttttatgctctttttttgtttgcattattttttaggtttttttgtttttgttgttgttgtttcttctttaattgctgcttttgtttcaagttgtgttttgacttaagattaaaattaattcataattattactcgtaaacatattaatcataaggtaatattaaatcaacaaataaaatacatttaaaatcaagtttatcaaagtgaattaaattacttgaaatcgaaacaataaacggtacggctcgctatgcttttgctcctgcatttgcattatctgtctgcgtttaacataatctattgcgtttgtagtattgccgccgtatgcattcttgaggttctccgccaatcgatccatcagatatctcacatggcggccactgcatcgactggagttctgctttctgttgcgattgttgaatcgattgttggttgtagtagtttgggttacttgttgttgttctggttgttcttgctgttgattgttgattgttgttggtgtacgaattgttgctgctgttgttattgtagttgctcttgttgttgttgttgttattattattattattgttgttggtgtgtttgtagttgttgcattgttgtttcagctcattttcacgcgtttccttggtggtccaattggtgggatttgttgtgttgcgagcgcacgaaatgcctccgctatcaaatgtgaatgtgttgtgatcatattttgccagccggaggtttccatcacatcggtggcatgactgtaaatcgagtaaaatcatcggttagccaactgattggataagtaagtccatgttataacttacgtatttatgaaatctatcgtttgtgctttcaattgatccgcactgtggagatcagctaatattagggtttcggctgctgtttctacagagagattgacgcacagcgcctcctcgcacatcactttcagcttttcgagtgcatactgcaatatagatgagatctttgataaagtaaaccattttaaatcgcgcaattcgatggcaaactcaccttatcagcagccgctaggagatcatcagccattttttctagattgggcgccttgcccgtgtatatgaatcgcagcatttctttaagaacctcatgatccacatcggttatggcgacacgattcaactttcgctcctccatctcatgctcgaacatggccgcaaagacatcgctgcgcgctgcaagtaaaaagaaatgtataataattactatatggtaatgggatttaagacaaatactcgtcaaataaacaagtatatgctatggtttggtctgctgatctgttgatctggtctcttacctgccaatatggccttgtgcgcctggaactctcgaccgcccacggagagcgtgacgtcgctgaacttctcgttgtcaaatagattgccaagatcctcggacagcttgcattcgggcactttgaactgcacgatattggattgtccggagatgttcacgctgtccgccacgacgctgacctcgcagaagatggtcagcttatcctccggcagcaggccgttggcctcgtccagcaggaagtctcgtcggatgaacttcttgaagccccaatctttgccctgcacaaaacgataagctctgcgggaggtgaatacatgttttagtcgatgatcacaatttgtttatgtttaaaacagattgccgtacatacctttgggattccattgctttggtttcctcacgcttcgcattcagtatggaaaatttgaacttggctctgacttctgatttattacacgaaactaacagtaaatataaagaaaggtaatccttgctctcctcgtcgagacccttggggttaacccgtaaacacctgtgcggcacaacaacaaacgaattagtatcgtatggatcagtggatcgtatgatttatcaactcaccattttagtttgtcattagcaccggctgagaatgtggacgatttgagtacctcacccatttcttcccgacaaaaactaaagttatttatggtccacatataactaaatttaaccactttgacctgcgaatgaaacgtatatggggggttaatatatatatatatatataatttcccacgtaaatagtgccacaaacttatccggtttcctacacctgagccgccactcaacagtcaacacacctgtacctgtgcactcgcaacggaaatgcacttaccgcctttacaaccatatggactctcgttttacaatatttgtgaaatccgatcggttcgctgctggctggctggctggctcagttgtttgcaaatccataggaatgccaaaaaacccagcgacagggatgtggaaacctaatccgttcatgggatctggatgcacttacctgcgtgtagcaccagttctcggcaactggcgtattaacttccggcaagggcggcgatggtacacggctgaccgccatcgtgctactggatgcgtgcaggttcgaggtgactctagctgtttggcttgcctgacattcgttcaccggcaatctgcaaggaattcgcaaaaagtgtaaatgatcggaattagtacggaataacagaggatgcagctaatcaaagcttaactatgatgagtttactactagaacttaaatgaactattgatctcttaggcacatcattaaagtgtatagaatgcgaagtgggggtcaccttggctcttgtatgagatccatgatgctgcgctcgaactcaactttgacgaaattactgtcggaattcgagttcctggccaaaagattgagcagtttcaacagcagcgagttctccagcttgccgcccgttgaaattaacacacaaagtcacacgaaatagttaaatcgcgcaaaaattattccttttggaggatttagtgatttttttttgctttgctaattaaaacgatggacgagacacagacgcatggacaagacgacgaaacgaaatgcgccaaaaagtggagcgttcataatggctgaagaacaatggttctcaaggtccgttattccgcacagatatcggagattagatccaatcccagataaagataatgacgaagttagagctttcgaagctttccgtttgcattcagcgattgtcagaagttaagcagccgcaaaaaaaatagaaatatgatttaaaaacgttaaaaatatcacaaggaaaacacgcacaaccgttgcgcaggagcagcagtggaaaactgactgatggacacggaaaatctcggcaggcagaaggatttaggagcgctgcagatgacagcaaacaatggaccaggaaaatgttggccaggagtggaaaattgacaaacaatgggtcagtcagccagtcgctgagcggagggtgaaggtgaatgtgaatgtgaatgtgaacgtgagctactcactcaccttataaaggtgcaagatggtgagagggagagggagatgaagagaggggagtggaggaggatgggcagaaggatctgctgatgcacaaaagcaacaataacacagtccttacagacacatgtgtgtgtgtgtgtgtgtgcgcagatgcagatgcaagacggcaaatggcagaggaaacggctttcttacacagagagaaaaacaaaacaacactcagtgaaaaatctaaaaaaaaattcctattaattttcagcttaagttaatattatgtagaatatttaaataatttgaagtgtacactttttagttataattaaaaaccattaagacttgtaaatatatcatatttgttagtaaaccgtatgcagggtggcagtaatccatttccgtacgtttaaggacattcaattaggattcatcgatctgagaattttcgctgtgcagatgcaaggcgtggaaaatgtcggaaaaatctgtgcaaggctgcggcacacgagcgatttacagctcagctcagctcgacaaggtt

SEQ ID NO: 21068 - DNA, 1455 bp, DROSOPHILA
cgtctgtgtctcgtccatcgttttaattagcaaagcaaaaaaaaatcactaaatcctccaaaaggaataatttttgcgcgatttaactatttcgtgtgactttgtgtgttaatttcaacgggcggcaagctggagaactcgctgctgttgaaactgctcaatcttttggccaggaactcgaattccgacagtaatttcgtcaaagttgagttcgagcgcagcatcatggatctcatacaagagccaagattgccggtgaacgaatgtcaggcaagccaaacagctagagtcacctcgaacctgcacgcatccagtagcacgatggcggtcagccgtgtaccatcgccgcccttgccggaagttaatacgccagttgccgagaactggtgctacacgcagcattcgcaggtcaaagtggttaaatttagttatatgtggaccataaataactttagtttttgtcgggaagaaatgggtgaggtactcaaatcgtccacattctcagccggtgctaatgacaaactaaaatggtgtttacgggttaaccccaagggtctcgacgaggagagcaaggattacctttctttatatttactgttagtttcgtgtaataaatcagaagtcagagccaagttcaaattttccatactgaatgcgaagcgtgaggaaaccaaagcaatggaatcccaaagagcttatcgttttgtgcagggcaaagattggggcttcaagaagttcatccgacgagacttcctgctggacgaggccaacggcctgctgccggaggataagctgaccatcttctgcgaggtcagcgtcgtggcggacagcgtgaacatctccggacaatccaatatcgtgcagttcaaagtgcccgaatgcaagctgtccgaggatcttggcaatctatttgacaacgagaagttcagcgacgtcacgctctccgtgggcggtcgagagttccaggcgcacaaggccatattggcagcgcgcagcgatgtctttgcggccatgttcgagcatgagatggaggagcgaaagttgaatcgtgtcgccataaccgatgtggatcatgaggttcttaaagaaatgctgcgattcatatacacgggcaaggcgcccaatctagaaaaaatggctgatgatctcctagcggctgctgataagtatgcactcgaaaagctgaaagtgatgtgcgaggaggcgctgtgcgtcaatctctctgtagaaacagcagccgaaaccctaatattagctgatctccacagtgcggatcaattgaaagcacaaacgatagatttcataaatactcatgccaccgatgtgatggaaacctccggctggcaaaatatgatcacaacacattcacatttgatagcggaggcatttcgtgcgctcgcaacacaacaaatcccaccaattggaccaccaaggaaacgcgtgaaaatgagctga

SEQ ID NO: 21069 - protein, 377 aa, DROSOPHILA
MAVSRVPSPPLPEVNTPVAENWCYTQHSQVKVVKFSYMWTINNFSFCREEMGEVLKSSTFSAGANDKLKWCLRVNPKGLDEESKDYLSLYLLLVSCNKSEVRAKFKFSILNAKREETKAMESQRAYRFVQGKDWGFKKFIRRDFLLDEANGLLPEDKLTIFCEVSVVADSVNISGQSNIVQFKVPECKLSEDLGNLFDNEKFSDVTLSVGGREFQAHKAILAARSDVFAAMFEHEMEERKLNRVAITDVDHEVLKEMLRFIYTGKAPNLEKMADDLLAAADKYALEKLKVMCEEALCVNLSVETAAETLILADLHSADQLKAQTIDFINTHATDVMETSGWQNMITTHSHLIAEAFRALATQQIPPIGPPRKRVKMS

SEQ ID NO: 21070 - DNA, 5204 bp, DROSOPHILA
tgcgactttgaggcgcgcgatgagaaccgccgtttgggcatcttctccagctcggaacagtccgatatccttcagcgtttcctcgatctgggctacgagtttgcattctccgccggtgctggacataaggccttgaaggtgattacccacgaggtggatgtgtatctgcttagcaaaggctccaccttcaagtgggacacgtgtgctccgcaagccatactccgtgcgctcggcggagatgtgctggactatgcggccagtgtggcggagcaaaaggcagtgccattgaagtacctgattgaggatgctgaagccgatgccgattggaagcgaaacgcgggtggtataatctctgtgcgcaatgtcgatgttgtggatgagctgctggccaaattggccgagcaatgagtgttgttattatgttatttgttgtaaacccattattgctgttgtaattgatttgatgtaattgcactacgagtcagtcgaatttgtaggcatagaaactactacaagaaaatttgctaataaatgaaaccggcgaacgtgtaaaacattcatttaaattaagtaacaatctacaaaaggattatagctgctgtttggaagtacgaatgccaccacatctggggttagctagaattgtccgtatcccataataaaaaatagataacaaataacaagaatggatgatatttcttctctcttctcttaagtgtagcctacttattggagtttctgtgcggtaaaaacaaattctagtcaatgaaacaaattaaagaaattctgtatgaacgatcaacatctttatatggtgtcaagtctcttagtcgaatcactctgtgctggaataaatgtaagcgaataattgtcaaaatcatgttcgaaaatacactgtggtcgaaacttatatcgaatatcgaaataatgtttgaacatacacttttggtgtacacttaatgctaaagtcatatgaaggaatgcgagttcttaagttaaattatgcaactggtgtgtttagaatagtctccatatccggaattgtaatgagacgagtatcgggttcagggcctttcttaactccgcataagaatcgaatcttacgcacaagaaactgctccagagccgcaaaattctttgatttgtcgaagcctgcaacgaagtgtttattaatggtgatccgggcaaaaattgaatgcgattatgcgcataccatttatatagcactttgtgacattgacggcaattagcaaatcctgtgaaatcggtttcacgtgtctcacggccacatattccgtatttccaaaatcgcagaatagaattttgaccatattgtccttaacctcctggcagactccgcgataccagttcttatcttcgctgtagatcgccaggcacagttcaccaacgctgcaattgggataaagtgcgtgttaagaaaaggacaagcaaatatcgaaagcgcattactttggtacgtaacccggaacaacattgtggtcacatgctccctgacttgatgtcaagctaaggattttttcaaattccttggccgccttttcgtccttgaagtaggcggcggtgatgtagccagtttgcggcaatccgtcagcgttcataaggattaggttgaccttgtcgcctaaaggagctagattcttgggcaaagcgtcgaaaaggaagcgtttaatgggcagaacgtgggaagctgactttgtacttgtcacgtcggcaggaaaaggcgactccggtggagagggcggcagtggaggcagatccagcagaagtagagactgtggagacaccttctgctgtttgtgagttacaacaggcaattgactcggagtagaagcagccttcggtggtgcaacttctgctttttcctgtaccggtgtaaatataagaggcaacatttgggtcgtcaaggagcgcgaatcgccggagctgaacagcaggtccacggtcgatgtagttgcatctaccatgttcaattttagcagttctttttgggcgcagagcttgtgcagcatttgaatggccgcattgttaactggcacagctgcatccggaatattgcagacattctgcaactgtacacgcatcagacatacgggcaaattctccaggaagcgacaggagctgcgtatttccgccaactccaccttttgggtggcaccagtatcaacgttcattacttcgaacaatccactatccttactcaatatctgtaaaattcgaaaagttcatagactttactgattgaaaccctgcaacataaatatcgacaaacctcgccccggaagtgacccatctgcttggagacaacgagcacgatgctgccaacggaaacatcactagatttggtaatggtagcgcacttgtactccaggcgcttgaaaatttccgcatactgcttggcgtctggagtgctgatgtatacctccttaaagctgaccaagtgggaaatgaatacgatggaatcatggacgatgggttcacgccagtacttgtggcctaaatatgaaatctgacccaagaaagtgatcagacgggccatacatatctgctcgcccttggaattcaaggcggcattcgccgcgcgtaacttttccttgggcggcttattatccagcttaaacttgaccgtgagttctgcaccttgagtctcaagctcctcgggtacggagtcctccagctgagcggcaaacactcgactgggcaggccaagtagttcgctgggaatacgactcagatcggtggctatggacactctaccctcgtccatttcgtaaaccaaataggttggcctcggtttcatgatatgatccaataggaaagctcgccgataaccatttttagtgcgggtggccgcaaagaagatggatttctgctcggggaagggcagcgtgaatggctgtcttggcttctcggctatgcggttgtttaagtctgcgttgacatggcccatcacgttgatctggagtagggccagctgcggttcgttatgctttggatttgccttaaagacccggatgactttgacttctggattaagctgcagcatctccaagggcaaacttagtggtattatcatcttgggctttagatggacgtgataagctccgtcgctggttttggttcccaacatacggagcgtcaagttcttaatgtcctgaactccagtgttcgtgggcaattgaacacggaaagcgaacgccttgctttcggccatcttgggcacaatggtgtagatatcccgaaacggtgtagctactatctgaccgtggtcaatcatacggacattggcttcttgcttcttttggcaaaccgtcaaaacatgaccgcgatggaccttgtcgcccacactgatggccacgagggtgtcctcccgcactccttccatacgaatcatcttcttattctgcatgcagcgctgcatgttgaccgtcattcgctcaatggcctccacattcgccacgtgcaccacccaaatgggtccatcgttctccatgaaagtcacgcggcacttgaaaaactccatgcccgacggcagcaaatgtttgcgccagttttccgatagatccggcttgttcggcacagcaactgtgggctccacacatgggattggcgatttagtgcgagttttagccagagcaacttggttctctacgctctggattggattcaacgccggttgaagaggccggcactccaccaagggtctggaaacgcatttgtattgtataagaattaaaaacccctaacttaatgcactgctgcgcaacggatttactaatttaactcacggcataatgatgcacacctgcctgtgcctctgccaatccaatttctggcacttttcattgcagtacggttctccacaccgctggcacatcaatctggtcggagtgccacagacgacgcatgtcttttcctccgacttttccatttcttcaattcaaagtaacaacgcaagaacgtgtgaatgaaagaacggcgcgttaaaggaaacgcagcaaaatggcgctaacagaacttttagcacgcgatgaaatacaaagtgaaaatctatttacgctggacgagaactttctatgttttcgttttgaaaaaggtggaatcctttagaatttaagtgcgcgattcacaactcacaaacatgcgatacgttcactaaacgcgtttaaattcgaagctcgctgggcacgcgcttcagtgcattgaacgaacgtgggaagaaagagaacaggacgatatcgatatcggttggttttcgatttacagcgcactgatggaagtaaacttgatcgttaattaaaaaaggaaaaataaggcttacgaagtttttaaactttaattaaaacgacacaacatatgctaaatattctacatattccagttacaatcaatttcgccaagccattttcatggaagttgaatactctttgaacctgtttgaatatatctgaaaacgcaaatctactttgtgttattattttgccaatataggcaatattatttgaaaattaaccgcaagtccattgacgaccgcaattcagaataagaacgtagcgtaattttcccatcttcaaatattgtttttcctaaacttaccgattttaacactttttagttttaaaaacgtttgtggttaatccgcaaggaatttgtgacagtgaaaaaataaccgctttgtacgcgcacgtgttgccaacaaacacttcagcttttgtcagtgactggattctaatttaaatttatcgataacgtatgcaattcttattcgaacaatatagttatttctaaaaactgtgtcacggaatttctttttgtaattattacctatataaatatatatttatacaaatatttataacatttgtgttttaattgtcatgcccctttagttttttttacgctagaaacttagctacttcctaggtcgagagctggccacactcttggcatgtcttagttatcgataattcccgccacttctgagcattgagtatattttgcgaactatttgtttaccaattgaatattttgataatcagggcccccagtgaagtggcaagcgtcatgagtgccagcaacaaaggcggttacaagacgccgcggaaggagaacctcatgtccattgagaacctcaccaattcggaggaggaatccgaggacttgaacacggcaatggttgggaatgc

SEQ ID NO: 21071 - DNA, 2934 bp, DROSOPHILA
cccagcgagcttcgaatttaaacgcgtttagtgaacgtatcgcatgtttgtgagttgtgaatcgcgcacttaaattctaaaggattccacctttttcaaaacgaaaacatagaaagttctcgtccagcgtaaatagattttcactttgtatttcatcgcgtgctaaaagttctgttagcgccattttgctgcgtttcctttaacgcgccgttctttcattcacacgttcttgcgttgttactttgaattgaagaaatggaaaagtcggaggaaaagacatgcgtcgtctgtggcactccgaccagattgatgtgccagcggtgtggagaaccgtactgcaatgaaaagtgccagaaattggattggcagaggcacaggcaggtgtgcatcattatgccacccttggtggagtgccggcctcttcaaccggcgttgaatccaatccagagcgtagagaaccaagttgctctggctaaaactcgcactaaatcgccaatcccatgtgtggagcccacagttgctgtgccgaacaagccggatctatcggaaaactggcgcaaacatttgctgccgtcgggcatggagtttttcaagtgccgcgtgactttcatggagaacgatggacccatttgggtggtgcacgtggcgaatgtggaggccattgagcgaatgacggtcaacatgcagcgctgcatgcagaataagaagatgattcgtatggaaggagtgcgggaggacaccctcgtggccatcagtgtgggcgacaaggtccatcgcggtcatgttttgacggtttgccaaaagaagcaagaagccaatgtccgtatgattgaccacggtcagatagtagctacaccgtttcgggatatctacaccattgtgcccaagatggccgaaagcaaggcgttcgctttccgtgttcaattgcccacgaacactggagttcaggacattaagaacttgacgctccgtatgttgggaaccaaaaccagcgacggagcttatcacgtccatctaaagcccaagatgataataccactaagtttgcccttggagatgctgcagcttaatccagaagtcaaagtcatccgggtctttaaggcaaatccaaagcataacgaaccgcagctggccctactccagatcaacgtgatgggccatgtcaacgcagacttaaacaaccgcatagccgagaagccaagacagccattcacgctgcccttccccgagcagaaatccatcttctttgcggccacccgcactaaaaatggttatcggcgagctttcctattggatcatatcatgaaaccgaggccaacctatttggtttacgaaatggacgagggtagagtgtccatagccaccgatctgagtcgtattcccagcgaactacttggcctgcccagtcgagtgtttgccgctcagctggaggactccgtacccgaggagcttgagactcaaggtgcagaactcacggtcaagtttaagctggataataagccgcccaaggaaaagttacgcgcggcgaatgccgccttgaattccaagggcgagcagatatgtatggcccgtctgatcactttcttgggtcagatttcatatttaggccacaagtactggcgtgaacccatcgtccatgattccatcgtattcatttcccacttggtcagctttaaggaggtatacatcagcactccagacgccaagcagtatgcggaaattttcaagcgcctggagtacaagtgcgctaccattaccaaatctagtgatgtttccgttggcagcatcgtgctcgttgtctccaagcagatgggtcacttccggggcgagatattgagtaaggatagtggattgttcgaagtaatgaacgttgatactggtgccacccaaaaggtggagttggcggaaatacgcagctcctgtcgcttcctggagaatttgcccgtatgtctgatgcgtgtacagttgcagaatgtctgcaatattccggatgcagctgtgccagttaacaatgcggccattcaaatgctgcacaagctctgcgcccaaaaagaactgctaaaattgaacatggtagatgcaactacatcgaccgtggacctgctgttcagctccggcgattcgcgctccttgacgacccaaatgttgcctcttatatttacaccggtacaggaaaaagcagaagttgcaccaccgaaggctgcttctactccgagtcaattgcctgttgtaactcacaaacagcagaaggtgtctccacagtctctacttctgctggatctgcctccactgccgccctctccaccggagtcgccttttcctgccgacgtgacaagtacaaagtcagcttcccacgttctgcccattaaacgcttccttttcgacgctttgcccaagaatctagctcctttaggcgacaaggtcaacctaatccttatgaacgctgacggattgccgcaaactggctacatcaccgccgcctacttcaaggacgaaaaggcggccaaggaatttgaaaaaatccttagcttgacatcaagtcagggagcatgtgaccacaatgttgttccgggttacgtaccaaacgttggtgaactgtgcctggcgatctacagcgaagataagaactggtatcgcggagtctgccaggaggttaaggacaatatggtcaaaattctattctgcgattttggaaatacggaatatgtggccgtgagacacgtgaaaccgatttcacaggatttgctaattgccgtcaatgtcacaaagtgctatataaatggcttcgacaaatcaaagaattttgcggctctggagcagtttcttgtgcgtaagattcgattcttatgcggagttaagaaaggccctgaacccgatactcgtctcattacaattccggatatggagactattctaaacacaccagttgcataa

SEQ ID NO: 21072 - protein, 892 aa, DROSOPHILA
MEKSEEKTCVVCGTPTRLMCQRCGEPYCNEKCQKLDWQRHRQVCIIMPPLVECRPLQPALNPIQSVENQVALAKTRTKSPIPCVEPTVAVPNKPDLSENWRKHLLPSGMEFFKCRVTFMENDGPIWVVHVANVEAIERMTVNMQRCMQNKKMIRMEGVREDTLVAISVGDKVHRGHVLTVCQKKQEANVRMIDHGQIVATPFRDIYTIVPKMAESKAFAFRVQLPTNTGVQDIKNLTLRMLGTKTSDGAYHVHLKPKMIIPLSLPLEMLQLNPEVKVIRVFKANPKHNEPQLALLQINVMGHVNADLNNRIAEKPRQPFTLPFPEQKSIFFAATRTKNGYRRAFLLDHIMKPRPTYLVYEMDEGRVSIATDLSRIPSELLGLPSRVFAAQLEDSVPEELETQGAELTVKFKLDNKPPKEKLRAANAALNSKGEQICMARLITFLGQISYLGHKYWREPIVHDSIVFISHLVSFKEVYISTPDAKQYAEIFKRLEYKCATITKSSDVSVGSIVLVVSKQMGHFRGEILSKDSGLFEVMNVDTGATQKVELAEIRSSCRFLENLPVCLMRVQLQNVCNIPDAAVPVNNAAIQMLHKLCAQKELLKLNMVDATTSTVDLLFSSGDSRSLTTQMLPLIFTPVQEKAEVAPPKAASTPSQLPVVTHKQQKVSPQSLLLLDLPPLPPSPPESPFPADVTSTKSASHVLPIKRFLFDALPKNLAPLGDKVNLILMNADGLPQTGYITAAYFKDEKAAKEFEKILSLTSSQGACDHNVVPGYVPNVGELCLAIYSEDKNWYRGVCQEVKDNMVKILFCDFGNTEYVAVRHVKPISQDLLIAVNVTKCYINGFDKSKNFAALEQFLVRKIRFLCGVKKGPEPDTRLITIPDMETILNTPVA

SEQ ID NO: 21073 - DNA, 2754 bp, DROSOPHILA
ggcgtttcgctctgccagctggtgcaatctgttggagcggcgcaaatgcatctctggcattaaaacaaattgatgcggtcgggaaatctcattgccggcttagtgaatctgatttgcggtcatcggtcgtcctctcgttaacccagattcggattcccgtgcttggttctacagatgccaggctgctgctgctgctgcgattaatttgctgcggtggcgataatttgttaatcgaagcatcctcatcgcagcttgcacttcgtccagaaagttcttgtaatcctccgcgtgctcttcctgctcctcctcctccagttgcagcattgtccaattaaatcagccgaaagtagggtgggaatcttcgatgttgattctgctgcgcggcttgttggtttaatggccggcgttcttttacgacggcatttagctaaactatccagcaaacgcctctggggagactcatcccgggggtggctgccatgatggctgatgggtggtgacctgaccatgctgatggtgcagcatttaatgcggaaacgtgcgcccaaagtcgagcttcgattagcgcccagcctgactggatgatgtgtggaggtcagcagtggaggatcacgcaacagccattatggccagaggcacgcccacgtcttcttaatggcccgccaattcccgaaatccgttttggttgagtcaaatcatgttgtgtcctaaaaagggagttcttaaattttcattactttgatttgactcatctactttaaggaatacaagtcaatgtttataataaggtataatgttgattggtaacaatataatgagtttagttctgttaagtttaagtacattttgattgacattttattcaaattacgattttgtttgcatgtcaaggaatgaaaatacgcgtaagtacttaatacaaaaaagtgctacattttgtgtgtgcaaacaaatcatttcgtcatagtttgtagaatccagctcctgattttttttttgactagcgtcgccgttggcatgtcatgttaattggagtatccatcagtttcttcgatttcagagaaactatctgagccatcgagtaatgccgttcggagacctgctccttcaccacctccgaatttgattgatccttctcctctagctgacaattcgaggcagaatcctctgaatccttctcatgctcctggttgctaaagatctgccccagtgaatttagctccacattctgctccaccgctacctgttcgttgacatccttctccgccaccacctgttccgtggcagcctgctcgtccagtaggttgcccagatcttcggtaaccaggtactccagtcccaggtcctcggcgttaatgcaatcgccgttgttcacagccaactgctggtagtagccataatctttatccggattgtcgaatgcctcgcgtgcctgtagcatggaggcccggaaacttggattgcagacgtgtcccttttgctggaccactccaagtcgatgcagattcttctcgtagtcgacgacctctttgcgagccactttggcgtagttgcagcttccatagaagtaaacactatatgccgtggcaccgatgcggttgaggatgcggcctggccaggggcgatagcggcgcaacttggcgaacacaaagtcgccaatggtgaaattaggcatcttggctcggcgacgtcccatctttttcactcgacttggctaatttttggattaaaatggtttttaccaagtgatactttttaaagttctcgaagaagaagaatatcgctttcatggaaatagcacagtgatgccagatcagcgcagatcaggctgtgcacgaaagttcgtggcagtattgactaacgctagagttttcaaatatttgatttatttttatgattttttatatatttttaatgtgtatataagcaaactcatgcattcatagcattagattttcttatttaaaaaaaacaatggaaaatttgttggtcttaaaaggaactgttgatatattttggaaatgcattttaagattgtataaaaaatcgttttaaatagtcgacatttatgccacaaaacaagctaattgataggccttaataatgaaaataaaaaacgaataaatataataaaaatatattctcactttgatcatgattacattcaaaacaaaccccccattccgaatggcaaatgaatttgggtcacttttggtgggcgggcaatgtttctttaatgagcaaacagcatttgcattaatggtcatttgcgtagaaatttgcacaacacgctacctgcacttggatttgaaaacttattcattctgcacctttgcgagtgcgtgtgcagttctgttttgaattttcgctcacgttcgccgtattatgcgcaaattggctttttaaattgtcgacttgtttaagctaaacgcagctacactttatggccatgttccgtgctgcattttaagccatgcgaaattccactaagccctaccactcgcctacctacccaccactccattcgcttaactcaattataataattttaatttagcacaagcagggtctataaaatggcaaaattgcattatttaccaggcgtaattacaacaatatttatatgctaatgagcccgtcactttgcccctaacgatgggaaattaaccaggccaaagttctgggaaatggttgtttcactgctgagcaatcatttttattctagggtattccgcggctgttccgacgacctcg

SEQ ID NO: 21074 - DNA, 754 bp, DROSOPHILA
aagtatcacttggtaaaaaccattttaatccaaaaattagccaagtcgagtgaaaaagatgggacgtcgccgagccaagatgcctaatttcaccattggcgactttgtgttcgccaagttgcgccgctatcgcccctggccaggccgcatcctcaaccgcatcggtgccacggcatatagtgtttacttctatggaagctgcaactacgccaaagtggctcgcaaagaggtcgtcgactacgagaagaatctgcatcgacttggagtggtccagcaaaagggacacgtctgcaatccaagtttccgggcctccatgctacaggcacgcgaggcattcgacaatccggataaagattatggctactaccagcagttggctgtgaacaacggcgattgcattaacgccgaggacctgggactggagtacctggttaccgaagatctgggcaacctactggacgagcaggctgccacggaacaggtggtggcggagaaggatgtcaacgaacaggtagcggtggagcagaatgtggagctaaattcactggggcagatctttagcaaccaggagcatgagaaggattcagaggattctgcctcgaattgtcagctagaggagaaggatcaatcaaattcggaggtggtgaaggagcaggtctccgaacggcattactcgatggctcagatagtttctctgaaatcgaagaaactgatggatactccaattaacatgacatgccaacggcgacgctag

SEQ ID NO: 21075 - protein, 231 aa, DROSOPHILA
MGRRRAKMPNFTIGDFVFAKLRRYRPWPGRILNRIGATAYSVYFYGSCNYAKVARKEVVDYEKNLHRLGVVQQKGHVCNPSFRASMLQAREAFDNPDKDYGYYQQLAVNNGDCINAEDLGLEYLVTEDLGNLLDEQAATEQVVAEKDVNEQVAVEQNVELNSLGQIFSNQEHEKDSEDSASNCQLEEKDQSNSEVVKEQVSERHYSMAQIVSLKSKKLMDTPINMTCQRRR

SEQ ID NO: 21076 - DNA, 3084 bp, DROSOPHILA
aattcccatgccttatcgccatccaagtgacaccaattagttatgagccaattgtgggatcgtaccttcttatcagcgggagcagcgacaggatacactgggctccaaaatccgggcaagcggctaagctgtctaacgagtctctaatttataggcgacttggtgcgcagtgtcccgctccgttgacaaatgccagcaatttgatacccaaacaacaggaacgaggagtagtaggatttggtcatggggttatacaaattgaaatgttttctgggcctacactggctggttggatggttggctgactggcgaggatcggatcggatccatctgggtgctgtttttgttaatgcgcccagcgggatgtccaccgaaatcaccgacgcgggatgcgaacaagtgttgaccgaaaatcaaagatcgctggctcatttgtggcgcttttgtgtgcgctagataaccaatattttataatcatgtccaataatggtgtgcatattaatttcatgggcgcataaagcaactttatggccttttaagaactcccattaacaaagaccagtccgtctgtgcacaaacacaaaacgagctgacaagagattttttgggcaaccaagctctcgagatgcgagaagcgagacaatgcaaatggctaaaatagtaaatagagttataaacgcataaaaggcgttcattgtgggcccacggcgttggctttcacaaatttatacgacggctcatcaattaattagagcccggggagggacacattttcacattctcccctcggcaatgacctggctttgaaattaatttgttaggaaagtcgttaacatttcgtctgtccactttctaagccccgccgcggattgattgtcataaaaaaatataaaacccaacccttgggcaattggaggccctagattaacgacccattttatggcagttatcaattcggttcaacattcttatgtttttaaatttcaaatgaacttcaggttcatcttggtgaggagaagctcttgaagctctccactcgcgttctttcgccacggaagctgatgtgcagatcaaagttcatgccacgtccatcttgtccggtgggcgtcatggccagcacaccgcgcacccgatccctaatcctcacatacagtggctcatccagatggagcaccgtctgctcccagtgcgtccatggcgaatgcggcgaggtggtcaggcttacggatttgttcgactttcccgacggaaacaagacatcgaagtacaggaccagcatattgataattccagttcgcatgacttttaattgaaagttcgattgaaactccaccggctggttgcgggccacagccaggttggtggagtgtatgaagcattcgtcggtgagcaactgctggatgggcacaaactccaccaagggctcctgggagaatggcttcctcacacagcccatgtcgatgccctccacgttgcaccaaaagttaagattagtccgccgatgcggatcataggcccccattaaccagaggtttccagtgctgggcaggattcgcccaccacgcgtgagccacttatcccgggcaaacagcacggagtttatcatggcctccatatacagagcatttctaataatataaaatgcaagtcattttaaaattttataacttcattaatataccttaccccatccattcggaaactatgatgtccaccttctcaatgccgtcgggcagctccacttgctccaccaatcccttgaccaccttcaccacattctccttctgattgtcccttattatctcctcggctatatccgctatatcggtgcattcaacggctataactttactggcaccagcctcggcggcgaaaagggatagtatacccgtgccacagcccacatccagcacgatcttgtcctggaatagccctccatcctggacgatggcatcgcgaaaagcctgcatgcgcaccgagtccctgagcatgttcatgtgggtctccaggcgggaataggattgaaaatagtcgctatctttgccctccaggaagggcaatttttggttggcattaaaagacattttcaggattattcagctgcaatagaatttcacaagtcacataaaacatacacatctattttaatgggacaatatttgatagaaaaatcatggccatctggtcatctgtttgcctcgaaagggtattcaaattatatcttatattttatagataagataagaaaggcagctttcatatttaagtgagtaaaatgaagaaaagatccgaatattcacaaattttgccacatttggtcacaaacaaaaatctataaaaattggttataaccagcataaaatgatgaacaatactacgtcattctatcgccattatttgcatttgaatggccgaagcaagataaatcaaaattttgcatttaatggacccattaaaatcgaccaaaaaaatcgccccactcaaaaggccgtgaaagaaatgtgccgccaacaccttaacaccaggccataactcgcttaatccgcccagccccgaatttatttttatggccaaaacttaatgattcctctcttccccctcccccccccttgcaccaaccaacaggcactttcactgtgagcgtccaaaattgtgcaacttgtttgtggccaacggtaaacgaaaatagttgaaattaaaggcgaaaaaatgcccgtcatcattttgtttttttaagtgtcataaaaatatctccataagcagatgcagctattaaatgggctcattaatcaatttagtcacagagcaacaataaaaaggagcacacgcacacacacgcgacactcgagcataataaactataatttttaatgttgctaaattttatgctaatttgccatttcgggcgttccataattaggttcgctcctccggccggggggtcgtttcgaatttgttcgatctgcgattgcgtttgggcccggccaacaatcgttgccatttgttttggacggctttaaaaacctataaaacttttggcacaaatcaattaaaaaacgacgtaagtttccattagtgttcgtt

SEQ ID NO: 21077 - DNA, 1026 bp, DROSOPHILA
atgtcttttaatgccaaccaaaaattgcccttcctggagggcaaagatagcgactattttcaatcctattcccgcctggagacccacatgaacatgctcagggactcggtgcgcatgcaggcttttcgcgatgccatcgtccaggatggagggctattccaggacaagatcgtgctggatgtgggctgtggcacgggtatactatcccttttcgccgccgaggctggtgccagtaaagttatagccgttgaatgcaccgatatagcggatatagccgaggagataataagggacaatcagaaggagaatgtggtgaaggtggtcaagggattggtggagcaagtggagctgcccgacggcattgagaaggtggacatcatagtttccgaatggatgggaaatgctctgtatatggaggccatgataaactccgtgctgtttgcccgggataagtggctcacgcgtggtgggcgaatcctgcccagcactggaaacctctggttaatgggggcctatgatccgcatcggcggactaatcttaacttttggtgcaacgtggagggcatcgacatgggctgtgtgaggaagccattctcccaggagcccttggtggagtttgtgcccatccagcagttgctcaccgacgaatgcttcatacactccaccaacctggctgtggcccgcaaccagccggtggagtttcaatcgaactttcaattaaaagtcatgcgaactggaattatcaatatgctggtcctgtacttcgatgtcttgtttccgtcgggaaagtcgaacaaatccgtaagcctgaccacctcgccgcattcgccatggacgcactgggagcagacggtgctccatctggatgagccactgtatgtgaggattagggatcgggtgcgcggtgtgctggccatgacgcccaccggacaagatggacgtggcatgaactttgatctgcacatcagcttccgtggcgaaagaacgcgagtggagagcttcaagagcttctcctcaccaagatga

SEQ ID NO: 21078 - protein, 341 aa, DROSOPHILA
MSFNANQKLPFLEGKDSDYFQSYSRLETHMNMLRDSVRMQAFRDAIVQDGGLFQDKIVLDVGCGTGILSLFAAEAGASKVIAVECTDIADIAEEIIRDNQKENVVKVVKGLVEQVELPDGIEKVDIIVSEWMGNALYMEAMINSVLFARDKWLTRGGRILPSTGNLWLMGAYDPHRRTNLNFWCNVEGIDMGCVRKPFSQEPLVEFVPIQQLLTDECFIHSTNLAVARNQPVEFQSNFQLKVMRTGIINMLVLYFDVLFPSGKSNKSVSLTTSPHSPWTHWEQTVLHLDEPLYVRIRDRVRGVLAMTPTGQDGRGMNFDLHISFRGERTRVESFKSFSSPR

SEQ ID NO: 21079 - DNA, 3055 bp, DROSOPHILA
gcggacgacacattatcctcacggcaaaacgatgctaatccatcacgaaccctcaagatcaagcctcgggcttttcaggcagagtacactgagaaaaaaactagctagaaaagctgaaaatacatttagagctatgtaattgatttaaaaggccaaagccctaaattattgtaaataaaagctatctattctttgtaatgtacactataaaaaatataattttttagattatcacagcagtacatgtatatacaacactcgagatcacgcttcgtcactaagcgggctgtaggacataagacgcgtcttctagaacgaaaatatatttttaagcgaagaacttaaataacccttttttccacagtgcacattcagcagacgaaatgtcacttaagcatgtgaatggccggggtgaatcggaatcgagatccgcgaacggattcctttcgctgggctaaccaagtgcgatctgggatcagagctcggttatgagatcagaacaaaagagctctcactgcaaacgaggccgttggaataaaacccaaaccccagagccaaatcacgacgcacagtctggcaagacgattgcggatggtcgatggacgatggtcgatgttcgatggtcggtgaattatgcgcgacatcattttaaatcgttgtagcaacgtcaaagctaaacaccgatcaggtcagccaaagaagccaaagcagccaaaaaggagggcctacacaaaaaataagtcagtcagaatcggtggcagaacccgacacacagacgatccccagccagatcccttgtccagaaccattgtctttgggtagcagccgccctaattgatgcagcacggccataaatttcgatcggccaacgatccccagcctgctcccctagcagcggcagagggtccaaagattgccatgaatacatcaacaagaagagcccccttttatttcgctcaaatccacatcattcgcatagtaccgaaacatcattgtgctctcatggatttgcgactgtggaactgcccaaggagaaggagtactccacttcgcgatgctcatccggcttgtagtacatcccaagctctccgattaccagctcacatttggccacctcgacgggattatccataaacaatatggtttggcgcacataggtgcgaggtctcttgggaccagtggaaaacatgagcctaaactttcccctcggccggcagagtccaatatctgaatagagcaccacggctccaagttgactgtccctcaagccacgcagcttgaatggaaccctgaagctctcatcatttatatgggcagtgcagagatcgatggttttcagaaggtacttttcggttatcagctgctccttggcaacgtaatcctctatcagggaaacgggttctctgaccatataactacgaccaggataatccgactgtggaaggatattcacttcgacagtcttacgcggatgatccgcaattccgcagacaaaaagttgagccacattgggtatgataaaaccacccttaaccagccacttttctctggcaaagatcacctccttgaaaagtgagtccacgaaaacagagtgactgtgaaataaataactgaaatctaattgattgtaatgtggcaacttagaactacgtaccctacccactcggacactattatatcgaccttcttcagaccgcagggcaaaactatctcatggatatcgccatcgataaactcgaagatatcctccttctcagtgccgataaaagccttgctaacaaattcagcactttccctattgcccagggccataactttgacggcacccgcttccacgctcatcaagctaagtaatccactgcgacaacccacgtccaggactatctattgaaaatcgatcatttgtatatacatttcgataagttaacttatcttaaccttatccttgaaaagtctttcatagcgcttgaaaacccattcgtatgccctggtggagattacatcgttcaacatgctgtccgccatttctctcagcagattcttctccagatccatgatttatatattataaggtattcaatgtgtcaaactttgataagcttcgactgattgctttaattggtatactcaatacacatggatatattcaaaacataacttatttttttacttatatttatatttatttatttattatttatttatattaaacttaacttgttaaattaaatttgtataaattttaatttaattcgacttggaaatcgtacctcatattatcctggtttcacatttcacgccccaatcagccgccataaattccgaatagattatcgcccggcatttctcacaattcccatgccttatcgccatccaagtgacaccaattagttatgagccaattgtgggatcgtaccttcttatcagcgggagcagcgacaggatacactgggctccaaaatccgggcaagcggctaagctgtctaacgagtctctaatttataggcgacttggtgcgcagtgtcccgctccgttgacaaatgccagcaatttgatacccaaacaacaggaacgaggagtagtaggatttggtcatggggttatacaaattgaaatgttttctgggcctacactggctggttggatggttggctgactggcgaggatcggatcggatccatctgggtgctgtttttgttaatgcgcccagcgggatgtccaccgaaatcaccgacgcgggatgcgaacaagtgttgaccgaaaatcaaagatcgctggctcatttgtggcgcttttgtgtgcgctagataaccaatattttataatcatgtccaataatggtgtgcatattaatttcatgggcgcataaagcaactttatggccttttaagaactcccattaacaaagaccagtccgtctgtgcacaaacacaaaacgagctgacaagagattttttgggcaaccaagctctcgagatgcgagaagcgagacaatgcaaatggctaaaatagtaaatagagttataaacgcataaaaggcgttcattgtgggccc

SEQ ID NO: 21080 - DNA, 942 bp, DROSOPHILA
atggatctggagaagaatctgctgagagaaatggcggacagcatgttgaacgatgtaatctccaccagggcatacgaatgggttttcaagcgctatgaaagacttttcaaggataagatagtcctggacgtgggttgtcgcagtggattacttagcttgatgagcgtggaagcgggtgccgtcaaagttatggccctgggcaatagggaaagtgctgaatttgttagcaaggcttttatcggcactgagaaggaggatatcttcgagtttatcgatggcgatatccatgagatagttttgccctgcggtctgaagaaggtcgatataatagtgtccgagtgggtaggtcactctgttttcgtggactcacttttcaaggaggtgatctttgccagagaaaagtggctggttaagggtggttttatcatacccaatgtggctcaactttttgtctgcggaattgcggatcatccgcgtaagactgtcgaagtgaatatccttccacagtcggattatcctggtcgtagttatatggtcagagaacccgtttccctgatagaggattacgttgccaaggagcagctgataaccgaaaagtaccttctgaaaaccatcgatctctgcactgcccatataaatgatgagagcttcagggttccattcaagctgcgtggcttgagggacagtcaacttggagccgtggtgctctattcagatattggactctgccggccgaggggaaagtttaggctcatgttttccactggtcccaagagacctcgcacctatgtgcgccaaaccatattgtttatggataatcccgtcgaggtggccaaatgtgagctggtaatcggagagcttgggatgtactacaagccggatgagcatcgcgaagtggagtactccttctccttgggcagttccacagtcgcaaatccatga

SEQ ID NO: 21081 - protein, 313 aa, DROSOPHILA
MDLEKNLLREMADSMLNDVISTRAYEWVFKRYERLFKDKIVLDVGCRSGLLSLMSVEAGAVKVMALGNRESAEFVSKAFIGTEKEDIFEFIDGDIHEIVLPCGLKKVDIIVSEWVGHSVFVDSLFKEVIFAREKWLVKGGFIIPNVAQLFVCGIADHPRKTVEVNILPQSDYPGRSYMVREPVSLIEDYVAKEQLITEKYLLKTIDLCTAHINDESFRVPFKLRGLRDSQLGAVVLYSDIGLCRPRGKFRLMFSTGPKRPRTYVRQTILFMDNPVEVAKCELVIGELGMYYKPDEHREVEYSFSLGSSTVANP

SEQ ID NO: 21082 - DNA, 7760 bp, DROSOPHILA
aaaagtttcccgaaaagatacccttccgtctcacccggatgctaataaaggcaatggaggtcactggcatcgagggcacctacagacgcacctgcgaaagcgtgatgctggtgcttcgccgcaacaaggattccctgatggcggtgctggaggcctttgtctatgatccgctgctcaactggagactgttggatgtggacaagaagggtaacgatgcggtggctggggcgggtgctccaggtggacgtggcggttccggaatgcaggatagcctcagtaactccgtagaggactccctgcccatggccaagtcgaagccctacgatccgacgctacagcaaggcggcctgcacaacaacgtggccgacgagacgaacagcaaagccagccaggtaatcaagcgggtcaagtgcaagctaacaggcaccgacttccagacggaaaagagcgtaaacgagcagtcgcaggtggagctgctcatccagcaggcgaccaataacgagaacctctgccagtgctacattggctggtgtccgttttggtaggtcaaccgatccggcatagatcccgtgcgacaaccggcaattgactgagcgagattacgaacttacgattactactactaattgaattgggtgcatgcatctctggagaggattccgaggtgactgcaaactaggcattaagtataaaatatttttataatttatgttagagatacgcttaattatctattatttgtaaatcagattggaaactagattccaactttgtataaaccattaaaacccgtgaaacaatcaacgttctaaaagtgtagtttaatttgatttacccatccggccctccgaaaatcaattagaccatttgtataattcattattttttatttggaaatccaattgcaagtaaatttaattttttaaatcaccaaattacccgcacaactcggtattgtgtcgtttttttcgcaaccaagtagaaaaacaacgaaagatttgcgaaaattttcaatatttttcaaacatctaaattattaggactcctaacgggagcggtgattaatggtaactgctacttgcaggccacccaaaaatcgggggcaccacaaataaactaaatcctgcacaaagaatatttatatttatatgtagaagataggtagacactaaaactgcacattaaactagtcctaagtatagcagtatgggttaaagggtgcgcgacttagcaattgttccgcttgccacgctgctccttgcgccaggcgtcgatgcgctgcttcagctcaatgttggccaccagcatgtcctcggtgagtggctgtcggttgaacgggtccgtgcagctgttgagcaagtggcgggtaataatcgcccgatccatcaccgtgccggagggaagcaccacggggtccgacattagcgtgtccatcagcggatccttgaactcatcgggtgcgtcggcgcattcatcttcagtctgtaggttggtaactgcaagggaaacgtttgcatttgcatttcaatccgatttatttagttgtttcttaagttcttaccatagatttcgtgagctctctgtgtgagcgccttgaatcgctctacctctaccgccgatcggagggccagtcgctttatcctcgatgctgcctcattgcagatttgaacgtcgaaggagcgctcgtcggcagccagggcctcagcgaatctatcacagtccaggtggagatatatgtcgaagatctgggccagcagactgcgtggctcccagccgtattttgccgggttcttgaccttcaggtcgttgcacttgggcccggccagctgtttcagattgaaattcagcatggagctcagtcgatctacgagctcgtcgcgcatgaacggctccttaatgtcgctctaaaattgataataggtttaaatttaataagcactctccacactctatctccactcactgtcagatagtgaaacagatcgactgtctcgcgagccaaggtcaagtaggagcgacactggcgctcgtccgtcgccagctgagtaagtcggctctgctgctgctccgcgctcatcttgctgagattggccttatctgatagcagctgctgggtctgatgtatgcgcttcaggttctccaagcactcgtccagcaaaaaggtggtgtcgttcatcagcatattgacaaactttacgaactgatttcccacccgggattcacaaataacggcctgccggtggatggggttctcccacatggacttgaacagatggctaatatgatatctgtacaggaataatatttgattaattacacgtgtttgtaaatcatacattaagcgtattagtatgaaatacgaatatgtatatattcatgtttgtattgcccagatcatttagctgtatataaaagagtgtttatctacgcctcaaataacttttggaacttttccgtgctgggttaccacaatgagggtgcgtaaccgccgttatgactcattctaaattatgaaggtagctcggttggcatgctcacctaatggtaaacttatcgtaaaactcagtgctttggcccgttgtctctacgtccacatagaatctcatcagtgagctgaccagggcgttctgggccaactcatggttccacatctgtttggagcacacaaacaaagctttagaagtatgacacttaggcgattgtaaccggaacctaccgccgcgttaaccgagttggctggcttcaaggagaacacaaacatcacctcaaccagtttggcagtcacatatggattcttgatgaggtgcgatgcgcagacgcaggtcagcagccaggtgatgatcgagtggtcgatgccctgacggatgtccatgttggcatgctgcatggtgaacaggatgaactcagcgatgtcatcgatgtaccactcgggcagtgcggaaaatgcatccgttggtaatagctgctgcacgggcagtttggagatgaagggtccctcgatcgggcgtccctcgaactggtatagcatgaactcgcagacagtagagtagaattccgtgcagcgctggagcaggcccggatccaaaagagtgatctcgcagcaggtttttgatctaaaattcggaagggataccaaattagattcaaagatgtgtcacacttaagtggaagtgactcactaaacgtgtgaaggtcacaaaatgatgaaatgattttaaataacccaccgatttagctttcgcagttgcttttcccagcgttccttaaactgattattacgattggcgtagcgggagttcatccaatgggacttggtacggtccagttcgtcgatgagtttctgcagctctttaatggcgcgcaccttttggcgatagcgctggatggcaggcaggtagcccagatgatgggcctgtagggtgaggaaccaacactgcgtctggaagtttgtgttctccacgggctggctaaaatcacgggccaggaagttgcggtactcctcctcgctgtacctaatcttcgtgtcctgctcgatgttaacgagcgagttcttgtagtaatggaaatttggctcaatgcggtccaacttgatcttcaccgacagctgctgcagcacgctcatcaggttaatcataaaaccgtccctggccagcagcttttcgtcgctggcgaactgcacacgacgatcgttgtgccgaaggatactggcgatgtattccagcgtcttgggacgactgctagcatttacgcacagtgaatggaacactacgtgcatattggtgcgcattgagtgcagctcctaaaatattaagaattcattcaatgattacattatgtttaacattacattagtaattagttactcacccatcgcaatcgagagctggatgcatcttcaagcttgttcttggtggtaaactccgcaaacttgatgttctcctcagcgaacagcgacacggaaaggaagggtcccagaaagctgcattttactatttctcgaccggagatctttgtgcagatgggtggcaggaagttgggctgcctggatacgagatctgcgatgggtcgcacactgcccaccttgatgaccaccagtttggacagccattcgatttgctgcacactgatcttggaagtgcagatattgcgctgcattccggcaaagaggccacgaagcacctgactgaaaattgtgtcgaatgcttcgcgatcctggtgagtgtgggctatcaagtcgatgaggaaaggctcgctcaccttggccatgtacatcagatccagcagagcagactgatccatgtggccgttgagattctggtaaatgcgatcggtgagcaccaagacggtcattcgcatcacctgttcaaacgccagctgcagagcaggctgggtgagcggcgtctttcgggagcactctgtctgatagttctggtagcaacggattaaatagagcagcacgtggtgtttggtggtggcaacgatgctaagcactggtggagccacgcaagtaccagctgcctcgctactagttgcttcaattggtccagatgcgccagcagccgcagccgcagtttctccgctggcagttgctccaccggtggctactgcgttggcaaggatttcctgtacttccgtatcatctgatttaattttcttggcagaggagaactctttatcgtccgctttaacagaaacgccatctccttcgatcagctcaccgttgtagatcttcaaaacagcctccatgagcacattggccacaatgcactcgaagtcgaatctgcggtgtggctgctgctccaggaagctggcactctgggcacaaatgatggacccgctaccgtactcattccacgtggcattcagtaggcgggagagcaattgttcgttttgctcatccgcacttttttttggaccgactacagtttcaatggacaactcggcatttccagcggatatcttgcaactctgcaacacactccttttggtggcctcggctgttggcaggctgagcgctgtcgtcatatccacatcttgcattggtgtcgagaccaccgacttcatctccacatccatgtccggttttccgctcagttccctccaagcgggcgccgaagtgggcagcgatacctccttttcgccgggcgtggcctcacgtaccagtcgagactcgccagagacgttggtcggcttccgtggcgtagtagtcaggggcgccagggcacactggatgccacttcgggcagccaaagtccgaagacgacgggcgcgcatctgaaagaattaaagaggttagttcaccaatttagctgttaccaattaaagtatatcatagtttaaagttcgttttccttttacaaaatagtttacttgtattattgatttagataactttaaatatgatattttgttgcttcattaagtttgcgaaaacgatatacctcttctgcggataattcggtgaccaccacagactcggccggctgttgcggctgcacatcggggttgggttgctcaggcagttgctgaccgggtatctcgccctgcgctaactggggctgctgatcctgttcgtgctgatcctgttcgtggtcctgatcctgatcctgctcctgatcatcatcctcctcctcctccatgggcttttgtggcggctcttcttccggcatttctcggatccgctggtactctgggaaacaatgcgcagttgtgctaccaaatctgttttcgcctctctcactgtttttgtttgtttgtggcgtagtttttccgccgcttcttctgatgctgctgcaaaataagaggcgatgatgtgggttaatgaaccaaacaaaagcacgcgcactcgacaaataaataaaataacaaataaagagaaaattaaaacaaagtccagcggtcaacgtcaagttcacgcgaagacaatgccgccatcgccaaaaccagatggattggccgtttctctttgtgctacgcaactacgcactagatggatgatgtgcagcatagctgggagcataccaggacaactgacctgccgcacacagtcagtgtgcgaatcaaaagcggacgcagatcggccgaggttgacaaaaagtgcacggctgcaactatttttagaagaggatttctcgagcactggcgctgcactgcacccaaaacaagtgcagtaaacaatatcataacatatgcggaatcggatggcgaaaccttatataatgtttagggatagccgatcgaataggatcggatcggcacgggatatcaccagctcatttgcgcatttgagacggcggataaagtacacaaaatcgtgggatatataatcggacataggttcgatgtgagggtgtgtgaaatacggaaaatcgaggattgcgccgcacatatattcgcacttacctgactctacggaccgactttcacctgctgcaaaacgtattggttgtgctacggcccgtaactattgcattttacggaactctatatggtttcgacaattcacccgaacaattccacgtctggtggtgaccacgcaaaaaatttctcttttgttctgcgagcttcgtggggattggttatcggccctcggctggctatatctatgtggggatcgcccgaatgcgatccgtatatcgacacaaatgcttcactggccaggcgatgggctcaagaaatacagacctccgaactttcctccaattgaattacttataatttttgggtttcgcgtcagtcgacgaacagtgtttcagtttggtctggtggccgacagtcacactggccgcggcgtggtcacacttaaagatggaatgttcgccgatagttgctttaacccttgcagggccctcatatttttatgatttcattatcgaatttaaaatttcgttaaacatccgaaaagttgtgaatcatttgaatactatttgtaattttaaatttgcacttttgtttttgcctttaattgcaataatgttctctaagcatctatacccaatttatatatcctttttgctctaagagaactagtttgaaaatatctgaaactattgtttgtttgtcgtttgaaaatatttaaatatcgctgaattactaggtgcgaactgattaacgatgggaaatcaaaaattaggcctaccaaaatggttatattcctcatgacacataatgaaaagcaagtgttgtttagttatttttgttcaacaaaagaaaatcatttacttcattttacaaaaatgttacaattatgtggaacctaattatgaacctaatacctaagtaaccgctactagaaatccgtgtatcgctgtcgcagactctgccttttggcaacgtgatgcatctgcaaaacacaagcatttgaattacaaactggcattatatgtggttttaattaggataaggactaaccaagcgctgctgacgtcgttctcgattcatttcgtaggccttgagcagcgaggggcacgtgcgcttgatgaactcctccgattgccagaagagtccgccttggttctcgtagcgcagaaggaattcaacctgcaaggatattaaggttattaaatgatacctacaattgggatagagggcaaactacataagattcagactgtttaaaagttttccttcgctttacaaagtaaagaaagctgatctttggcttatttattttgtaaaagcaaaagtcatatagcaaaccttttccagcttagaatttttgtttactaaatatgatatgaataaaccaacaatgtgttgta

SEQ ID NO: 21083 - DNA, 4360 bp, DROSOPHILA
ccaaactgaaacactgttcgtcgactgacgcgaaacccaaaaattataagtaattcaattggaggaaagttcggaggtctgtatttcttgagcccatcgcctggccagtgaagcatttgtgtcgatatacggatcgcattcgggcgatccccacatagatatagccagccgagggccgataaccaatccccacgaagctcgcagaacaaaagagaaattttttgcgtggtcaccaccagacgtggaattgttcgggtgaattgtcgaaaccatatagagttccgtaaaatgcaatagttacgggccgtagcacaaccaatacgttttgcagcaggtgaaagtcggtccgtagagtcagcagcatcagaagaagcggcggaaaaactacgccacaaacaaacaaaaacagtgagagaggcgaaaacagatttggtagcacaactgcgcattgtttcccagagtaccagcggatccgagaaatgccggaagaagagccgccacaaaagcccatggaggaggaggaggatgatgatcaggagcaggatcaggatcaggaccacgaacaggatcagcacgaacaggatcagcagccccagttagcgcagggcgagatacccggtcagcaactgcctgagcaacccaaccccgatgtgcagccgcaacagccggccgagtctgtggtggtcaccgaattatccgcagaagagatgcgcgcccgtcgtcttcggactttggctgcccgaagtggcatccagtgtgccctggcgcccctgactactacgccacggaagccgaccaacgtctctggcgagtctcgactggtacgtgaggccacgcccggcgaaaaggaggtatcgctgcccacttcggcgcccgcttggagggaactgagcggaaaaccggacatggatgtggagatgaagtcggtggtctcgacaccaatgcaagatgtggatatgacgacagcgctcagcctgccaacagccgaggccaccaaaaggagtgtgttgcagagttgcaagatatccgctggaaatgccgagttgtccattgaaactgtagtcggtccaaaaaaaagtgcggatgagcaaaacgaacaattgctctcccgcctactgaatgccacgtggaatgagtacggtagcgggtccatcatttgtgcccagagtgccagcttcctggagcagcagccacaccgcagattcgacttcgagtgcattgtggccaatgtgctcatggaggctgttttgaagatctacaacggtgagctgatcgaaggagatggcgtttctgttaaagcggacgataaagagttctcctctgccaagaaaattaaatcagatgatacggaagtacaggaaatccttgccaacgcagtagccaccggtggagcaactgccagcggagaaactgcggctgcggctgctggcgcatctggaccaattgaagcaactagtagcgaggcagctggtacttgcgtggctccaccagtgcttagcatcgttgccaccaccaaacaccacgtgctgctctatttaatccgttgctaccagaactatcagacagagtgctcccgaaagacgccgctcacccagcctgctctgcagctggcgtttgaacaggtgatgcgaatgaccgtcttggtgctcaccgatcgcatttaccagaatctcaacggccacatggatcagtctgctctgctggatctgatgtacatggccaaggtgagcgagcctttcctcatcgacttgatagcccacactcaccaggatcgcgaagcattcgacacaattttcagtcaggtgcttcgtggcctctttgccggaatgcagcgcaatatctgcacttccaagatcagtgtgcagcaaatcgaatggctgtccaaactggtggtcatcaaggtgggcagtgtgcgacccatcgcagatctcgtatccaggcagcccaacttcctgccacccatctgcacaaagatctccggtcgagaaatagtaaaatgcagctttctgggacccttcctttccgtgtcgctgttcgctgaggagaacatcaagtttgcggagtttaccaccaagaacaagcttgaagatgcatccagctctcgattgcgatgggagctgcactcaatgcgcaccaatatgcacgtagtgttccattcactgtgcgtaaatgctagcagtcgtcccaagacgctggaatacatcgccagtatccttcggcacaacgatcgtcgtgtgcagttcgccagcgacgaaaagctgctggccagggacggttttatgattaacctgatgagcgtgctgcagcagctgtcggtgaagatcaagttggaccgcattgagccaaatttccattactacaagaactcgctcgttaacatcgagcaggacacgaagattaggtacagcgaggaggagtaccgcaacttcctggcccgtgattttagccagcccgtggagaacacaaacttccagacgcagtgttggttcctcaccctacaggcccatcatctgggctacctgcctgccatccagcgctatcgccaaaaggtgcgcgccattaaagagctgcagaaactcatcgacgaactggaccgtaccaagtcccattggatgaactcccgctacgccaatcgtaataatcagtttaaggaacgctgggaaaagcaactgcgaaagctaaatcgatcaaaaacctgctgcgagatcactcttttggatccgggcctgctccagcgctgcacggaattctactctactgtctgcgagttcatgctataccagttcgagggacgcccgatcgagggacccttcatctccaaactgcccgtgcagcagctattaccaacggatgcattttccgcactgcccgagtggtacatcgatgacatcgctgagttcatcctgttcaccatgcagcatgccaacatggacatccgtcagggcatcgaccactcgatcatcacctggctgctgacctgcgtctgcgcatcgcacctcatcaagaatccatatgtgactgccaaactggttgaggtgatgtttgtgttctccttgaagccagccaactcggttaacgcggcgatgtggaaccatgagttggcccagaacgccctggtcagctcactgatgagattctatgtggacgtagagacaacgggccaaagcactgagttttacgataagtttaccattagatatcatattagccatctgttcaagtccatgtgggagaaccccatccaccggcaggccgttatttgtgaatcccgggtgggaaatcagttcgtaaagtttgtcaatatgctgatgaacgacaccacctttttgctggacgagtgcttggagaacctgaagcgcatacatcagacccagcagctgctatcagataaggccaatctcagcaagatgagcgcggagcagcagcagagccgacttactcagctggcgacggacgagcgccagtgtcgctcctacttgaccttggctcgcgagacagtcgatctgtttcactatctgacaagcgacattaaggagccgttcatgcgcgacgagctcgtagatcgactgagctccatgctgaatttcaatctgaaacagctggccgggcccaagtgcaacgacctgaaggtcaagaacccggcaaaatacggctgggagccacgcagtctgctggcccagatcttcgacatatatctccacctggactgtgatagattcgctgaggccctggctgccgacgagcgctccttcgacgttcaaatctgcaatgaggcagcatcgaggataaagcgactggccctccgatcggcggtagaggtagagcgattcaaggcgctcacacagagagctcacgaaatctatgttaccaacctacagactgaagatgaatgcgccgacgcacccgatgagttcaaggatccgctgatggacacgctaatgtcggaccccgtggtgcttccctccggcacggtgatggatcgggcgattattacccgccacttgctcaacagctgcacggacccgttcaaccgacagccactcaccgaggacatgctggtggccaacattgagctgaagcagcgcatcgacgcctggcgcaaggagcagcgtggcaagcggaacaattgctaagtcgcgcaccctttaacccatactgctatacttaggactagtttaatgtgcagttttagtgtctacctatcttctacatataaatataaatattctttgtgcaggatttagtttatttgtggtgcccccgatttttgggtggcctgcaagtagcagttaccattaatcaccgctcccgttaggagtcctaataatttagatgtttgaaaaatattgaaaattttcgc

SEQ ID NO: 21084 - protein, 1217 aa, DROSOPHILA
MPEEEPPQKPMEEEEDDDQEQDQDQDHEQDQHEQDQQPQLAQGEIPGQQLPEQPNPDVQPQQPAESVVVTELSAEEMRARRLRTLAARSGIQCALAPLTTTPRKPTNVSGESRLVREATPGEKEVSLPTSAPAWRELSGKPDMDVEMKSVVSTPMQDVDMTTALSLPTAEATKRSVLQSCKISAGNAELSIETVVGPKKSADEQNEQLLSRLLNATWNEYGSGSIICAQSASFLEQQPHRRFDFECIVANVLMEAVLKIYNGELIEGDGVSVKADDKEFSSAKKIKSDDTEVQEILANAVATGGATASGETAAAAAGASGPIEATSSEAAGTCVAPPVLSIVATTKHHVLLYLIRCYQNYQTECSRKTPLTQPALQLAFEQVMRMTVLVLTDRIYQNLNGHMDQSALLDLMYMAKVSEPFLIDLIAHTHQDREAFDTIFSQVLRGLFAGMQRNICTSKISVQQIEWLSKLVVIKVGSVRPIADLVSRQPNFLPPICTKISGREIVKCSFLGPFLSVSLFAEENIKFAEFTTKNKLEDASSSRLRWELHSMRTNMHVVFHSLCVNASSRPKTLEYIASILRHNDRRVQFASDEKLLARDGFMINLMSVLQQLSVKIKLDRIEPNFHYYKNSLVNIEQDTKIRYSEEEYRNFLARDFSQPVENTNFQTQCWFLTLQAHHLGYLPAIQRYRQKVRAIKELQKLIDELDRTKSHWMNSRYANRNNQFKERWEKQLRKLNRSKTCCEITLLDPGLLQRCTEFYSTVCEFMLYQFEGRPIEGPFISKLPVQQLLPTDAFSALPEWYIDDIAEFILFTMQHANMDIRQGIDHSIITWLLTCVCASHLIKNPYVTAKLVEVMFVFSLKPANSVNAAMWNHELAQNALVSSLMRFYVDVETTGQSTEFYDKFTIRYHISHLFKSMWENPIHRQAVICESRVGNQFVKFVNMLMNDTTFLLDECLENLKRIHQTQQLLSDKANLSKMSAEQQQSRLTQLATDERQCRSYLTLARETVDLFHYLTSDIKEPFMRDELVDRLSSMLNFNLKQLAGPKCNDLKVKNPAKYGWEPRSLLAQIFDIYLHLDCDRFAEALAADERSFDVQICNEAASRIKRLALRSAVEVERFKALTQRAHEIYVTNLQTEDECADAPDEFKDPLMDTLMSDPVVLPSGTVMDRAIITRHLLNSCTDPFNRQPLTEDMLVANIELKQRIDAWRKEQRGKRNNC

SEQ ID NO: 21085 - DNA, 8682 bp, DROSOPHILA
atcgtttatgcaaaatacgagaattttccaggcattctggcggtggaggaagctcgggtttttttttccgtcctggtgttctggtgattgctcgcgtgcaacctcaacaccctttgcttgtagtcaagtggcccataaattgttggccaagttttcacggtgcccgcccacttttcgttgcgctgctttgacaacggcaattaccttgaacttttcgccggatcgcctggaactaacctgccatatcaaaaaacgcggggaatttatttatatattttaagttctttttctttattttttttggcctgccattgccaacgggctcatatattttgggcaactcagtgatctcctgccgttttgtcagtttaatttcgggtttagctcgcttttcgctttaaatgagcccaaattgctggcccaaatgcatatatgtatgtatgcatgtaaccctcgagcgatttttgcatagtaaatatattttataggcaatcatttgcattccgaatatcaatttttgccatcaattttgggcctctgctaactgacatttattttttggccgccttatgagaccgtaactcgtaattgttgattgcactttttactgtcaacgtttggcacacaacatttttcgccgggaatgaggacttccatcaacaacttaataaaggaaaagccttgttagcggattttttcttctttttggcccattgattggttatattttggcagctgatcgatagttgttgtgcattggtaatgagtttatcatgcaatggcacaaagtttgccagtaaatggccatcatatgtggatggcaataagtgtttgatgtatcttctatattttttaaaaaacttgatttcttttatttattggctttgttatttattttttaagtagtaaacaattaaaattaagctatacagttgacaaataatttacatgaaatcaaaggaacacaaaatagcggagatagttgatggccaactattagttactgattttcccgctcccgcgacttttcccgctccctctccctttccctctccctctccctctctctttcccgcagataaagctgctgctgctgctgaatgaagtgctgctgctgctggtggtgctgctgctgcagatgctgctggtgctgctgcagcaactggtgctgctgctgcggactgagggtggccgcctcaccggcattctgctgcatgaactgctgctggtgctgggccaactgctgctggaactgctcccgcagccgttggtgctcctccgcatccatttcactgccgtagtcgtccatgtcgatcacctcgtcctcgtcgtcctcctcgatctcgtcctcgtcctccggatcctctgcatcctcgtagctgtgctgcgacccatcgtgcttggcatcgtcctccccatcgccgccgcctccgccgccggaggagctgcccttgttgctcttggtgtcgctgccatcgccgccctcctgctgcattcgcttgtgcttggtgcgtcggttctggaaccaaaccttaacctagtggacacacaaaattaagagatttctttaatgttatatacgatttgtcttgttatttaatagataagcaattattttatttaactgctcaatttaaatttaaagcaaccattttgtgaccaacgcttcgagtctctccattctaacccctgtttagtataaatattttcctaagcgcactttcaggaagcaattgagcacggggtagccctcttggggaaggttctttaacccttccataatgctcttggtgttcgtacactctttttttttttggcaagccgtaaataagtttaacgagtcctttaattctatttacggcctgcctcccagttatgcccccgagggtgcacagtccagtgccccgtgccactgcgcgactcttaacctctgcaatgcccttactggaagcgctaataactcagtaactccggcacttcttgggctaacgaccagacgacatgcaatcacttagcccctaaccgaaggggttgaactgggggtgcttattgaatttgatgcgcattaagggcggccgccacccgttgtggcccatctcacctgcgtttcggtcaggctgagtccctgggccaactgcttccgctccgcccccaccacgtagtggttcccctcgaaggcgtgctccagcttgagtagctgcgtcggcgagaaggcggtgcgcacccgctttggcttgcggaatggctggaacaggaaatctgcaagagatcgacaatcagagtgttaatggctgctgcttggaaactaacgtagacatatactaaaaatatttaataaaatgttaaaatgccttattagagaatgtgaatataatgtatgaaactacttattttacatactcttaaaggattgaagtacttaggttaacttacataaattgatttaccatcgaatatattgatttcataaaacattgtatatacatatgtatataccccatctaaggagccgaggaagcggcatccttcgctggctgctctgccaattagatgacgttgtgcctcaaattgttgattatgaattccgcgaatgccgcgggcaaagatgccgcacacagtggccactcacatgttgcacacgctcattacaaaacaataaacaaatttccagacatggaccgcaaaaacacagcgaaagaacacaaagggcttctggttcgtgccgctttcggcgctgtgttttttttttttttttgtagccatgtcccagaatcgctgataaggccaaaacaattgggcctggccaagaggagctggcttacttcggcctggacgccaagccgaacactttagcgctcctaaaagccgccaacgacgcctctttggagaaccgaggacccattgttcttcctttcagccggcacaacgtgatattttgacgtttatcacgatttctggaagaccatatcccccatacccataaccattcccagtcccaatccccaccttgaagccaagtccagcttggcttttgcgcctgcgagttaacaaattttcaattgagccacaatttgaatattaatatgaggcagcaggctactgtgcgagattcaactgagatttctggtggggcacaggaatgtgctgggcaaaatggataatggatagtggagcattaagaagctaggagtaagcatatttcagctctatggatttttcccggtataaaccaaaattagtattgattgttatggttttatttacaataaatatatatttagtgaagaaaacacggcagttttattattagaaaatacattaattaatgccctatatatcatacatttgataatgtatatctgttgacatttcctgaaaaacagctaaccataatccggtggttaaccaattttctgatcgttctgactgcccccaaaactgtcatcttaaaactctaggtcattcaaagctgctaagttgatctccctagccaaacatggaacgtaaaccagccgtctgttgtgatataatttagtgaacaagcctaagctgaaggatcttttcgctgccgcaaggtgtgccaattacaaaatcaatattgttatagccaaattgaatcgatttcggaggcaggaagtccgttcataaaatacgacacaagctatacaacagaagctaagccattgcaaaaataaacagctaatagagaaaggatacaaggagaaagggtgcgcagccattagatacaagatacaaccccagaaatgtatcttgtgtcttgttagcaccgccgggctggaaaaaataataataacaatgaaaagggaagagggaatgatatggactgggaatgggaatgggaatgggaacttgtcaattcgacacttcataaatgcagcctcgcaccattgatggccatgtatccacgtatctgacagatgcaactgactcggcggactgactgcgtgcctggtttttgctatgaacttgacaaacgattgccaggaggtagcatccagagtgatctagttcggcttcttcttttttttttatatagcccacgatcgcttgacatttgttacatttgacagctaacaatgtagctgcaagatacaagatacacgactgtatcttagaagaggctgtataattgataatgccgccgctcacaatggccacttaattattttttctagctctgcagcagctctcaatgaagtgtgtgtgtagtttttcccactttttcctttttttcctccagctttgtggacacaaaggaaaccgccgtgcgaaaatacgcgcaattgacaattaattgatgtgtccgctctgctggccaagttgttgttttttatggtttttgtttttttttttttgcagtggctcacacccttgtcagctgtcattttttgtatatatagagattcgagtgtaccttattttttagcccatgatggaagtgccggatcgtttcgtttcgatttcgtttgttcgactgtcctggcctttttgtgcgccctattatttatcacttatgtgcaattgtgtttgctttcttttttaccgagttagggcttaatttttatgctctcatgattttttcattaatttattgcattcctcgcatgtcccgcgtacgaggacattgactcggaatcgataattgaaatcaaatgaatgacagacggggatgatgtgttgtgatgatcgatttgacgggaatggccatttgcagtcgggatgtatgaatggaattttgtgggtttgttgggataatgggtttgaacaatgtactactgaaatgtgcaattttataaatgggcgaagtaaaaggtaaaacactacttaaaaacttgattttacagttttatgctgtggagtataaatacatacatacttctttttgaaaaatgatttacataagataccaataaaatagagcagtgatactaaggaatacaacttaaatattctaatgcgtaaattcgatttctaacgatacatatttatgaggtatactaattgttagctgctaactcgtaagcctttagaatgggaatcccgaagcagcttgtccaattacagtgccctctatttaagccctccataataaggatctcagccttgttaatttaacccgttttcccagaacttcaacggctgcattagagggcaacacccagaaattgcagcacgtgcaagctgaattgagttactgacgtatcatcaccgtcgctatcgcgatgatccccattatcttactccagatcgggaaaaaatggaagaaaaacaaacccatgtaacctggtattactcacacgagttacaaaacaaacggagatgaaaaacatttacaattaatgaaatcgttatgcgaaacattgacatttcacgttcataaatcaagcgaaaattacaggcggcgcggagaaaagtgagaaaaaagagaaggagcggcgggaaatgggaaaacaagtagaaagggagaaaataatgaaacggagtacaacataattaaggcgtaacggggatacatgtacacttaagcaggtgaaaggcgtgtgagtgtgccgaaaattattattatatttaaccggccgaaaaaaaacatggataccaacatggcctggaaattcaaatggtaatcatgagagcagcggaatggtagaaaaaagtggttaaaccgtaataaatgacaatgtttttgagatgcgctttgcggtggctcttcgcttctatctgccagttttttttttttaccattcctctcggttctttgcttggttgccccaaaacctcaattaaaaacgcattaacatttcaatggttgcacttttcgtacgttacacatacgccgcatgggcccgccgcatgagtaactggcgccgtctgttggccattaatggtaatttcgagtgaagagaaaaagtataaatagagcaaataaatgctaaacacacactcacacacttggctggccatttaggtacgctgcttgacctaacgatgtgtgtaatgttgtttaaacaatttaattaaaatgtaatttgtttggaaatagttatcaaaatgggttcggttccctccacattccccccttcctgttcgctcccattctccgtcccgctccctctgatgatgatgagcccgatacacgtctaattaacttgtaataaatgtttgccatttgcttatttaactttaattatatggagctgcgcggcaacaacagcgataactgaataattgcttgattggggtcctctctactataatggtgctgggcttcgaatatgacttaaggtgtggtttctttttctctgtcgctcgcaacactcagcggccatttgaaacggctataatgaatgcggaaaactcgttatagcgaaaaataaccaacaaaaggggtggttgctatctccagaagaagaaaccgaccgtaaactatcataatattctaatgttcaaatatgaaaaatatatatgtaacaactatctttctaataatccgtaaaagagagatgtactcttattatcagaatagggtaaatattaaattaaatgatatgtattattgttatataaactgttattaattttgcagtaaatttattacaaataattgttagcttagatgattatgcataaaaattatatttttcaatttatagaaataatttttagcggttttatatacatatgaaagtaccgcttgctaaaccggttagcttctctgaactctgaacttattgaaaatattgtaataaacaatagatatatttaaaacagtgtgattacttactgcctgggaatcgtggaaaaatgcgtccgtgtcggctgagcaaccatggatacaacggatagctatcccggatcagatgcggcgcactcccgaacggatggtgtccgtggggcggaggatgcccgggatgcggtccgccgggaaagattccaagtggaatttggccgggcggcagatgcggatgtggaccatgtggcggtccagttggcacgggcggaagttgctgttgttgctgctgctgttgctgctggtgatgatgagccagtgcagcagccatttggaactgggcggcaaggaacggcggtggctgcgacggcgggtggggcggacccgccatgcgcaccgccatggcgttcggtgaggtgcggttcccaattaaagctagatttggcgccggcagaggcaacggacggatgagggttggaggatttcccgttcccgacgatggatccccggactttgcagtattcccggccgctgccggattgcctcctgcattggggggcgatggcgaccggctaaccggtgatctctgaggactgcgcgatcgatccagcgaatcccttctgcggcagtagatatagcccctgggcgtccggcgcccactgttgttcgtgttcgttggcgaagcgggactttcgctgcgcggcggcggcgaagatatcacactgacccttagtggagccgatctcgtcgaggattcgcccacaatcgagtcgatgctgaaggccagcttgggcttgctgctcgcggaggcggaaacggtactgctggcggaaacggaagtcgaggatgcggccaccgaggagctgctgctcacaaaaggactcgtcggcgccatgggcagcatgttgaacgtttgccggccgcaggtgaccatttggtaggggtttcgttgattggaaaaacaaatgaatcactttccctcctcttaaacttcccgattcgaagtctctgcaagtcgaagtagattataagaacacttgtaggccttaaattccattttttccattccatatttgacttttttgaaaaaaaaaattttgtattttcgaacgggataaatcagtaaataaaagaataatgctcaactaaaagttttaggaataaaataaaacggtaaaaatcctactaaaatcaaagggaatggaaattgaaatggaattgaactgaatagaaacggaaacggaaaaagggttgtactgatcgaagctcccaataaatgggttggtgctatggaaacatgatcgcgtacatcggttaatggttactagatatcagataagcacacacgcactgtttttccgatcagatagctatagctatatagctacgtagcgttgtatctgcgatgctccagcggttggcatccgtcggcgtgacattgataaactgtaactgtaactggagcggcggcaacgcggcgattggagcgtgaccgtaccgcttcgctggacgattgacggcggcgattgatggttggcgattgactattggcgattgacggtggcggtggcggtatcagttaacggttaacggttatgccggctacccggtaacgaaacgattgcggtggccgcgctgcgatgatgatgagcactgtcaacgccattagcattatggagcgtctaaaggcgtctaattgttggctccacttcgccgctcgcaacctctgtctctctctcgctttctctctttctgtcctgatttttggcgggggcgtcggcgaatcgctgcgtggctctcacgctgagcgttttagctcgagtgtcgcgttggaaaaagccgcaaaaagtttgtggggccagttcgagtgtgcttcttcttcctttgcttgtacttccagcgcagcaatactgctggcgtctcgctcgcacacg

SEQ ID NO: 21086 - DNA, 1575 bp, DROSOPHILA
atggtcacctgcggccggcaaacgttcaacatgctgcccatggcgccgacgagtccttttgtgagcagcagctcctcggtggccgcatcctcgacttccgtttccgccagcagtaccgtttccgcctccgcgagcagcaagcccaagctggccttcagcatcgactcgattgtgggcgaatcctcgacgagatcggctccactaagggtcagtgtgatatcttcgccgccgccgcgcagcgaaagtcccgcttcgccaacgaacacgaacaacagtgggcgccggacgcccaggggctatatctactgccgcagaagggattcgctggatcgatcgcgcagtcctcagagatcaccggttagccggtcgccatcgccccccaatgcaggaggcaatccggcagcggccgggaatactgcaaagtccggggatccatcgtcgggaacgggaaatcctccaaccctcatccgtccgttgcctctgccggcgccaaatctagctttaattgggaaccgcacctcaccgaacgccatggcggtgcgcatggcgggtccgccccacccgccgtcgcagccaccgccgttccttgccgcccagttccaaatggctgctgcactggctcatcatcaccagcagcaacagcagcagcaacaacagcaacttccgcccgtgccaactggaccgccacatggtccacatccgcatctgccgcccggccaaattccacttggaatctttcccggcggaccgcatcccgggcatcctccgccccacggacaccatccgttcgggagtgcgccgcatctgatccgggatagctatccgttgtatccatggttgctcagccgacacggacgcatttttccacgattcccaggcaatttcctgttccagccattccgcaagccaaagcgggtgcgcaccgccttctcgccgacgcagctactcaagctggagcacgccttcgaggggaaccactacgtggtgggggcggagcggaagcagttggcccagggactcagcctgaccgaaacgcaggttaaggtttggttccagaaccgacgcaccaagcacaagcgaatgcagcaggagggcggcgatggcagcgacaccaagagcaacaagggcagctcctccggcggcggaggcggcggcgatggggaggacgatgccaagcacgatgggtcgcagcacagctacgaggatgcagaggatccggaggacgaggacgagatcgaggaggacgacgaggacgaggtgatcgacatggacgactacggcagtgaaatggatgcggaggagcaccaacggctgcgggagcagttccagcagcagttggcccagcaccagcagcagttcatgcagcagaatgccggtgaggcggccaccctcagtccgcagcagcagcaccagttgctgcagcagcaccagcagcatctgcagcagcagcaccaccagcagcagcagcacttcattcagcagcagcagcagctttatctgcgggaaagagagagggagagggagagggaaagggagagggagcgggaaaagtcgcgggagcgggaaaatcagtaa

SEQ ID NO: 21087 - protein, 524 aa, DROSOPHILA
MVTCGRQTFNMLPMAPTSPFVSSSSSVAASSTSVSASSTVSASASSKPKLAFSIDSIVGESSTRSAPLRVSVISSPPPRSESPASPTNTNNSGRRTPRGYIYCRRRDSLDRSRSPQRSPVSRSPSPPNAGGNPAAAGNTAKSGDPSSGTGNPPTLIRPLPLPAPNLALIGNRTSPNAMAVRMAGPPHPPSQPPPFLAAQFQMAAALAHHHQQQQQQQQQQLPPVPTGPPHGPHPHLPPGQIPLGIFPGGPHPGHPPPHGHHPFGSAPHLIRDSYPLYPWLLSRHGRIFPRFPGNFLFQPFRKPKRVRTAFSPTQLLKLEHAFEGNHYVVGAERKQLAQGLSLTETQVKVWFQNRRTKHKRMQQEGGDGSDTKSNKGSSSGGGGGGDGEDDAKHDGSQHSYEDAEDPEDEDEIEEDDEDEVIDMDDYGSEMDAEEHQRLREQFQQQLAQHQQQFMQQNAGEAATLSPQQQHQLLQQHQQHLQQQHHQQQQHFIQQQQQLYLREREREREREREREREKSRERENQ

SEQ ID NO: 21088 - DNA, 3724 bp, DROSOPHILA
tatgcggaatcggatggcgaaaccttatataatgtttagggatagccgatcgaataggatcggatcggcacgggatatcaccagctcatttgcgcatttgagacggcggataaagtacacaaaatcgtgggatatataatcggacataggttcgatgtgagggtgtgtgaaatacggaaaatcgaggattgcgccgcacatatattcgcacttacctgactctacggaccgactttcacctgctgcaaaacgtattggttgtgctacggcccgtaactattgcattttacggaactctatatggtttcgacaattcacccgaacaattccacgtctggtggtgaccacgcaaaaaatttctcttttgttctgcgagcttcgtggggattggttatcggccctcggctggctatatctatgtggggatcgcccgaatgcgatccgtatatcgacacaaatgcttcactggccaggcgatgggctcaagaaatacagacctccgaactttcctccaattgaattacttataatttttgggtttcgcgtcagtcgacgaacagtgtttcagtttggtctggtggccgacagtcacactggccgcggcgtggtcacacttaaagatggaatgttcgccgatagttgctttaacccttgcagggccctcatatttttatgatttcattatcgaatttaaaatttcgttaaacatccgaaaagttgtgaatcatttgaatactatttgtaattttaaatttgcacttttgtttttgcctttaattgcaataatgttctctaagcatctatacccaatttatatatcctttttgctctaagagaactagtttgaaaatatctgaaactattgtttgtttgtcgtttgaaaatatttaaatatcgctgaattactaggtgcgaactgattaacgatgggaaatcaaaaattaggcctaccaaaatggttatattcctcatgacacataatgaaaagcaagtgttgtttagttatttttgttcaacaaaagaaaatcatttacttcattttacaaaaatgttacaattatgtggaacctaattatgaacctaatacctaagtaaccgctactagaaatccgtgtatcgctgtcgcagactctgccttttggcaacgtgatgcatctgcaaaacacaagcatttgaattacaaactggcattatatgtggttttaattaggataaggactaaccaagcgctgctgacgtcgttctcgattcatttcgtaggccttgagcagcgaggggcacgtgcgcttgatgaactcctccgattgccagaagagtccgccttggttctcgtagcgcagaaggaattcaacctgcaaggatattaaggttattaaatgatacctacaattgggatagagggcaaactacataagattcagactgtttaaaagttttccttcgctttacaaagtaaagaaagctgatctttggcttatttattttgtaaaagcaaaagtcatatagcaaaccttttccagcttagaatttttgtttactaaatatgatatgaataaaccaacaatgtgttgtaaatgaaactgtaatcgaattcatagaaaatttgtgaaccctaaaccgtactgatagtttattgctttcgtattgcaaacgtacctttcccgccttggtctccttgcccagaatgcgttcaatgccattctcgggcttgatgcgtctgaagaagtcctcgtcgttgtactcggtgaccacctcctcgccgacttcgtttagcatatcctcgatgctgagcagtccatcctgcagccgctcgccgttctgttcgacgcgctgcacgtatgtcaacgggtgctgcttgaggtaatcctccgcctcggcgattgtcttggccagatcgaactcctcctccgcctcctcctgctcatcgtcatcgttgtcctcgtactcaccgtccagctccatgccatcacagttagcgccgctgggcgaggaggttcgtttggtatgcatggagcgtcgctttcttttcatccagttcccgccgtcgttttccttgacgtccggatggaagcgtaccttcttcacgcgcacggacgacgaggcggaatctgttgtttcgggggtggactggctgggtgtctgctgcgactccagcatgctgccgctgatgctactagaggcggacgtgggtgttgatgtggatgtggatgctgatacggaggcgccggtgctctccgccagcgtggtttccttgaggttctgtgatataagcttgactttcgtctcgaaggcagtgcatggagatgtgggcgatttgctggccggatgttctggtggggattgactgctctgcggactgtcgccctcgccgcacgaccccgccgcagcttcagtcttgtgatccgtctgcttgccggctccctccatcgaaccggattccttgttaatcgattccgcagcggaatccctgctgcagttgtccagatctccgactgtggagtctccgtcgcccgtcgtcgttgtctccaccatcacacacttgatttgcatagatttgtccagcgagtcactgccagccgagtcatcattggacttggtatccatgtgtttgggtggctccgtgttctctgcgttggctctctatcgttttgcggctctgctaaagttcaattttagctaaatgcatcgcaattcatttgtaatctttcaacaaaacggctttctcagtgttaccgtaccgacaactatgaaatataccctcaaatttgcgtagctgacttggcagcgattgtgaaacgattggaattgcaacagggagctaaatagtatatatgattttatattttctttggctcttttgattatttggagagttattatttaagtatctcagtaagagtaatctggaatagcattgcatatccctttttgattattattattttttctttaattaaaagaaaaagagtaaaataatcttttgttccacattcaatcgtttcacagagttgccgtatcttgaaagtcacttttaaattgatataccgctataccgttacgcaggctacctttcaaattaaaattccgttaaaaaagaatgcttgattttgatgtttgatttcagtaaagaaaaaagaaaaatgttgaagtgctttcaatttaatagaagtcaatgaactattttgcattatgatttgaatttttagaaactacttttggcgtttagatctgaacccaattattcgatttcttttttaaatagaagtaccaaacatacagataatcggtcaattgtaaatgcaacttgtgttgtttttatttgatttctttattaacaattgtttttgtacattttctcttttgtaattcaatgccgtaaatcttattgtgtgtttgtgtggtgtgtgtaagtgttgcgtgtggttgtgtgcgcagtaaacaaaactaagttatttacactagctttaagtttaaatgtagttcaatgttaaggactatttaatatataatatattgtgtgtatagatattcgtatcgatataagatgtatatatgcatatcaaaggcggtttgcatttatatccaagttagattctgtatacatatcgcttgtttgcgctatatcttctggttttgatttgctttgttttcaaatgtttccttgcattaagtttaaactatttaaatatggccccgctattccacatgtgttctttttgtttgc

SEQ ID NO: 21089 - DNA, 1352 bp, DROSOPHILA
agaaagccgttttgttgaaagattacaaatgaattgcgatgcatttagctaaaattgaactttagcagagccgcaaaacgatagagagccaacgcagagaacacggagccacccaaacacatggataccaagtccaatgatgactcggctggcagtgactcgctggacaaatctatgcaaatcaagtgtgtgatggtggagacaacgacgacgggcgacggagactccacagtcggagatctggacaactgcagcagggattccgctgcggaatcgattaacaaggaatccggttcgatggagggagccggcaagcagacggatcacaagactgaagctgcggcggggtcgtgcggcgagggcgacagtccgcagagcagtcaatccccaccagaacatccggccagcaaatcgcccacatctccatgcactgccttcgagacgaaagtcaagcttatatcacagaacctcaaggaaaccacgctggcggagagcaccggcgcctccgtatcagcatccacatccacatcaacacccacgtccgcctctagtagcatcagcggcagcatgctggagtcgcagcagacacccagccagtccacccccgaaacaacagattccgcctcgtcgtccgtgcgcgtgaagaaggtacgcttccatccggacgtcaaggaaaacgacggcgggaactggatgaaaagaaagcgacgctccatgcataccaaacgaacctcctcgcccagcggcgctaactgtgatggcatggagctggacggtgagtacgaggacaacgatgacgatgagcaggaggaggcggaggaggagttcgatctggccaagacaatcgccgaggcggaggattacctcaagcagcacccgttgacatacgtgcagcgcgtcgaacagaacggcgagcggctgcaggatggactgctcagcatcgaggatatgctaaacgaagtcggcgaggaggtggtcaccgagtacaacgacgaggacttcttcagacgcatcaagcccgagaatggcattgaacgcattctgggcaaggagaccaaggcgggaaaggttgaattccttctgcgctacgagaaccaaggcggactcttctggcaatcggaggagttcatcaagcgcacgtgcccctcgctgctcaaggcctacgaaatgaatcgagaacgacgtcagcagcgcttgatgcatcacgttgccaaaaggcagagtctgcgacagcgatacacggatttctagtagcggttacttaggtattaggttcataattaggttccacataattgtaacatttttgtaaaatgaagtaaatgattttcttttgttgaacaaaaataact

SEQ ID NO: 21090 - protein, 376 aa, DROSOPHILA
MDTKSNDDSAGSDSLDKSMQIKCVMVETTTTGDGDSTVGDLDNCSRDSAAESINKESGSMEGAGKQTDHKTEAAAGSCGEGDSPQSSQSPPEHPASKSPTSPCTAFETKVKLISQNLKETTLAESTGASVSASTSTSTPTSASSSISGSMLESQQTPSQSTPETTDSASSSVRVKKVRFHPDVKENDGGNWMKRKRRSMHTKRTSSPSGANCDGMELDGEYEDNDDDEQEEAEEEFDLAKTIAEAEDYLKQHPLTYVQRVEQNGERLQDGLLSIEDMLNEVGEEVVTEYNDEDFFRRIKPENGIERILGKETKAGKVEFLLRYENQGGLFWQSEEFIKRTCPSLLKAYEMNRERRQQRLMHHVAKRQSLRQRYTDF

SEQ ID NO: 21091 - DNA, 5318 bp, DROSOPHILA
gaacaaaaggaaagaggaattcgttaagcgataaaagataaagatgatggtgaaatatgaaaacttatttgactcaagaattgcaatatacatatatgtatctagattgaataaaattatctgttaggcaaattgaatcttgaattaagtgaataaaattcacaatgacgataaatctttttagtactataaatattaatctccaatagccataaactactggtcattagacgacgatattatatcaattaaaaacttataaagaaacccataacttggttgtatacaaacatatagatctgtacaagttgttattactttgggctcaagttctctaaaccagtaacaaaattcttataggctaaggttcgcaagtacttgaagactgaatgcccatttgtaaccgaatctcaccttccagcagtggaggctcatcatcgaattcgttgccggctcctccgccagcagctgactttccgctcttgtcctgtccgtagctcgtgtcggtgtaggccgtgggatcgtagaagccacccaagccttggctcggcggttgggcataggacgcatcgtagttcggcggcactgaggcctgtgtgttgtcgaaggtttggaaattcctgcaagcaagtggggcaacaattgtgaatgctgtgaaatggaattccgggtaactactcacagttcctggccaaattctggcatatcgaagttgtagctggcatcggccgagggcgcggagccgtaaaagtcattgggtccgccgaactgagacatgattactttaatttaagcgcaattcatatatttacaaaatgatatttaatttaacaacacgtcaactagaggtgaccaatagctaaatgtaatcgatgaatttcgatgttacctatcgtctaacaccggtgctatctgaaatcgatattttctcgcccatcgatttgttttaaattcaaaaaattgcgccactttataagaaagtaaataaaaacccgatcattttgtaacattcataatacattttatttccatagctccatttgcaacacacacaagttactgaaatagctatcctttggtagtagaggtacatgcttttggggctacgttgttattgcgttctttaaaggtctataatatgtaggaatataatattttgtaatttcgtaaagattcaaacgccctttagactcgtcgtttagttggtttagtttcacacaatagggtaacgaacacaatcgataactatatgaaaatttactaacaatacatagctgtgaattatatttatatatcaacatagataattatacatatgtgtcatatatgtatggtatttatgtatatggctggtttaactgcgttccatttgcgctaccgactaattattgttcgtctttcctttcgttttgcgtatcttctggtgattcgattctgacctgactagacctgaagcgggccaaactgtttgttaaacttataagtaaacttggattcaaatatcttattatgcattatgtaaatatgactagattgaatggggaattcgaataataacctagctttggtttcttatttcgtttggtttgcttctttttccattcctctcgctaggaaagcccgcagttggtttctgtccgtttccgcttagtcctctagatttcggaaggcctgctgcagatcctcgtacagctggtcgtagtccgccttgatcttttgctcgccatctttcaccgggtccttaaaatgtgaattattaatataaataatagttggaatagataaacccactcaccttgaacttcattgacgacagctggtacataattccgcccatcgattccctgatggtgttccatgtgatcttgttgtccgactgggctgtggactcaacggcatgacgggcggtctcatagaaggccatgatgtttctcagcatgcccacggtcttgtagaagggacaaacgcgatcgtatggtgagtaggagttctgttgcagaaagtcgtccttcagcagctttgccacttccagggtcaccttgtcggtctcggccagtgatgctttgcccaccagctgaacgatctcagacagatcctcctcctcctgcaggatctccttgaccttggtgcgtagtggcacgaactcggggtagttcttgtcatagtattcatccagagcacgcatgtacttcgagtaggagatgagccagttgatcgaggggaagtgcttgcgctgggccaatttcttgtcgagaccccagaacacctgcacgatacccaaagtggcggaggtcacgggatcggagaagtcaccaccaggaggagacacagctccgacaatggacacggatccctcgcgctccgggttacccaagcacttgacgcgcccagcacgctcgtagaatgtggccagacgagctcctagataagccgggtagccagaatcggcaggcatctcagccaaacgacccgaaatctcacgaagtgcctcagcccaacgggaggtggaatcagccatcatggctacgttgtagcccatatcacggaagtattcagacagagtgattccagtgtagatggaggcctcacgagcagccaccggcatgttggaggtgttggccaccagagcagttcgcttcataatggactcggtgacgccatctatctcgcaggtcagttcgggaaagtcacgcagtacctcagacatctcgttaccgcgctcgccgcaaccgacgtagatgatcacatcagagttggagtacttggacagggcctacgggtggttgaagtgcagattggaagggatggtcatttaatgagatgtaagatgtggattaagtgaataatttgcaacttgcctgcgaaatgacggtcttgccgcagccaaaggcaccggggatggcagtggtgccgccctgtacgcaggggaagagcgagtcaaggacgcgttggcccgtgaagagcggatggttggctggcagcttctctgtgacgggacgtggctgccgcactggccagacctgcaacatggtgtgcttggttatctcgccgtcgaactccgtctccaggacaatgtcctccaggttgtagttgcccgcgggggcaatgtatcgaacggttcccttagccctgggtgccacaatcatgcgctgcttcaccagcgtgttctcgtgtaccactccatacagatctcctccggtgatgtgggatcccacccgcacattcagcggattaaattcccacatctccgagcgcgacaaagcagttgtgttgacacctttgggtatatagatggagttggtcatgacaccaatgtcccgcaaaggacgttggatgccgtcgaagatgctgcccataatgccgggtccaagttccacggaaagaggtttgccggtacgcagcaccggatcgccgacagtcacgccagaggtctcctcgtacacctggatggtggccatgtcgccctccagacggatgatctcgcccaccagctcgtagtagccgacgcggaccaactcgtacatagctgatccagacatggcctcagcggtgaccactgaagtggatttaaagttgttgaaggaggaaaagcaggagaaatatgattagcaaggagtggagagagcagcataatgaggaagattatgcggaacaggaggagggggaagaaagcatacagaaatatgaaaaggagaaggataataaggaaggataaaaaggaagatgtggaggagtataattaagaacagaagaaaggcaggattaaggattacagaacttgggggtcagcgcatgaaggacgctggtgacgtcgcttacctggtccggataccgcgtagacacggccatattccgactcgcgctcctcgtctttgaatttcctcaagttggacatggtcgcggttgctgctcttcttcttctgcttcggtaacggtcaaatcgttcgttggctgtgggaaaaagtaaccgtttttcttataaacaaaaacacgcattttccatgcccccgaatgagagagcgttttccgcgaggaaacgcataggtggcgctgatgtgcagcagcagcccccagtgaaaagcttcacacccccgcagcacagcatcgattttccaatacaattttcacacatgccaccaacggcaaggtgaattttccaccttttacccatcacaaaagcaattttcacactttcttttcattcaacaccttgtggtcagtggttttgtggcgtaaaaactgctttttcagctgctctaaaattaaataagctcacatttgtttcaacagctcttatgaaaattctcttgcttttttgatttcactctagtattgatctatcggttatcgtcgagggctccaggttctctatagagatgggctcacatcaaactcacgcacgtcacgatacattaatagtcggattccactagcacattccgcagttaaatcttgaaatacttgttggtaattattaaaaatttaacataagcttgcatttttgtgctattttccaaattcttcaatgcaacttgttcactccagtaatataaatgttttgtaccacaactttaagccaatttctttttaattgcttataataaagaacaaatttattaattactttattatttttatttaatatgttctctaacattttaaatgcttataagtcgccgccaagtacagaagtatcagcaagaaaatatcgattgtaaattgatcgaattctgttttacatcactaatcggcagcggctgcaataaatttccgtaaaaaccgaagtaatccgcaattaaagaaagcaaaggacctgcatccgtgtgagatcgttcggcaccggtgccggcacatgaaatcctatcgagtgaccagtggaacagtgcgtacagcgccccggggcaactgaaaagataacctccaaagtccgtagacagcaggcagatgcacctgctccaccctttcccctcccaaatgcaagtgaaaatcgcgtttaaatagtgaataaaccctgcccagccatgtcgacgacgtcggtggtgcagcagttcgtcaacgggcttaagtcccgcaaccggaatgtacagaacaaggcaacccaggatctgctcttctatgtgaagaccgagctacgcgaaatgtcccaggaggagctggcccaatttttcgacgagttcgaccatcacattttcacgatggtgaatgcgacagatatcaacgagaaaaaaggcggtgccctggccatgagtgagttcctggctccccggcagtgcttgagaggatttaacgtcttccctttcagagtgcctgattaactg

SEQ ID NO: 21092 - DNA, 2590 bp, DROSOPHILA
caaaaaagcaagagaattttcataagagctgttgaaacaaatccaacgaacgatttgaccgttaccgaagcagaagaagaagagcagcaaccgcgaccatgtccaacttgaggaaattcaaagacgaggagcgcgagtcggaatatggccgtgtctacgcggtatccggaccagtggtcaccgctgaggccatgtctggatcagctatgtacgagttggtccgcgtcggctactacgagctggtgggcgagatcatccgtctggagggcgacatggccaccatccaggtgtacgaggagacctctggcgtgactgtcggcgatccggtgctgcgtaccggcaaacctctttccgtggaacttggacccggcattatgggcagcatcttcgacggcatccaacgtcctttgcgggacattggtgtcatgaccaactccatctatatacccaaaggtgtcaacacaactgctttgtcgcgctcggagatgtgggaatttaatccgctgaatgtgcgggtgggatcccacatcaccggaggagatctgtatggagtggtacacgagaacacgctggtgaagcagcgcatgattgtggcacccagggctaagggaaccgttcgatacattgcccccgcgggcaactacaacctggaggacattgtcctggagacggagttcgacggcgagataaccaagcacaccatgttgcaggtctggccagtgcggcagccacgtcccgtcacagagaagctgccagccaaccatccgctcttcacgggccaacgcgtccttgactcgctcttcccctgcgtacagggcggcaccactgccatccccggtgcctttggctgcggcaagaccgtcatttcgcaggccctgtccaagtactccaactctgatgtgatcatctacgtcggttgcggcgagcgcggtaacgagatgtctgaggtactgcgtgactttcccgaactgacctgcgagatagatggcgtcaccgagtccattatgaagcgaactgctctggtggccaacacctccaacatgccggtggctgctcgtgaggcctccatctacactggaatcactctgtctgaatacttccgtgatatgggctacaacgtagccatgatggctgattccacctcccgttgggctgaggcacttcgtgagatttcgggtcgtttggctgagatgcctgccgattctggctacccggcttatctaggagctcgtctggccacattctacgagcgtgctgggcgcgtcaagtgcttgggtaacccggagcgcgagggatccgtgtccattgtcggagctgtgtctcctcctggtggtgacttctccgatcccgtgacctccgccactttgggtatcgtgcaggtgttctggggtctcgacaagaaattggcccagcgcaagcacttcccctcgatcaactggctcatctcctactcgaagtacatgcgtgctctggatgaatactatgacaagaactaccccgagttcgtgccactacgcaccaaggtcaaggagatcctgcaggaggaggaggatctgtctgagatcgttcagctggtgggcaaagcatcactggccgagaccgacaaggtgaccctggaagtggcaaagctgctgaaggacgactttctgcaacagaactcctactcaccatacgatcgcgtttgtcccttctacaagaccgtgggcatgctgagaaacatcatggccttctatgagaccgcccgtcatgccgttgagtccacagcccagtcggacaacaagatcacatggaacaccatcagggaatcgatgggcggaattatgtaccagctgtcgtcaatgaagttcaaggacccggtgaaagatggcgagcaaaagatcaaggcggactacgaccagctgtacgaggatctgcagcaggccttccgaaatctagaggactaagcggaaacggacagaaaccaactgcgggctttcctagcgagaggaatggaaaaagaagcaaaccaaacgaaataagaaaccaaagctaggttattattcgaattccccattcaatctagtcatatttacataatgcataataagatatttgaatccaagtttacttataagtttaacaaacagtttggcccgcttcaggtctagtcaggtcagaatcgaatcaccagaagatacgcaaaacgaaaggaaagacgaacaataattagtcggtagcgcaaatggaacgcagttaaaccagccatatacataaataccatacatatatgacacatatgtataattatctatgttgatatataaatataattcacagctatgtattgttagtaaattttcatatagttatcgattgtgttcgttaccctattgtgtgaaactaaaccaactaaacgacgagtctaaagggcgtttgaatctttacgaaattacaaaatattatattcctacatattatagacctttaaagaacgcaataacaacgtagccccaaaagcatgtacctctactaccaaaggatagctatttcagtaacttgtgtgtgttgcaaatggagctatggaaataaaatgtattatgaatgttacaaa

SEQ ID NO: 21093 - protein, 614 aa, DROSOPHILA
MSNLRKFKDEERESEYGRVYAVSGPVVTAEAMSGSAMYELVRVGYYELVGEIIRLEGDMATIQVYEETSGVTVGDPVLRTGKPLSVELGPGIMGSIFDGIQRPLRDIGVMTNSIYIPKGVNTTALSRSEMWEFNPLNVRVGSHITGGDLYGVVHENTLVKQRMIVAPRAKGTVRYIAPAGNYNLEDIVLETEFDGEITKHTMLQVWPVRQPRPVTEKLPANHPLFTGQRVLDSLFPCVQGGTTAIPGAFGCGKTVISQALSKYSNSDVIIYVGCGERGNEMSEVLRDFPELTCEIDGVTESIMKRTALVANTSNMPVAAREASIYTGITLSEYFRDMGYNVAMMADSTSRWAEALREISGRLAEMPADSGYPAYLGARLATFYERAGRVKCLGNPEREGSVSIVGAVSPPGGDFSDPVTSATLGIVQVFWGLDKKLAQRKHFPSINWLISYSKYMRALDEYYDKNYPEFVPLRTKVKEILQEEEDLSEIVQLVGKASLAETDKVTLEVAKLLKDDFLQQNSYSPYDRVCPFYKTVGMLRNIMAFYETARHAVESTAQSDNKITWNTIRESMGGIMYQLSSMKFKDPVKDGEQKIKADYDQLYEDLQQAFRNLED

SEQ ID NO: 21094 - DNA, 8583 bp, DROSOPHILA
tcgaaggtggaaaattcgattcgattttctttctacgttcagttcggcaaagtaaacgtgctggaaattgcacaaaagtccaaggaggagataccagagtgattcaccggaatatgtaaacatttcttgcaacgattcatgaatatgaacacagccgattgtccaaccagaaataaaggtgtgtcaaacgatatcgtaaatatttaattccaatgcaaaacagaacatgtgaaaattcataaaactgcaacgtttgagcttaaaatcttttatatttcataatctgaaacattttttaatgaatagatgtgtaataccaaacagaaggattactcttttgctatgttctttccgattatattaaaatataaatatttttattaattcacttaccacatttcgtttcgcatgttgtccaaagcccgtgcaatggattaactatccaggtaaatttgcgcctggcgattcgtggcataatacccgtataaatacccacaacgcaataccaaagttcttaaaacaaaaaacaataattgcacaaatatagggcgaacacgaggatattccacaaaaaaaaccgaggggcatattgcctgagtcgcgttaattttgcatgccccaaaaagtgtgcagtgcgacggaaacggaaacgaaagcgcgaaatttcaatatgctgcttaccacgactacaattgtgcatggcaaaaaaccaatttcaatttgttaaccatttttttattcgcaatcaaatttattacattggctgacaacaaaagtattgagtaaacgcgcagcttggccagcgaaaaaaaagtagaatgtgtaaaacaaattcgcaatcggcgcttattttcttaaaaatatacatatccatatgtggttcgggtttggctcctcttgttgcttctcctcctgacatctgtgtgtgtatttattgtgctgctagagtgtgtgtttgcaggacaattaaaaccaggcaaacacaacaacagagggcgtagtggtggtggtggtggaatagcagcagggatctcgtagccctagtaaatggtaatcaacgcaaatcctccatagagcaccgcacacggataggcaatcagcagctgttgatggtccatggagaaggcggtggcgaacagtttcgaggccgatatggcgcaccagaatatggagatgccgctcacaattaggccgagtgtgcccctgcaagagtgaaacgagataccaactcagtccagatagatatagacgtcggtgaaatcaataaacaatgcatatgcatgaagcactgcctctacagagtgagaaatatcccaggcgaaagtgttctttattccactacaaatcttacatacttagcgaaaaagatatatttccaagaaatttgtgtatctagaatctttcaatatgatagaactggaaatgtacacatcttcatttggaatctttatcttgatctttattactaatattgacgataaaacataatatttacaaaaaacatatttactgggctatttcaatcgtcgacagataatgttcttttgaaatagaaggaagataattaaaataatgacggcttttgacactatttttctcagttcatcgacttgggatatactctattcggctgagtgttcataaaaaaggatgagtgtgcatgtgggtgtggggtaagtctgagcgtgtgtgcgaatgaatgggcagggcaaacaaagacagcaggcgatgtgccggcaaaaggatgtgcaaacacagtccaactacaaagcgcacacataaccaaccaaccaagcaacacacacacacgctcacacagggaaagcccagcggaaaatgaaaaattgatttcaaagcgatatacggaaaatgttacctttattccccaacgcacaagtcggcgaaagattaaaggcgagcttacgatgatacaatccgaataattacattgatttggtggtttcaagcaatattttccgcattatcttaccaaatcaattacatgtttactttaaactttactataaacttgaaaaaacacacatagtgttcggaattttaattcaaaatattttacgatcaataaatcaaaaaaagaaaacaatatcaaagttattacggtcagcaaggataaacaaaatgtatacttgagttagacataagattaaacacttgaaaagcgatggaaaaaaagttgtgatcccagaatctcattcggtaaacccatgaaatccgacaaagaaatcaatttaggaaaccaaaacataaatccccatattccagagttccaattttcagctacacgcacccttttaatggattgcctttctgtggtctcggcggctcgactgttctcctctttcctgttttccgccactcaactcaactgggcttccgtttttttttcgtggtccctgcaatcttgcccagaactgtgttgctcgatggtcacagtttccagcgcagtgctggtgccaagtgattttttggccccgaactgggcagcttaaatggtccggcactagcctaaaaaccaatcaaaacaatactatgtagggccggataactcgactgtctgtgtaatttttgcgcacttttgcatcaccaaacaaactcaattaaaaagtctgtctaaaaaaaaggaagtggaaaagggaaacggacagcggggaatcgcaaaaatatttactgtaaacttggctggcactcgcaggactatatgaacatcaaagctagcacacacacacacacacaccacccacaaaagtgcaagcgcttaaagccaacaaataaaaaatgcaggcaaacaggcaaccaaaatggcaattgcactgggcagttggacagtttggtgatagggttgggttgtgggccggaaatcgctggtggtggagtggattggatggcaggatggggcaaacaaaacgcgcttggtgtcgagtaagctcgagcaatagttgttttccacacacacacacacgttcatttccacccacgcccacccagcacagcacttagtttccccgcgctgctctgaaattatgacgtgccaacggggtggtgggtaggaaggaggtgcatccaccagagagaacgctaaaaactcacgcagcatttgcgtgttgctcctcgcatggccatcataaaaagcgtggcgagtgagtggagtcagtaaaaaaaaaaaacaaaaacggaaataagaacacaaaaaatgacggagaagaaaggcggggagggacggaaaacggcagtgggcggaatgcccgagccagcaagtgctggacacatatttgaaaaggaaactacgtgaacgaaactcaacgggtggcaaaacaggacatggaacgttagacagatggatactggaccgccgggcaggagcatttccaccaccgaaaccgcccacttggccaaaaaccacccactccaaacgttcgcagcgcgaaaattaaacggcgcatagttggcgttatttggctccgctttttgcctgtcttgccttggcttcaatggagtccaagctcctccgtccttcgttttgtccgtcgttgcgagtccttggtcctcggtccgcagtccgtagtctgtagtttggcagttgtggccctggagtgcactaaaagcgcaaattaagttggctactcgtttttattcgcatccgtgtgtatgcatcgctggcccaaaactgcaacaaaattaaaaacctaaattgtgcgaaaagagccagggggaaatcaggcctcaaggatgggcagataaagaaaaattaaacgctggccgatgaggaatagtagttgcatactggaaactaagaggtctgcttctatcacacatagtaataaatgaaactaaactatcttgaattgtcatcataagattgagatgcaaaatgatgtatgctaaccatagaactagaaaatgtaataaagtgatttgaattataacttccaaagtccttattgcaatttacacgcgacgacagcccactgggggattttcaacctcgcaagggcaactatttcattgcagttacatgaccgtatcaaacaaaacggcagactcaaatcaaacaatcgaaaaacaacatcacccgccataacaatagtaataacagccagaagtgatcaacttgaacgggcgaggagcagcggcagcagtcaaagtccaagcatcaatagaacaaatttgagcggttggagcggatcgaaaacgtgctgcagtcgcagctggacgagcttaggcaaaagtttgtaattacaggccacaaacaatgaggattcgacgccaatgcattggcaacttttcaattaaaaacataaatataaagcacagcgactgatggcatgaatggctctactggctccactagccaacgaaatgaatggagggcagatgaaaagccagcgacttgtgtcaacaattacttactgaatggtgattaaaatgttgatgcccgacagcaccaccatgggcagcagacaatagcccagcacggaggccactgctccgaaggtaacctgcgaccgactgaccatcagggacagcaggcagtagaagaagatgcagcccattacgccgatgccgtagatgtacgagaacgtcaccttaccgctctgtgaataaaagaaatataagtataaataagataggtgatataacgaaggcaatattgcacaatataaaattttaaacggcaattcttacttaagacattgattacaattgatttcaaccgcatttaaaatacaatgatgtggtgttcatctctgtcaaacttaccagcagcaggaagccgccaagtgtgaggcaaaagaccagtggacccgccatgtcagtatcctggaggatttgctggtcggtaccgcgcagcggattcagcacggcgagcgtctggaacagaagagagggagagagagagcgcgagagtaatacgattaaaattagagcaagtgaaggattacacaacgacaggagaggattgggggtttgtgtagggtgaagtctgtccggcaacaggccatcatcactcatggagtttgcggcaggacacggaattcggaacacgggactttggacccgggacactggacactacacaacacaattcatttgttcgcacagcggtcataaaacgaagcccaactcccgttttccaaacatttgttctctatgcgttttggttttgccccttgtttttgcaccgtgtgcagtggcagagaaatttgaaaaatggaaattgatgataaatgatattgctgaccagccagccatccagccagctaccaagtgagccggggcttggaaactcggccaaaagctgtcaacgcatttgacgcatgcgaatgtgggccagggacaagagccatgaaatttgatattatagtcgtgcaaggacccactgaaaattgtcgatgaaattccgagtgtctctttgtggctttacccaacattaattgagattgaaaagaatttgaagtggaaaaatgcagccccatacattgtggttgcaaattagttttcgatatccaaaactagaccaaattggagttgtttgtagtgccacagccatattcaaatgaccctattgaaaatgggagaatttgtatgcataccatacgattttactatacattttgtaatagagctaagtgattgttagtcgttttttgtgcggatatttcccgtgaatacgtaaaggccttgaaaacaccgttgttgactttgccatttaacaaacaggaccagagtcacacacaaatctaaccataattcccccagctagctgatgaacaatttaattagcatttcatttcatttcgtttcgtttcagttttatgacggcacacggactcattaacattaacattttcatttttcaattaacacaagcgtaataaattccgtgccggagcgaaagaaatgagaatcaggcgcacgcaaattttttacaaaatggacaaaaatgcagaaagttacacagcgaactggaccgaatgcgaggggtaaaaagtgtgcgagaaaaactttaattaaaaacacaaaagttgctttatttatttaaaaacaactacggccacgccgccagcgagtgcaatgaaaaaatatgtcttcattaacgacacaaacccgcaagtgcaacgacaacatagcacacaatataaaatgcaaaaaaaaaaaaaaaaaacggcataaaagcgaaaaacaatagaattattgcgccaggaggagatgcttgcaataaatacaaaagcgaaatgcaaaaacatttaaatttcaattaaaacgaagttggccgcgccggaaaagcgcggcctaaagtggccgcccagaaggaaagccacccgttgcgttgcacaaattagaaaaaggcactgggccgcaaccgggacaggatccggggaaaatgcgtaaaagcaaagcaggaattacgcggcgggtagagtaattgtccgggcaaacaaagtgggcaactcaaaactcgcagctcctttgtggcgtgtgtcggtggaatcgggcgcataaaatatgcaatttgcctggctcccctcaagatcttcatttgaaaatgcgttcaagagcagcgggctgggcaggaagggacgttatcctccaccatcgggcagcttcaaaggtggagtacgcaaattacgaaaagctgcggcgtagccgccttgttctgctttctttacttaccttttggaagatgtgattcggattgatgcccagctctggaacaaaaggaaagaggaattcgttaagcgataaaagataaagatgatggtgaaatatgaaaacttatttgactcaagaattgcaatatacatatatgtatctagattgaataaaattatctgttaggcaaattgaatcttgaattaagtgaataaaattcacaatgacgataaatctttttagtactataaatattaatctccaatagccataaactactggtcattagacgacgatattatatcaattaaaaacttataaagaaacccataacttggttgtatacaaacatatagatctgtacaagttgttattactttgggctcaagttctctaaaccagtaacaaaattcttataggctaaggttcgcaagtacttgaagactgaatgcccatttgtaaccgaatctcaccttccagcagtggaggctcatcatcgaattcgttgccggctcctccgccagcagctgactttccgctcttgtcctgtccgtagctcgtgtcggtgtaggccgtgggatcgtagaagccacccaagccttggctcggcggttgggcataggacgcatcgtagttcggcggcactgaggcctgtgtgttgtcgaaggtttggaaattcctgcaagcaagtggggcaacaattgtgaatgctgtgaaatggaattccgggtaactactcacagttcctggccaaattctggcatatcgaagttgtagctggcatcggccgagggcgcggagccgtaaaagtcattgggtccgccgaactgagacatgattactttaatttaagcgcaattcatatatttacaaaatgatatttaatttaacaacacgtcaactagaggtgaccaatagctaaatgtaatcgatgaatttcgatgttacctatcgtctaacaccggtgctatctgaaatcgatattttctcgcccatcgatttgttttaaattcaaaaaattgcgccactttataagaaagtaaataaaaacccgatcattttgtaacattcataatacattttatttccatagctccatttgcaacacacacaagttactgaaatagctatcctttggtagtagaggtacatgcttttggggctacgttgttattgcgttctttaaaggtctataatatgtaggaatataatattttgtaatttcgtaaagattcaaacgccctttagactcgtcgtttagttggtttagtttcacacaatagggtaacgaacacaatcgataactatatgaaaatttactaacaatacatagctgtgaattatatttatatatcaacatagataattatacatatgtgtcatatatgtatggtatttatgtatatggctggtttaactgcgttccatttgcgctaccgactaattattgttcgtctttcctttcgttttgcgtatcttctggtgattcgattctgacctgactagacctgaagcgggccaaactgtttgttaaacttataagtaaacttggattcaaatatcttattatgcattatgtaaatatgactagattgaatggggaattcgaataataacctagctttggtttcttatttcgtttggtttgcttctttttccattcctctcgctaggaaagcccgcagttggtttctgtccgtttccgcttagtcctctagatttcggaaggcctgctgcagatcctcgtacagctggtcgtagtccgccttgatcttttgctcgccatctttcaccgggtccttaaaatgtgaattattaatataaataatagttggaatagataaacccactcaccttgaacttcattgacgacagctggtacataattccgcccatcgattccctgatggt

SEQ ID NO: 21095 - DNA, 910 bp, DROSOPHILA
tcacctctagttgacgtgttgttaaattaaatatcattttgtaaatatatgaattgcgcttaaattaaagtaatcatgtctcagttcggcggacccaatgacttttacggctccgcgccctcggccgatgccagctacaacttcgatatgccagaatttggccaggaactgaatttccaaaccttcgacaacacacaggcctcagtgccgccgaactacgatgcgtcctatgcccaaccgccgagccaaggcttgggtggcttctacgatcccacggcctacaccgacacgagctacggacaggacaagagcggaaagtcagctgctggcggaggagccggcaacgaattcgatgatgagcctccactgctggaagagctgggcatcaatccgaatcacatcttccaaaagacgctcgccgtgctgaatccgctgcgcggtaccgaccagcaaatcctccaggatactgacatggcgggtccactggtcttttgcctcacacttggcggcttcctgctgctgagcggtaaggtgacgttctcgtacatctacggcatcggcgtaatgggctgcatcttcttctactgcctgctgtccctgatggtcagtcggtcgcaggttaccttcggagcagtggcctccgtgctgggctattgtctgctgcccatggtggtgctgtcgggcatcaacattttaatcaccattcagggcacactcggcctaattgtgagcggcatctccatattctggtgcgccatatcggcctcgaaactgttcgccaccgccttctccatggaccatcaacagctgctgattgcctatccgtgtgcggtgctctatggaggatttgcgttgattaccatttactagggctacgagatccctgctgctattccaccaccaccaccac

SEQ ID NO: 21096 - protein, 264 aa, DROSOPHILA
MSQFGGPNDFYGSAPSADASYNFDMPEFGQELNFQTFDNTQASVPPNYDASYAQPPSQGLGGFYDPTAYTDTSYGQDKSGKSAAGGGAGNEFDDEPPLLEELGINPNHIFQKTLAVLNPLRGTDQQILQDTDMAGPLVFCLTLGGFLLLSGKVTFSYIYGIGVMGCIFFYCLLSLMVSRSQVTFGAVASVLGYCLLPMVVLSGINILITIQGTLGLIVSGISIFWCAISASKLFATAFSMDHQQLLIAYPCAVLYGGFALITIY

SEQ ID NO: 21097 - DNA, 10011 bp, DROSOPHILA
tttgtagtgttaacgcctacactgtgctacaaagacgccgtttgctggaaaacattcgcactaatgatgagaacataactaatccgtagtagaaactaattactattaactaattttaaatgtgtgctgcacttgtacaaaataatattgcaaatattgcaaaaaattccctattctctgttgatttttcaattgcattttaaatgtgtttctttttgtttctatagtttttatttttgcagcagctgtgtgtaaatatatatatatgtatagatttatatagtatgtatatagtaccatattcattgcatgatatacgcgctcactttcttatttctttttttttttgcatttacaattatcaataatcacagttcccattcgaaaaattaaacgaattatttgtagcaagacataattttgaatttatctctttttctcctgtacaaagttgatttccttgaaacgcttttggatcttgctcggattgggttggttttccaatttaatatattaagccgatggtaaatatatatatataggttctatattaaaatgccttctatagttatctctttgataagttacaatacgattagtttaaattacattttgcaccgttctagcaagtaattacattaagaattccggcttatcccatttgcaaagtattcgaataatggtatttcattccttttttgtttataaattatcgttacttaattaccttaggttctagaaaaaacgtaaaagtgcaggaacatgttccaactaggtgtgtataagtgggtgtgtgttagtgacaatagaaatcccaaaacaggtgcctaaaacgaatccccaactccactaacgcatacccaaaaaaaaatatggaaaagcataagcaacaacaaaatattaacaaaaccaaaactcacttaaatcgaaaaataaccataagcttagttggataaattatggattaaattaaataaaaggttcgacccttggatgtggcctactttctggaaatgactttgcccgtctgggcattgaccagtatcattttttccggtgttgcgggtcgctcctggccggaggtggaagtggcgtcctccgactggttggcacttccccgaaggatccttctgcgcaggcgatcgctgatattctcgctcttctgggactctgaattggcgccctcatcctgggagagcttcacactcaagccgccatcgttcttgtacagaatcaactttgtgctggactttttggccgacgactcctccattccctcgacagctggctgttcatctgggccgctgctgcttggctgctgttgctgctgctgctgcacattggcgttcatcacattgtcctggttgttgttgtgctcggtctgctccacctttgagtcagcggtttcttccggttcccgctcaacgctgatctccagctgatcgtagcaggtaaagaactccacggacttgagcttctcaccagcattgaaatgcagcgccgtgtgctcctccatttccgcctcctcattggcattgtaatcacaatgggcacatttctggcagttcggaggtggaggatttacgcaggcgtgcttctgtagatgctgcatcagctcctcgtgctgctgcgtctcgaatggacagtggaggcagcgttccggtgccggaatggactggggcatgtcaacggatcctgcatcactgctgccatctgcggccaaatcactggtggccaccgaagcgctggtcgacggtgtggagctgctatgtcgctcctcgtcctcctcggggacttccgcctcgtttttgttaacggatactttcaggggaagtgggaccatctgaccaccgcccgattccagctgcttcttgagcagagagttctggttgtcaaacccaccggtggaggtactaactgcaccgccggtagtctgctgcagcagttgcaagctcaattcgttatccaccacccaaatggtttcgggaccagtcagctgcagcaacttgggtgccggatactcgacatcctccttgcagttcctatagagctcctggcacttttcctggtagtgggacatgtgcaccgcacggtgcagttggagcatagtctcctccgacgtacgatactcacaataggcgcagacatagctcggatcctgatcctccggctcctgatcgctgtgggccagcaaatgctgctctagctcttgcttggcattgcgctcgtcattgtgcttctgggcaaagcgagccggacacctgggacagtaactaatcagcttgtactggtactccggcggcagttgctgtggattgagctccgcatcggaggcggcatccatctggatctgggacaaatcgatggagagtggtgttgaggcgggcagttgttgcacctgcttggcagctgcggccaactgcagggccacactaaagtccagacccagtgaggcagctccgccgcctcctactcctccggctgctcctgcggctgcacctgctcccgatgccaccatctgctgctggtgcaccgttctcatgtggctgctcagatgctgctttttggcacacacaaatgtgcacaggcggcactcgtattgcgtgggcttgtgcagcgacacatggtagttcatctgggatttgctctccgagatgtacggacagaccggacacttttgctgcttgctcttggtattgttgccgctggatccgatggagtgctctgtcgtggtcggcaggcgggttatctcgatctggtcattctgctgcaactgcagcaactcctcggcgctgctgttggccaccactgctttgcaggctgctgcccaataggctgccgccgcttggatatcctgctgggtgttggccgcattcaccacggctgcggcgctggcggagagcggtgtgtggaagatctgctccagctgcttggtggtcagcagcaggggctgcgcactattgctgttgatgttgctgttggcattcgtgttgctgccggacttcaggatgttgctggtgatgggattcgacggattgtggatgtgggactgggattcgttgctggcacctgctcccaggggtcggtagatgggtggtgcgttcgccgagacactggctcctcgctcaagggtctcgatccgaatatccccggaatgctttaagcgacagtgccgctgttttggggaaaacaagggaaataagtcaacaattagtatagctttgtatgggtaaatggcattcagcgtgtgtccttctgttttcatgtatatgtatgtatggggggtgtatgtgtgtgtgagtgtgtatgtacgtattatgtgtgtgcccttattcagggacaataaaccatgagtttagcccaatcgaaaaccctcgcaccgtaatgggaatccctttaaggttagctttttatttttatggtgtcatgggtttgtttctttttttgtttttgtttatgattttggatatatggattacacttagttcgagaggtaaatagagagcaagcaatactttcaccaatgatttgcttatagttaataatcgtttatcatatagtgtacaacaaaagcaagaccagacaccacacatttaaacagtcaaaatcggaatacttaaagattgggcttacaaaatagactttgcatatttaccagcgcagcgcaaggactacggacacagatggagtggtgagatgggtggcagaaggtatcggatcggggactgcaaattgtctaggttgtgtgctaagctagcaagggaccttgtttggacttcctaagaatctcattggcccctttgaactctttggcactttggctgatttacactacctttattcctttcctaatcaatcacaagttctttaagataagatatatacttagaaaacccatttgataaaataaaattttcaatgaaaaaatatagataatttcaaaaatattaaaaaataatacaaaacattgttaaacgggaaaacattaaattttataatcttatatttagatctttactgtggaatgtttctataaaaagtttaatataattgatccctccaattccgtagactattataaagaccctagtaattcaggtgacttggcagagttcgggtcaaaaacgaaactttcggggattggcggctcgcttcggtttttcaatgggacaaaacacaaatccattaaagtgcactgggccatacctggatgacatgcttccaattcgagacctggtggcagtggccacagcgatacggcgacggttcgcgtcgatcgccatcggccatggtcagcaagctgggactacctggactatggctatggaatctcgtctgcggatgcgacatctgcgcaacggttggcacatgtttctgcggcgccatggcagccatgtaggcgctggcggaggatgaggctgccggcggcggtggcgacgatgtggtggaggacgccgaggcggacgcagagccggcggccgatgaagtggaggccatcgaagacgatgatgacgacgacgatgacgagggaaaggaattggagctgggattggctttcgtgttagtgtttatgatgtgggcatgggttagacccgacgccaggtggcaaccatcaccggccatgtgtgagggtggagcatgattttggtcattgtgatgggatgaggatgatctgtggttacccgcacccaatggatgagccagcggtgtggcagtagaaataggagtaggagtggtagttactggcaaaggcgatgcattgggcttgctgactgagttggtgggaggtggtggtggtgttgtggtattgttggtggatgaggcgacgtagacggcatccagccggagtccatttcccacaaccgagttactgttagcgttagaaggatgatttccatttctggcactgcgcggtgaggtgagcagatcctgcagcgatctggcggtggtgtctttggtggttctactagtggttgagttcgtggtggtggtgttcggcgacgtcagactgtcggcacttgcctcgttttgactcgctttctgctcaccgtgctctaaaatggaggcggcactggctttcgtcgtattggcttgtggctttccgcccgccaacgccaaagcaagtccgcttagagcgctggcgttcggagttggcgagtgctgggcctcctgtatggcccgctgcagcagaccggccgagatggccggacttgttccggcagagccggagttgggcgacgactgtgactgggtctgcgacaggcacatggcggcaaagaccttgttcatgtagaattgtggacttccgcccacggatacctgcagtggcgaagtactggagttcccagagttggacttcggatagctggcgtcctggtagtgaatctttacgtgcgccagcacagcatcgcgattctggtgcctattggttgggtttaaaacattagtacaataaaatagtgatgttcctcctttccggaactcacccgaagttacacttgcggcaccgatagacggtcctcttctcattgccctcctggtggacctcggtgatcagatcgtcgctgggcttgccctgcataacggatgcctgattggatctcttcaccggggaaatggtcacagagggcgtgatcatcgtggactgatgctccttctgctgttgctgctggtgttgctgttgcgccatggcggcattcatcatggtggccagcaagggaatccgtataaggttgtccgccaaatgggcatcgtccagtacattgggtttgttgggaagcactggttccaatgtgatatcctgcccggaaaccgagcccaccttggcatagtccttgaggaaggccaacgaggccacctggttcggtgtcatctcgccggacttcatcagcttgggatcaccatcctcctctgttaccttcatcagggtgatgtacttgttgtacttggtgtagttccggcggcccgtctcgtcgttcatcagtaccttggccgtcttgtgcgagggatcgcggatcgtcttcaatcggatgtgcttggtgatgtcccagcgccagttggagcggtacgagcagagggagcactcaaagggcttcttgttcagatggcccacgatgtggacgtggaagcgggatgccgtggaggcccagaagctgcagtgcggacacttgtacaccttcttcagcgaggagttggctgcctcttcctccggtgtcatctttttggttacctgcagtgcgtgaaagagtcaaatttcattttgacgtggcatatgctcgtgctgggtcaggggactcaacaaaataataccctaagaaactaaggaacaaaaacaattgagtttctaattattgcaggtgaatcacctagttaatcttttttaaagaaatctttttatcccaataaaaaaaagtcaaattaaaataaagtcttttcttctaaaaagttattcaaaactttaaattaaaaaattttttttttttatttccaataaaaacataaatgaactgctcgggggaactgtgctaagtggactccggacttacctcgccgtatccgggtgccgtttctacgccatagtagctgttctcctcgttactggccgcctgacttccggttggggacttaaccaggttgtggttgttcttgtcctgctgtagggatgcggccgctgcggcgatgatctccttggtggccttgttccagatgcacacccgctgctgctggacggccgcctgctgctggaggctctgcgagtccggtcgccgatcgccactctcgccggaattcgagtcgtacatctcgttggcgcaacggatcgcctcgacgcactgcttcagatggtgcatcagatctgtggaggacttgcagcggtgccggcagtgctggcaacgcgtcgatcccgtcacactgagattcagggccgaatgcgagtggtgatcttcgtcatcctcatcgatctccagccgatcgtcgccatcgtcctcgtgcagaccagcttcatcttcgtcgatgatcaccgccgaggcgtgacagctcttgccgtggatgatcgactccgaaaggcacttggccacatgaccgcactggcacaccagattctcgtgctgcgcccccgtcttcagtttgtccatgaagctggatttcttggtcaattggctgcgcgtcgagttctgggaggccacagtcgttgccggcgacaattgtggcacatccgacttgtcaagcatctccgagatctgtttctcattgaagaacatggaggcaatttccgtcagggaactgcgcgaagcattcgtctccttcgaaaggtttaatacgctgtggtgaagaaaataaatgtaattaggatttcctctaaatcattggtgatggttgatgatggttggtctaaagtgtacttactctttggcccccttgctgatcggtatgagattgggcatggttcgctgtgccctcggcgtgggcgttcccacactggaggtgtccgaggagcatccgcccttctgcgagagatctgtgggctcctcctcatcgtcgtacttgctccgtttgccgtagtgatggaggtgcaacggttgctcctcccctccactcattgcctcgtcggcatcatcgacgccgtccagttcgtcatcgacgttgttgttgttatattgatcctccagctcggcggaatcgctgaggaaatcctcgcacatctcgctcgctccgactttattctggcgtcttggccaaatggagccggcattgcccaccggtggcacatggtggttcatctcgtggaccgtcagcgattgcttgatgtcagcggtaaagtcgcaagcggcgcacttgaaggctcccgcgccgccatgattcttcatgtgcctgtccagattccatttgtagggcgtgcggaagtcgcaggtgacgcacttgatcatcggcatggagtggtacttgacgtgcttgctaaagcgcgccttgatgtgggtcacatagctgcacttgtcgcagcggaagaacttggtcttgccgtgctcggccagctcgtgggcacgcagttgggttcgatagagggtggtgaactcgcaggcgctacacttgagcagccggttctggggctcctccccgttggaggggggcgttgccgatccgctggtaggcgaaggagttggtggttcggcgggcgactgacgctcgtagtcgcgaaggacctgcatttgtcgctcatacgcactggtggccaccagttccagttcccgctgctgttcgcgctgctgctcctcgcgctgtcgctggttgaaggcctgaatgtcccgctgcagcttctcctcctgcaggagcagctctcgcttcacttgctccagcgtgggcacatccggaacggtaactgtcagggattggccacccattacacccacgctctcctccagccggcgcttgcgtgcctcccggctcatgcccctcttgcccctggcctgaccatgaccactgggaatgccgtccgtgcagccgtgcaccattttcatgtgccgcaccagcttctggaaatgtcgcgatgcgtacaggcacagcttgcacttgttgatcactatcttctcgccgtgcacatcgcgcagatgggtcaagtgatagcgcggattctgtgtaaagtacgcacagtggttgcagctatagttccgcttgatcttgcattgcggcagaccctcctccttggcatccatgccgacctgctgtggttgctgttgctgctgctgctgcacgctgttcacaacggcaactacagctgctgcttgacgctgttgttgcaacaactgctgcagccggaaacgctccacatgtcgctccaaaagggatgagcccgcctgtgccactggcgtattgctggtcgagttgctcgtcatgtgtcccgtgttcccgctggtgggctggtggccaccctgctccgtgtacagctgattgccgctgaccacgctgcgcacgatgagcgtgtctcctgaacgctgcaccattgaaggcaggtccatgtttctcccggtctgatggtcttctgtcctggcaactccctcaagactggctagtggttagctgcaagaaggggaaatgtaatccagttagatgtggtacaaagtaatctcatttaagcctcatggcagctacaccatgatgaaatgcttgctccctttattcaaaattgtgaaacagcgtttccttgtaactttatataaccctttaagttgaattgacccattttaagtatcagttgaatgtatcttttgagtttcatttaaaggcaaattattaagaaacccatgttaaatattccgccagttctttatactaccactatcgtattcctgggcatcaaattgaagaaaggacacaggtaatgaaatcccatatgcgatacaaaggatgtcttaaatgcagatttcaacacttgcccaactcattacacatacattaacacaagcacacatgaatctgcctgtttctgtgtgtgtcagtctcataaatatttcagcattttcccctcgaaacgccgacatcccctgctcctgccaacctttatcagcaaaagttggttcgcttttcccaacttgcttggcaggatattaaaatgaaatgttttctgtccgccgaaaatgcgacaaagtagcgtaaaatcaacagaatgtcggggaaattgggcaacggaaaatggaaaatcattcgagagttttgacagggaaagcgaacccaaagagtcgcctcaaatctcagaggtaaacgtattgtagtttgtgcgtaacacaaatccattttggggctaattggagttggccaagttgaaaaagggaaacggaggatgagtccgagtaagagagctggaaaatttcaatgcttccacacaagcacacacacatactcatatagggtcgggatccaatgaaggtcaaccttttttctcctagtggagccaccgtttgcatgagtgcacaggaagggaggaaatacgtgggcgctttccccacttgcggctaatcc

SEQ ID NO: 21098 - DNA, 6516 bp, DROSOPHILA
atggacctgccttcaatggtgcagcgttcaggagacacgctcatcgtgcgcagcgtggtcagcggcaatcagctgtacacggagcagggtggccaccagcccaccagcgggaacacgggacacatgacgagcaactcgaccagcaatacgccagtggcacaggcgggctcatcccttttggagcgacatgtggagcgtttccggctgcagcagttgttgcaacaacagcgtcaagcagcagctgtagttgccgttgtgaacagcgtgcagcagcagcagcaacagcaaccacagcaggtcggcatggatgccaaggaggagggtctgccgcaatgcaagatcaagcggaactatagctgcaaccactgtgcgtactttacacagaatccgcgctatcacttgacccatctgcgcgatgtgcacggcgagaagatagtgatcaacaagtgcaagctgtgcctgtacgcatcgcgacatttccagaagctggtgcggcacatgaaaatggtgcacggctgcacggacggcattcccagtggtcatggtcaggccaggggcaagaggggcatgagccgggaggcacgcaagcgccggctggaggagagcgtgggtgtaatgggtggccaatccctgacagttaccgttccggatgtgcccacgctggagcaagtgaagcgagagctgctcctgcaggaggagaagctgcagcgggacattcaggccttcaaccagcgacagcgcgaggagcagcagcgcgaacagcagcgggaactggaactggtggccaccagtgcgtatgagcgacaaatgcaggtccttcgcgactacgagcgtcagtcgcccgccgaaccaccaactccttcgcctaccagcggatcggcaacgcccccctccaacggggaggagccccagaaccggctgctcaagtgtagcgcctgcgagttcaccaccctctatcgaacccaactgcgtgcccacgagctggccgagcacggcaagaccaagttcttccgctgcgacaagtgcagctatgtgacccacatcaaggcgcgctttagcaagcacgtcaagtaccactccatgccgatgatcaagtgcgtcacctgcgacttccgcacgccctacaaatggaatctggacaggcacatgaagaatcatggcggcgcgggagccttcaagtgcgccgcttgcgactttaccgctgacatcaagcaatcgctgacggtccacgagatgaaccaccatgtgccaccggtgggcaatgccggctccatttggccaagacgccagaataaagtcggagcgagcgagatgtgcgaggatttcctcagcgattccgccgagctggaggatcaatataacaacaacaacgtcgatgacgaactggacggcgtcgatgatgccgacgaggcaatgagtggaggggaggagcaaccgttgcacctccatcactacggcaaacggagcaagtacgacgatgaggaggagcccacagatctctcgcagaagggcggatgctcctcggacacctccagtgtgggaacgcccacgccgagggcacagcgaaccatgcccaatctcataccgatcagcaagggggccaaagacgtattaaacctttcgaaggagacgaatgcttcgcgcagttccctgacggaaattgcctccatgttcttcaatgagaaacagatctcggagatgcttgacaagtcggatgtgccacaattgtcgccggcaacgactgtggcctcccagaactcgacgcgcagccaattgaccaagaaatccagcttcatggacaaactgaagacgggggcgcagcacgagaatctggtgtgccagtgcggtcatgtggccaagtgcctttcggagtcgatcatccacggcaagagctgtcacgcctcggcggtgatcatcgacgaagatgaagctggtctgcacgaggacgatggcgacgatcggctggagatcgatgaggatgacgaagatcaccactcgcattcggccctgaatctcagtgtgacgggatcgacgcgttgccagcactgccggcaccgctgcaagtcctccacagatctgatgcaccatctgaagcagtgcgtcgaggcgatccgttgcgccaacgagatgtacgactcgaattccggcgagagtggcgatcggcgaccggactcgcagagcctccagcagcaggcggccgtccagcagcagcgggtgtgcatctggaacaaggccaccaaggagatcatcgccgcagcggccgcatccctacagcaggacaagaacaaccacaacctggttaagtccccaaccggaagtcaggcggccagtaacgaggagaacagctactatggcgtagaaacggcacccggatacggcgaggtaaccaaaaagatgacaccggaggaagaggcagccaactcctcgctgaagaaggtgtacaagtgtccgcactgcagcttctgggcctccacggcatcccgcttccacgtccacatcgtgggccatctgaacaagaagccctttgagtgctccctctgctcgtaccgctccaactggcgctgggacatcaccaagcacatccgattgaagacgatccgcgatccctcgcacaagacggccaaggtactgatgaacgacgagacgggccgccggaactacaccaagtacaacaagtacatcaccctgatgaaggtaacagaggaggatggtgatcccaagctgatgaagtccggcgagatgacaccgaaccaggtggcctcgttggccttcctcaaggactatgccaaggtgggctcggtttccgggcaggatatcacattggaaccagtgcttcccaacaaacccaatgtactggacgatgcccatttggcggacaaccttatacggattcccttgctggccaccatgatgaatgccgccatggcgcaacagcaacaccagcagcaacagcagaaggagcatcagtccacgatgatcacgccctctgtgaccatttccccggtgaagagatccaatcaggcatccgttatgcagggcaagcccagcgacgatctgatcaccgaggtccaccaggagggcaatgagaagaggaccgtctatcggtgccgcaagtgtaacttcgggcaccagaatcgcgatgctgtgctggcgcacgtaaagattcactaccaggacgccagctatccgaagtccaactctgggaactccagtacttcgccactgcaggtatccgtgggcggaagtccacaattctacatgaacaaggtctttgccgccatgtgcctgtcgcagacccagtcacagtcgtcgcccaactccggctctgccggaacaagtccggccatctcggccggtctgctgcagcgggccatacaggaggcccagcactcgccaactccgaacgccagcgctctaagcggacttgctttggcgttggcgggcggaaagccacaagccaatacgacgaaagccagtgccgcctccattttagagcacggtgagcagaaagcgagtcaaaacgaggcaagtgccgacagtctgacgtcgccgaacaccaccaccacgaactcaaccactagtagaaccaccaaagacaccaccgccagatcgctgcaggatctgctcacctcaccgcgcagtgccagaaatggaaatcatccttctaacgctaacagtaactcggttgtgggaaatggactccggctggatgccgtctacgtcgcctcatccaccaacaataccacaacaccaccaccacctcccaccaactcagtcagcaagcccaatgcatcgcctttgccagtaactaccactcctactcctatttctactgccacaccgctggctcatccattgggtgcgggtaaccacagatcatcctcatcccatcacaatgaccaaaatcatgctccaccctcacacatggccggtgatggttgccacctggcgtcgggtctaacccatgcccacatcataaacactaacacgaaagccaatcccagctccaattcctttccctcgtcatcgtcgtcgtcatcatcgtcttcgatggcctccacttcatcggccgccggctctgcgtccgcctcggcgtcctccaccacatcgtcgccaccgccgccggcagcctcatcctccgccagcgcctacatggctgccatggcgccgcagaaacatgtgccaaccgttgcgcagatgtcgcatccgcagacgagattccatagccatagtccaggtagtcccagcttgctgaccatggccgatggcgatcgacgcgaaccgtcgccgtatcgctgtggccactgccaccaggtctcgaattggaagcatgtcatccagcggcactgtcgcttaaagcattccggggatattcggatcgagacccttgagcgaggagccagtgtctcggcgaacgcaccacccatctaccgacccctgggagcaggtgccagcaacgaatcccagtcccacatccacaatccgtcgaatcccatcaccagcaacatcctgaagtccggcagcaacacgaatgccaacagcaacatcaacagcaatagtgcgcagcccctgctgctgaccaccaagcagctggagcagatcttccacacaccgctctccgccagcgccgcagccgtggtgaatgcggccaacacccagcaggatatccaagcggcggcagcctattgggcagcagcctgcaaagcagtggtggccaacagcagcgccgaggagttgctgcagttgcagcagaatgaccagatcgagataacccgcctgccgaccacgacagagcactccatcggatccagcggcaacaataccaagagcaagcagcaaaagtgtccggtctgtccgtacatctcggagagcaaatcccagatgaactaccatgtgtcgctgcacaagcccacgcaatacgagtgccgcctgtgcacatttgtgtgtgccaaaaagcagcatctgagcagccacatgagaacggtgcaccagcagcagatggtggcatcgggagcaggtgcagccgcaggagcagccggaggagtaggaggcggcggagctgcctcactgggtctggactttagtgtggccctgcagttggccgcagctgccaagcaggtgcaacaactgcccgcctcaacaccactctccatcgatttgtcccagatccagatggatgccgcctccgatgcggagctcaatccacagcaactgccgccggagtaccagtacaagctgattagttactgtcccaggtgtccggctcgctttgcccagaagcacaatgacgagcgcaatgccaagcaagagctagagcagcatttgctggcccacagcgatcaggagccggaggatcaggatccgagctatgtctgcgcctattgtgagtatcgtacgtcggaggagactatgctccaactgcaccgtgcggtgcacatgtcccactaccaggaaaagtgccaggagctctataggaactgcaaggaggatgtcgagtatccggcacccaagttgctgcagctgactggtcccgaaaccatttgggtggtggataacgaattgagcttgcaactgctgcagcagactaccggcggtgcagttagtacctccaccggtgggtttgacaaccagaactctctgctcaagaagcagctggaatcgggcggtggtcagatggtcccacttcccctgaaagtatccgttaacaaaaacgaggcggaagtccccgaggaggacgaggagcgacatagcagctccacaccgtcgaccagcgcttcggtggccaccagtgatttggccgcagatggcagcagtgatgcaggatccgttgacatgccccagtccattccggcaccggaacgctgcctccactgtccattcgagacgcagcagcacgaggagctgatgcagcatctacagaagcacgcctgcgtaaatcctccacctccgaactgccagaaatgtgcccattgtgattacaatgccaatgaggaggcggaaatggaggagcacacggcgctgcatttcaatgctggtgagaagctcaagtccgtggagttctttacctgctacgatcagctggagatcagcgttgagcgggaaccggaagaaaccgctgactcaaaggtggagcagaccgagcacaacaacaaccaggacaatgtgatgaacgccaatgtgcagcagcagcagcaacagcagccaagcagcagcggcccagatgaacagccagctgtcgagggaatggaggagtcgtcggccaaaaagtccagcacaaagttgattctgtacaagaacgatggcggcttgagtgtgaagctctcccaggatgagggcgccaattcagagtcccagaagagcgagaatatcagcgatcgcctgcgcagaaggatccttcggggaagtgccaaccagtcggaggacgccacttccacctccggccaggagcgacccgcaacaccggaaaaaatgatactggtcaatgcccagacgggcaaagtcatttccagaaagtag

SEQ ID NO: 21099 - protein, 2166 aa, DROSOPHILA
MVQRSGDTLIVRSVVSGNQLYTEQGGHQPTSGNTGHMTSNSTSNTPVAQAGSSLLERHVERFRLQQLLQQQRQAAAVVAVVNSVQQQQQQQPQQVGMDAKEEGLPQCKIKRNYSCNHCAYFTQNPRYHLTHLRDVHGEKIVINKCKLCLYASRHFQKLVRHMKMVHGCTDGIPSGHGQARGKRGMSREARKRRLEESVGVMGGQSLTVTVPDVPTLEQVKRELLLQEEKLQRDIQAFNQRQREEQQREQQRELELVATSAYERQMQVLRDYERQSPAEPPTPSPTSGSATPPSNGEEPQNRLLKCSACEFTTLYRTQLRAHELAEHGKTKFFRCDKCSYVTHIKARFSKHVKYHSMPMIKCVTCDFRTPYKWNLDRHMKNHGGAGAFKCAACDFTADIKQSLTVHEMNHHVPPVGNAGSIWPRRQNKVGASEMCEDFLSDSAELEDQYNNNNVDDELDGVDDADEAMSGGEEQPLHLHHYGKRSKYDDEEEPTDLSQKGGCSSDTSSVGTPTPRAQRTMPNLIPISKGAKDVLNLSKETNASRSSLTEIASMFFNEKQISEMLDKSDVPQLSPATTVASQNSTRSQLTKKSSFMDKLKTGAQHENLVCQCGHVAKCLSESIIHGKSCHASAVIIDEDEAGLHEDDGDDRLEIDEDDEDHHSHSALNLSVTGSTRCQHCRHRCKSSTDLMHHLKQCVEAIRCANEMYDSNSGESGDRRPDSQSLQQQAAVQQQRVCIWNKATKEIIAAAAASLQQDKNNHNLVKSPTGSQAASNEENSYYGVETAPGYGEVTKKMTPEEEAANSSLKKVYKCPHCSFWASTASRFHVHIVGHLNKKPFECSLCSYRSNWRWDITKHIRLKTIRDPSHKTAKVLMNDETGRRNYTKYNKYITLMKVTEEDGDPKLMKSGEMTPNQVASLAFLKDYAKVGSVSGQDITLEPVLPNKPNVLDDAHLADNLIRIPLLATMMNAAMAQQQHQQQQQKEHQSTMITPSVTISPVKRSNQASVMQGKPSDDLITEVHQEGNEKRTVYRCRKCNFGHQNRDAVLAHVKIHYQDASYPKSNSGNSSTSPLQVSVGGSPQFYMNKVFAAMCLSQTQSQSSPNSGSAGTSPAISAGLLQRAIQEAQHSPTPNASALSGLALALAGGKPQANTTKASAASILEHGEQKASQNEASADSLTSPNTTTTNSTTSRTTKDTTARSLQDLLTSPRSARNGNHPSNANSNSVVGNGLRLDAVYVASSTNNTTTPPPPPTNSVSKPNASPLPVTTTPTPISTATPLAHPLGAGNHRSSSSHHNDQNHAPPSHMAGDGCHLASGLTHAHIINTNTKANPSSNSFPSSSSSSSSSSMASTSSAAGSASASASSTTSSPPPPAASSSASAYMAAMAPQKHVPTVAQMSHPQTRFHSHSPGSPSLLTMADGDRREPSPYRCGHCHQVSNWKHVIQRHCRLKHSGDIRIETLERGASVSANAPPIYRPLGAGASNESQSHIHNPSNPITSNILKSGSNTNANSNINSNSAQPLLLTTKQLEQIFHTPLSASAAAVVNAANTQQDIQAAAAYWAAACKAVVANSSAEELLQLQQNDQIEITRLPTTTEHSIGSSGNNTKSKQQKCPVCPYISESKSQMNYHVSLHKPTQYECRLCTFVCAKKQHLSSHMRTVHQQQMVASGAGAAAGAAGGVGGGGAASLGLDFSVALQLAAAAKQVQQLPASTPLSIDLSQIQMDAASDAELNPQQLPPEYQYKLISYCPRCPARFAQKHNDERNAKQELEQHLLAHSDQEPEDQDPSYVCAYCEYRTSEETMLQLHRAVHMSHYQEKCQELYRNCKEDVEYPAPKLLQLTGPETIWVVDNELSLQLLQQTTGGAVSTSTGGFDNQNSLLKKQLESGGGQMVPLPLKVSVNKNEAEVPEEDEERHSSSTPSTSASVATSDLAADGSSDAGSVDMPQSIPAPERCLHCPFETQQHEELMQHLQKHACVNPPPPNCQKCAHCDYNANEEAEMEEHTALHFNAGEKLKSVEFFTCYDQLEISVEREPEETADSKVEQTEHNNNQDNVMNANVQQQQQQQPSSSGPDEQPAVEGMEESSAKKSSTKLILYKNDGGLSVKLSQDEGANSESQKSENISDRLRRRILRGSANQSEDATSTSGQERPATPEKMILVNAQTGKVISRK

SEQ ID NO: 21100 - DNA, 4753 bp, DROSOPHILA
aacaaaactacttacatcgaatagtaaatagtagtttattttaataatatttaaatcgaccttgcagattcttactgtgcaaacattattcgtctggctttcaatttttcagcttgaaatgccaaaagtgcgtcatgaatgatgatatatggggtggtgtggtaagcggagggaaaaagtggagctaatggtggatgttttaggtaggttttgctagttttttttacgtggaaaagtgggccatgggtgtgaaaggaagtggccaaagcagcggaaattccttaacttcatgcggaattttcaatgtgcaacacactagcaagggttaaatttaacccgaaagcacttcataaattcttgagtaaaatattacacaaatacgatgcaaaatatacatattgtctcagcattattttcaattcaaattcaagcgaagattgatcttaacctaaaatgatttaaatatatatggaaatgctattttgctatatgtaccatcaatttaaaatattcccatccatttagaattttccaatgaaatctagcatatgtttttccatttgagttttattgctgccaaatcgcttgggtttatagccacttttggtgcaatacgaaaagttcgagggttaatcgagcgatttgcgatttgggctctgtgtcgcattatccattatcctgccactgccattggcttggtccttagctctaattttagatgccggctacgtcagcgggccaatttgcgattttaacgctgccaccggcgactcctgcggctgtttgatcaataacccagatatatggcccataacaacaaacaacaacagcgaaatcaacaatgccacacagacagagccaaaagcctttagagtcgaccaagtccatcgaattgaatcgctgccatcaaattaattgcagctgcattgtgaatcaccaacaggccttattaagacacctctccatacgttttcgattcttcattttcagttgataactgccgatttttgaactgacaataaaactaagcgaaacagcaacaacaaggaaccaaaaccacataccaaaaaaaaaacaaagataacaaccaaccaatcacgggatttgaacgtagtgaaagatacatcaacacaggaaacacagaaaaacaaagaaaaaatgggacgcaaggtgaccgtagcggtgtccacattgaatcaatgggcattggactttgagggtaacatggtgaggatactgcagtccattctggaggccaaggacatgggcgccagctatcgcacgggaccggagctggaagtttggtaagtcgcagaatctcagctctaatcctaatcctaatctaatcctgtagcaaactaaaaccaataaaatttcaatccatttgtttttgaacacagtggctacagctgcgaggaccactttcgtgagccggacacattcctgcactcgtgggaagtgctgctggaggtgatgatgtcgcccatgtggtaagacccatcaagtgctagtattttatctcatggattaaccaacctaacccactgaacgaatcgtagtgaaaatatgctggtggacgtgggcatgccggtgatgcatcgcaatgtggcctacaattgtcgggtggcgttctttaatcgccagattctgctcatccggcccaagatggccatgtgcgacgatggcaattatagggagtcgcgatggtttaccgcctggacgaaagccctacaaacggaggagtatgtgctgccgcgaatgattgcccagcatacgggtcagcagacggttccctttggcgatgcagtgatagccacgagggatacctgtttgggctacgagatctgcgaagagctgtggaatgtgcgcagcaagcacatcgagatgtcgttggccggtgtggagctgatagtgaacagctccggcagctatatggaattgcgaaaggcgcatatcaccagcgatctcattcggaatgccagcttcaaggccggcggagcctatctctttagcaatcttcgaggttgcgatggtcagcgagtgtacttcaatggttgctcggccatagccttgaatggtgagatcctggcgcgcagtcagcagttcgcactgcaggatgtggaggtcacgctggccaccatcgatctggaggagatacgtgcctatcgtgttagcctgagatcacgctgcacggctgctgcatcggcagcggagtatccaaggatccattgtgactttgagatgtccacgcacagtgacatattcaagacgtcgacgcctcctctgaattggccaatgcacacgcctgaggaggagattgccctgggaccggcctgttggctatgggattatctgaggagatccggtcaagggggatttttcctgcccctaagcggtggtgtcgattcgagtagctcggccacaatagtgcactccatgtgccggcaaatcgtgcaggctgtccagcaaggcgacgcccaggtgcttcacgatatccgacagcttctggccgactcggactatacaccggataatgccgccggattgtgcaatcgattgctggtcacctgctatatgggcagtgttaatagcagcaaggaaacccgtcgacgggcagcccaattggccaatcaactgggcagttaccacatcgagattagcattgattcggcggtgaatgcactattgagcatattcaatgccgtcactggtttaacgccacgtttccgtacccagggtggatgtgctcgacagaatctggcattgcagaatatgcaatcgaggatacgcatggtcctggcctacatctttgcccagttgacgttgtgggtaagaaacaggcccggtggcttgctcgtcctgggctcggccaatgtggatgaatcgctgcgcggttatctcaccaaatatgactgctcctcggcggacattaatcctattggtgggatctccaaaatggatctacgcaggtttctgacctatgccaaggataagtaagctaatatttgttttatatgaagggggaatatataaagaattcacacatttgcatttgccagattcaacctgcccgtgttggagtccattatcgatgccccgcccaccgccgagctggaaccgctgcaggagaacggggagctgcagcagacggacgaggcggacatgggaatgacctatgcggagctctcccagttcggtcgcctgcgcaaacagtcattttgcggaccctacagcatgttttgccaccttgttgccacctggaagagcgaccttagtcccaaggaggtggccgaaaaggtgaagcacttcttcctttgctacgccattaatcggcacaagatgaccgtactgacgccgtcagtgcacgcggagagctacagtcccgatgataatcggttcgatcatcgccccttcttgtatcgacccaactggagctggcagttcaaggccattgacgacgaggcggagaaactgcaaccgatctacacaccatcttcggctcaattgcgccccagcagcgaggacctgttgatctccacacagagatcctcccacctggacgactccaagcattcgtctccgttgtcctcggcctcggcgtccgcatcgattgacgtgggcatttcaacggcagcggttccgttgcccggtgcagctgccccaggcggtctctccaagaagcccagtggttactcaaaggtgcacgtcaatgtgcttggcaagatcaaggatcgcaccggtattcccgtctaggaacgcgatactcgcaacgcactggatttatatatattatatacagcatttttttttagcacagcttaatgaccttttgctgccacttgaaatttgttgcaattaggtatcggctatcttttgcaactatgtgccttctattgctcgtaaaagtgtttccttaaaaatatcagtcctgttctagttacatatatggtcattaaataaatttacctacaaagaaaatcctaaacttaattagtatgtgcttatccgtttaattgttgatagttttatacaaacctttgtaatttacatgatatttctgtttaatctgtttaaaatgcaatctataactgctattaagactactattacaaatttgtcatatctagcaattgggagtatgaatagtagctttactatgcggcagcaaaaggcattatcctgtacgtatacagaattggaatgaatacatatgcgtaggcctaggcgtagagattcatattttgttcagatccttttctaggtagtcagcctttgtagagtcctttgcagtttgccttatctaaaagtgattaatcttgtctaatgctcaagctaaactaactggacaaacagttcgtccgcctgtccaaacaatttgtacaacaatcttattaaagtatcaattaggcgatccttcatccacacatataatcgtataaatcatctgaatttacatattaaagatattacttgttgtgttattggttgtgtacggtgcggcttaaactgacattaataaactgattgttttacctgattttttaagacatcaaattatttataatgatcaaatatatacacaccgtatttaaaaattatcaattatatgtaacccaattgggggaaaaaatactttaatgttttaatgttccaaaagttgcacttttaaaaacgcactgtatgtttattaataagatgaatttgttgatcataagacaatttctcaatcctaatgcaaaccatattatacaaa

SEQ ID NO: 21101 - DNA, 2522 bp, DROSOPHILA
ccgatttttgaactgacaataaaactaagcgaaacagcaacaacaaggaaccaaaaccacataccaaaaaaaaaacaaagataacaaccaaccaatcacgggatttgaacgtagtgaaagatacatcaacacaggaaacacagaaaaacaaagaaaaaatgggacgcaaggtgaccgtagcggtgtccacattgaatcaatgggcattggactttgagggtaacatggtgaggatactgcagtccattctggaggccaaggacatgggcgccagctatcgcacgggaccggagctggaagtttgtggctacagctgcgaggaccactttcgtgagccggacacattcctgcactcgtgggaagtgctgctggaggtgatgatgtcgcccatgtgtgaaaatatgctggtggacgtgggcatgccggtgatgcatcgcaatgtggcctacaattgtcgggtggcgttctttaatcgccagattctgctcatccggcccaagatggccatgtgcgacgatggcaattatagggagtcgcgatggtttaccgcctggacgaaagccctacaaacggaggagtatgtgctgccgcgaatgattgcccagcatacgggtcagcagacggttccctttggcgatgcagtgatagccacgagggatacctgtttgggctacgagatctgcgaagagctgtggaatgtgcgcagcaagcacatcgagatgtcgttggccggtgtggagctgatagtgaacagctccggcagctatatggaattgcgaaaggcgcatatcaccagcgatctcattcggaatgccagcttcaaggccggcggagcctatctctttagcaatcttcgaggttgcgatggtcagcgagtgtacttcaatggttgctcggccatagccttgaatggtgagatcctggcgcgcagtcagcagttcgcactgcaggatgtggaggtcacgctggccaccatcgatctggaggagatacgtgcctatcgtgttagcctgagatcacgctgcacggctgctgcatcggcagcggagtatccaaggatccattgtgactttgagatgtccacgcacagtgacatattcaagacgtcgacgcctcctctgaattggccaatgcacacgcctgaggaggagattgccctgggaccggcctgttggctatgggattatctgaggagatccggtcaagggggatttttcctgcccctaagcggtggtgtcgattcgagtagctcggccacaatagtgcactccatgtgccggcaaatcgtgcaggctgtccagcaaggcgacgcccaggtgcttcacgatatccgacagcttctggccgactcggactatacaccggataatgccgccggattgtgcaatcgattgctggtcacctgctatatgggcagtgttaatagcagcaaggaaacccgtcgacgggcagcccaattggccaatcaactgggcagttaccacatcgagattagcattgattcggcggtgaatgcactattgagcatattcaatgccgtcactggtttaacgccacgtttccgtacccagggtggatgtgctcgacagaatctggcattgcagaatatgcaatcgaggatacgcatggtcctggcctacatctttgcccagttgacgttgtgggtaagaaacaggcccggtggcttgctcgtcctgggctcggccaatgtggatgaatcgctgcgcggttatctcaccaaatatgactgctcctcggcggacattaatcctattggtgggatctccaaaatggatctacgcaggtttctgacctatgccaaggataaattcaacctgcccgtgttggagtccattatcgatgccccgcccaccgccgagctggaaccgctgcaggagaacggggagctgcagcagacggacgaggcggacatgggaatgacctatgcggagctctcccagttcggtcgcctgcgcaaacagtcattttgcggaccctacagcatgttttgccaccttgttgccacctggaagagcgaccttagtcccaaggaggtggccgaaaaggtgaagcacttcttcctttgctacgccattaatcggcacaagatgaccgtactgacgccgtcagtgcacgcggagagctacagtcccgatgataatcggttcgatcatcgccccttcttgtatcgacccaactggagctggcagttcaaggccattgacgacgaggcggagaaactgcaaccgatctacacaccatcttcggctcaattgcgccccagcagcgaggacctgttgatctccacacagagatcctcccacctggacgactccaagcattcgtctccgttgtcctcggcctcggcgtccgcatcgattgacgtgggcatttcaacggcagcggttccgttgcccggtgcagctgccccaggcggtctctccaagaagcccagtggttactcaaaggtgcacgtcaatgtgcttggcaagatcaaggatcgcaccggtattcccgtctag

SEQ ID NO: 21102 - protein, 787 aa, DROSOPHILA
MGRKVTVAVSTLNQWALDFEGNMVRILQSILEAKDMGASYRTGPELEVCGYSCEDHFREPDTFLHSWEVLLEVMMSPMCENMLVDVGMPVMHRNVAYNCRVAFFNRQILLIRPKMAMCDDGNYRESRWFTAWTKALQTEEYVLPRMIAQHTGQQTVPFGDAVIATRDTCLGYEICEELWNVRSKHIEMSLAGVELIVNSSGSYMELRKAHITSDLIRNASFKAGGAYLFSNLRGCDGQRVYFNGCSAIALNGEILARSQQFALQDVEVTLATIDLEEIRAYRVSLRSRCTAAASAAEYPRIHCDFEMSTHSDIFKTSTPPLNWPMHTPEEEIALGPACWLWDYLRRSGQGGFFLPLSGGVDSSSSATIVHSMCRQIVQAVQQGDAQVLHDIRQLLADSDYTPDNAAGLCNRLLVTCYMGSVNSSKETRRRAAQLANQLGSYHIEISIDSAVNALLSIFNAVTGLTPRFRTQGGCARQNLALQNMQSRIRMVLAYIFAQLTLWVRNRPGGLLVLGSANVDESLRGYLTKYDCSSADINPIGGISKMDLRRFLTYAKDKFNLPVLESIIDAPPTAELEPLQENGELQQTDEADMGMTYAELSQFGRLRKQSFCGPYSMFCHLVATWKSDLSPKEVAEKVKHFFLCYAINRHKMTVLTPSVHAESYSPDDNRFDHRPFLYRPNWSWQFKAIDDEAEKLQPIYTPSSAQLRPSSEDLLISTQRSSHLDDSKHSSPLSSASASASIDVGISTAAVPLPGAAAPGGLSKKPSGYSKVHVNVLGKIKDRTGIPV

SEQ ID NO: 21103 - DNA, 4778 bp, DROSOPHILA
gcgctggctgcgacgactctgatcccagacgtactgcacccagtcgacgtgcattacgggtactccgttcagcgttgcctgctcgtacttgctggacttgatggtgttcgaaatgaggtgggtggtgcgatgcccgaagctttgaaagtatatgccgcccatccagtttatgagcctgctcaattcctctttcttctgtggtgttatgcccgtggccgagacctgcagatcccgcatggccgtgctgtagatggcactgctgccctcgggaatgggttcattgcgccgcaggcaggtgatgaggcacggtggccccagaattagtgctcgcgtctgctgcaattgctcgaagaattcgccctcgaactgggtcagcacaaagacgtccttcttggtaaggttaccggctgcgatcaggggatatccttcgcttggctttatttgccggatctgcgtttccgccaactgttggcccagtagctcccgcgccgcctcgaattgctgcagtgtgtcggcctcctggacgccaccgtcgcccggcttcagattgttcacgaagtacgcgcagatggtctcgtccatgctcatgcttatgctcatgatggcggttgcgagtgtgttctctgctccgtgatgcgctgcaaaattgccgtgattttcgcactgcactttttttcgcgtacgctattttggcgccgtttgttattgccttcaaaccgttggcaacgctggcttgtgattagttggcaactacgagttgagctatgtggcaacgccgacggcgaattaaaaaataatgtgtatgggtaattttaattatttatctctaagatgtaaggattttttatttactttttatcaaataaataaaatatttcgaaaataagcagttatttatcagttttggtttaagctatcgatatatttcattaagcgaaatatcgatatccacgtcgtcgacggcagctcagccctaaaagaaaggaagaaagaagaaaggaaaggcaaatcagaaataatcaagacattgaccaacttgtactattgctagttttgtggacacaggatccaacacttgaaggcgaccacagctttcgcacactcacacacacacagcggccattttccgccgaacaagtgaaatgccaacatgccattgtatgtgtggtggtgaccaactgaaatagaataataaactaaaccaaagcgaagagaaaacgtaggccaagagctatattggatctgtgtcacagttttccatagcaccaacctatcaaatgggcaactttgtgagcagacagaacgcggcggtggaggaggccgatccgagcacgaacaatgcctacaagtatccaccgagaatgggtaacttctttggcacccacttcatcatgggcggcgagcgcttcgacacgccccaaccggaatcgtacttgtttggcgagaatgcggatctcaatttcctgggcaatcgacccacagcctttccgtatcccccgccgcaggccaatgaaccgacgaagaccctgaagagtctggtcaacattcgcaaggagtcggtgcgtttcgtcaagacgatgaacgacaagaagctgggcggtgtactcgagaagcccaagatgaaggagattgatcgggacttggatctggacaaggagaagtccaacgtgaccatcgaggatgtggatggaaatgtgctctgctcgatgggtttgggtggcggtgatgccgatatgacgcccccaccgccgccctgctcttacaacatcgagtttacctttgactcggacgccaagtgcgccattaccatttactatttctgctcggaggatgtcagtcccagcggcgtgacactggtgccgcgcgagggtctcacctcggagacgtaccactacgagaagggcatcaatcagtgcttctcgcagccgagccatgtcttcaatccgcagcagatgcccgaggatgaactgggctatagtcccggccgtgaacagtatcccgtggccattcactgtgtggtggaggagggcagcgacgagtgtcggcaatcgcacaccaccatctgtgtgatcgatcatcatccggaaaacggcagctatgtgctgcgtgcattgaagcaaaagatctttgtggatggcttgtgctacctgctacaggagatctatggcatcgagaacaaggccgtgaacaaaacgtctctggacgaggagatcgacgatcatggcagcgagtgtgttatttgcatgagtgagacgagggatacgctcatcctgccctgccgccatctctgtttgtgcaattcatgcgcggattcgctgcgctatcaggccaacaattgtcccatttgtcgcgctccgtttcgggcgttgcttcagatccgtgctgtccagaagggaattagcacgcatgtactgcaccagaacacgcccacatcggcggccggggagccggcgccagtggatgttccgccaggctatattccagtctcactaattgaggcactcaacggaccgccacagtatgtggccagggctaggtgagttatggaatggaattaaccgataaatcttacgtagctgatgcctttttttccaaaattcaggaacagcgaacacgatgtcacggactcagctgccaccgtggccgcttcgacaatgaccagtgctgacatcaaggccacatcgccgatcaagtccagcagccagcgtcgaccgaagatcaagaaaaacgcttcgacgtgcacgtcgaccagtgaggtgggcaccattaccaatcaatcgggcggcggcaatgggtcatccacacactctgtggagattgaaagcgatccgaagaagtccagcacggccacctgtacttcgccaacattgggggcatccacttcgccggaaccgaaacaggacaagctgcagattgttaacgaacgaaagtatcccagatccacagccggttccggtggcgatggctccgcgggtaccgatgacgatgtggacagtgagaacgagaagctatcgcctctgctatcacccggcagcaagagcaagaacgtttctagcaaatcgctgaagcaggtggtggcctgcctggaagcggatgatgatgtcgataataagagcagcactggtgatgggccgaccgaggagtccagcctaaagaagggttcgtcgataaagcgcaccaaaccgagaccagaacttagcggaagcggtgcaccctcacccgccgaggccacggccgaggattcggattactacacgccggaggatactcagaattcgatattaagcccactgtgccccacggagcgagccaaaagcggtgatccccttggcgccggcagtctgggcaatggcggtctcagcgtgggcaggagcgcaggatcagtgggcggacaagctggagtgggacccgtcgttgtgggtttcagtagtgcagttaagaagaacctgcacaaaaagtccacatcggtgggcaacatggtgggctccggatcggtgacaacggttgtggacttgaagtccaacaacgtaagctccctgccaggttggtgtttctgattcggtttccaattgtcacatgattaaaacatatatcttactgccatccagacatgttggacagcccaatcagcggcaactcggcctcgacgcgcagctccagtgatagctactcctccagttcgtccaccaagcagctgctcagctccaatccgaccactacggcggccaatattatcgtagatgacaagacagctctgcagaatgccgtcaatgtttagagccggtctcggttgaatttcgcggaaattcgttttctcgttttagctttgcgtttatactatttattcggagttcacctagatttagttaaatcaatgctgcttccccgctcgcaggaacaaatattttgaggattatattaatattaatattaatggtaatgctaatgatgatgatgatgatgatgatgataatgataatacggataaggatggaacggaggaggagcaaggaataaggctaccaggacgcaacacttaaccagtatacacagtatatacatacatacaaacactaacaccacagacacgaaaagacacacgtcccacatgcatgtgtgtgtatgtagtttaatctagtataatggcttgggtatataacaaataaaataaatccaataaacaacggcgcctagggcgctacattccacagtataattcgaactaaattagttacactatcaatgggcggcagtgtggtatatacatatattactccttgaatatcaagagtaacttgtgaatattaattagcaagaatgaagtaatttagcaacaaatatattaatctaaagccattaaatacatgtggcagtacgcagtaacaaaataatagtaaattgtggtcttaaaaccataaatccaacacatttttgtattaaatagttaattcaaacatacatattttcaaattcgaattttaatattacgttatgcgttaaagtgaaattataaacttttacttatacgtaaaagaaaaatgtcatttccaattttcatattaaatatcaactttaaatgcattatttaaataaaaaacttttgcaaatcgctatcgataacagcgcccacactatcgaaaggcgtcgataggccgctaggagctgccatcactagagatcacccttggaattgtccaattggatttgtttacctttcgcccgtttaagaatttcttttcggtggtttttcgcgtggtaaagtggctgttttgattgaa

SEQ ID NO: 21104 - DNA, 2647 bp, DROSOPHILA
aaaggcaaatcagaaataatcaagacattgaccaacttgtactattgctagttttgtggacacaggatccaacacttgaaggcgaccacagctttcgcacactcacacacacacagcggccattttccgccgaacaagtgaaatgccaacatgccattgtatgtgtggtggtgaccaactgaaatagaataataaactaaaccaaagcgaagagaaaacgtaggccaagagctatattggatctgtgtcacagttttccatagcaccaacctatcaaatgggcaactttgtgagcagacagaacgcggcggtggaggaggccgatccgagcacgaacaatgcctacaagtatccaccgagaatgggtaacttctttggcacccacttcatcatgggcggcgagcgcttcgacacgccccaaccggaatcgtacttgtttggcgagaatgcggatctcaatttcctgggcaatcgacccacagcctttccgtatcccccgccgcaggccaatgaaccgacgaagaccctgaagagtctggtcaacattcgcaaggagtcggtgcgtttcgtcaagacgatgaacgacaagaagctgggcggtgtactcgagaagcccaagatgaaggagattgatcgggacttggatctggacaaggagaagtccaacgtgaccatcgaggatgtggatggaaatgtgctctgctcgatgggtttgggtggcggtgatgccgatatgacgcccccaccgccgccctgctcttacaacatcgagtttacctttgactcggacgccaagtgcgccattaccatttactatttctgctcggaggatgtcagtcccagcggcgtgacactggtgccgcgcgagggtctcacctcggagacgtaccactacgagaagggcatcaatcagtgcttctcgcagccgagccatgtcttcaatccgcagcagatgcccgaggatgaactgggctatagtcccggccgtgaacagtatcccgtggccattcactgtgtggtggaggagggcagcgacgagtgtcggcaatcgcacaccaccatctgtgtgatcgatcatcatccggaaaacggcagctatgtgctgcgtgcattgaagcaaaagatctttgtggatggcttgtgctacctgctacaggagatctatggcatcgagaacaaggccgtgaacaaaacgtctctggacgaggagatcgacgatcatggcagcgagtgtgttatttgcatgagtgagacgagggatacgctcatcctgccctgccgccatctctgtttgtgcaattcatgcgcggattcgctgcgctatcaggccaacaattgtcccatttgtcgcgctccgtttcgggcgttgcttcagatccgtgctgtccagaagggaattagcacgcatgtactgcaccagaacacgcccacatcggcggccggggagccggcgccagtggatgttccgccaggctatattccagtctcactaattgaggcactcaacggaccgccacagtatgtggccagggctaggaacagcgaacacgatgtcacggactcagctgccaccgtggccgcttcgacaatgaccagtgctgacatcaaggccacatcgccgatcaagtccagcagccagcgtcgaccgaagatcaagaaaaacgcttcgacgtgcacgtcgaccagtgaggtgggcaccattaccaatcaatcgggcggcggcaatgggtcatccacacactctgtggagattgaaagcgatccgaagaagtccagcacggccacctgtacttcgccaacattgggggcatccacttcgccggaaccgaaacaggacaagctgcagattgttaacgaacgaaagtatcccagatccacagccggttccggtggcgatggctccgcgggtaccgatgacgatgtggacagtgagaacgagaagctatcgcctctgctatcacccggcagcaagagcaagaacgtttctagcaaatcgctgaagcaggtggtggcctgcctggaagcggatgatgatgtcgataataagagcagcactggtgatgggccgaccgaggagtccagcctaaagaagggttcgtcgataaagcgcaccaaaccgagaccagaacttagcggaagcggtgcaccctcacccgccgaggccacggccgaggattcggattactacacgccggaggatactcagaattcgatattaagcccactgtgccccacggagcgagccaaaagcggtgatccccttggcgccggcagtctgggcaatggcggtctcagcgtgggcaggagcgcaggatcagtgggcggacaagctggagtgggacccgtcgttgtgggtttcagtagtgcagttaagaagaacctgcacaaaaagtccacatcggtgggcaacatggtgggctccggatcggtgacaacggttgtggacttgaagtccaacaacgtaagctccctgccagacatgttggacagcccaatcagcggcaactcggcctcgacgcgcagctccagtgatagctactcctccagttcgtccaccaagcagctgctcagctccaatccgaccactacggcggccaatattatcgtagatgacaagacagctctgcagaatgccgtcaatgtttag

SEQ ID NO: 21105 - protein, 789 aa, DROSOPHILA
MGNFVSRQNAAVEEADPSTNNAYKYPPRMGNFFGTHFIMGGERFDTPQPESYLFGENADLNFLGNRPTAFPYPPPQANEPTKTLKSLVNIRKESVRFVKTMNDKKLGGVLEKPKMKEIDRDLDLDKEKSNVTIEDVDGNVLCSMGLGGGDADMTPPPPPCSYNIEFTFDSDAKCAITIYYFCSEDVSPSGVTLVPREGLTSETYHYEKGINQCFSQPSHVFNPQQMPEDELGYSPGREQYPVAIHCVVEEGSDECRQSHTTICVIDHHPENGSYVLRALKQKIFVDGLCYLLQEIYGIENKAVNKTSLDEEIDDHGSECVICMSETRDTLILPCRHLCLCNSCADSLRYQANNCPICRAPFRALLQIRAVQKGISTHVLHQNTPTSAAGEPAPVDVPPGYIPVSLIEALNGPPQYVARARNSEHDVTDSAATVAASTMTSADIKATSPIKSSSQRRPKIKKNASTCTSTSEVGTITNQSGGGNGSSTHSVEIESDPKKSSTATCTSPTLGASTSPEPKQDKLQIVNERKYPRSTAGSGGDGSAGTDDDVDSENEKLSPLLSPGSKSKNVSSKSLKQVVACLEADDDVDNKSSTGDGPTEESSLKKGSSIKRTKPRPELSGSGAPSPAEATAEDSDYYTPEDTQNSILSPLCPTERAKSGDPLGAGSLGNGGLSVGRSAGSVGGQAGVGPVVVGFSSAVKKNLHKKSTSVGNMVGSGSVTTVVDLKSNNVSSLPDMLDSPISGNSASTRSSSDSYSSSSSTKQLLSSNPTTTAANIIVDDKTALQNAVNV

SEQ ID NO: 21106 - DNA, 3815 bp, DROSOPHILA
ttgcatttgcagtttggcgctttaacccccttagaaccccggctaggaaagaaattaatagaaccactcacaaatctaattcataggcaagtcttaaaatcattgcaaaacaaacaaacaaaacaaaacaaaacaaaaatacaaatacaaatcaactgaactgaactgaaaatgtaaaatacgatacgatttcccaagaatgtgtggaaaacgattgcaacaaagcaaggcgaaagcaaaagaaaaaattcgaaatcaaatcgaaagtgaccgattaaaggtcgatatcaattgatcgataattgaagctgctcgatgattgtgcgtctgaacgttatatattcgtttattatcatttaactgtacaaatcttctagcttcttatgtccgttacctctttctctctctctctctctctgtctatctctttctctctcccactcgctcaacttatgactgtcgccatactgcttaagtttgtatttgtttctataatttcatcgtttgcctatcgattttttgcttatcgagcacactcattgagatccaaagttctaaactagtcaaatcggatgaagcgaaagaaaaacaaatgatcgagccgttgcagttgttgttgttgctgttgttagtttttctttttggttgccattgctgcgttgctttgcaatgttgtgtttccccaatgtctatcgcaataatcgctaattgttatcgctaccacaatatatttatatatatatgctatcgatattgctaccgttgttgttgccattgccaattgctatttgctattgttgtagtgcaatgtttgtcgctttaccgctgcttactcttaatacaagttcctactttttgggggtctcaaactaatacaaaccacaaaaaaaaaacaaaaaaaattatcaaaactaaccgaaacaccaacaaaaaatgaaaacaaaacaaaacaaaaaacgaaccaaaaaccaaacccaactcactcaacagcacctcggcgatgagtctcctgtatgagtgcatcaacacggtgatcgcggtgctcatcagcattagcagcggcatgcccaaccacagtgcctccattcagctctgcgtgcagaagctgcgcatcctcatcgaggactcggaccagaactgtgagtataaataacccagctaagaagctaacgattatattttcaattttcccattcagtgaaatatctgggactgttggccatgtcgaaaatcctaaagacgcacccgaagagtgtgcaggcgcacaaggatctcatactcgcctgcctggacgacaaggacgaatcgatacgtctgcgcgccctggacctgctctacggcatggtctcgaagaagaaccttatggagattgttaagcgattgctgggccacatggagcgggcagagggttcggcctatcgggacgaattgctttacaaggtgatcgagatatgcgcgcagagttcgtatctgtatgtgaccaacttcgagtggtatctaactgtgctcgtcgagctcattcaacttgaggctggctcacggcacggtcgccttatagcagagcaactacttgacgtggccattcgagtgcctgttgttcggcaatttgccgtcaacgagatgaccaatctgctggacacgttcaccgtttcggcgcaaagtaattccatgtacgaggtgctctacgccgccgcctggatcgttggcgagtttgctggcgaactggaggatgcggagaagacgctcaacatcctgctccgtccgaggctattgcccggtcacatccagggtgtctatgtgcagaacgtgattaagctgttcgctcgcctggccaccacgtgtttagagcttcaggatctgcctggcttggtgacagtaagtgctctctctatacgtattttcaaatgattgtattctgagtattaccattatcattggtagctctgcgaccatgtgttggacaagcttcagcacttcaatggttccagcgacattgaggtgcaagagcgagccaattccgcttgcatgctgatcgagatgctgcgcaaccagctgtccacgtcgaccgatgccatggccatggacacgacgacggagggcggcattccgccgctggccattgagattgtccaggagatgacgctgctgttcacaggcgagctaataccggtggcgcccaaggcgcaacggaaggtgcccctgccagatggtctcgatctggacgagtggattaatgcaccgccaccggaagatgcggcaagcagttcatcctcggagcacgacaaggacgagctattcgttagtgccacgcaggcaggaacgggagctgatggcggcgaaaagcggcgacagagtctcgagctcacgcctgagcaactggagcggcagcgaatggctcgtctcattgagcagtcgaacaatcctcactacctcaagtccacgcccacggcgagtggtgcctcgaatgcggatcagtatgacaatattgatgacatacccattacggagctgccactggacatggagggcgtggccgcactgcgcgtgggcagtaagttatgcgcagtgattatacacaaacagcgatgtatcaagttatctgtttttgtagtcaccaagcggtcggataagtacctgcaggaacagcaggcggcgcagggcagcaaggatggcaagaagaagcataaaaagggtaaaaagagcaaaaaggccaaaaataaagtggcatacaacagcagctccgaatcggaaggtggtaagcccggagttaacaatgttgtgtcgcattacaatgacttctaacttcaacactttgcagaaccgaaacccttgcacattgtgaacaccacgctagacatgcccgaaggtgtctccatgtcggacagcgaggacaaggatggcaaatacgatccaaatgatccgcatcgagccctggacattgaattggacatgtaatcaacgagctgaaagctgcgcagaattaaaaaaaggctaattgtatttttataaatctccttacagtacggagttcgaggcgcccgcggtgaggtcagcgtccaaaaagtcagcggcggacaaagagaatctcaagacgccggcggattcggccggcggtggtaacgccgccaagaaggataggaaaaaggacaaggacaaggacaaggagaggaaggtgaagcgggagcatcgggagagcaagcgggaacgcaaggaggctgctgttcagtcggtgatcgatctcattgacgccgacacgcccactcccagtcccagccacatctccgccaccagcaacaacaacaacacttcaactgtccttccagatgcgcccaagcatcacaaaaagaagaagaacaaggagaagacgacggatgaagcgcctgatgcactggccaccgccaccgggagcagcatcatcgatgtgggcggcgaggaggcatccgaggtggcgtccaaggtgcacaagaagaagcataaaaaggagaagtcacagcgcaaggagaagaagaaggcttcagaatctgcatccgtatccgccatcgtttcgattggcgactacgaacagccactgggaatctcaacgcccagcaaagagattttgtaattgctaagctccaagttccactaatctaattaatcattattacgattgttttttgtgtcgattgattattaagcctttattcggaaattttgtgagaggcgaagctagcttcagaatctctccattttcgttaagttgaaacaattgcctcctaagagaatgaaaaaaacctaaaaaaattatcgctgcgatataaaaacaaacaaaacca

SEQ ID NO: 21107 - DNA, 2538 bp, DROSOPHILA
atgagtctcctgtatgagtgcatcaacacggtgatcgcggtgctcatcagcattagcagcggcatgcccaaccacagtgcctccattcagctctgcgtgcagaagctgcgcatcctcatcgaggactcggaccagaacttgaaatatctgggactgttggccatgtcgaaaatcctaaagacgcacccgaagagtgtgcaggcgcacaaggatctcatactcgcctgcctggacgacaaggacgaatcgatacgtctgcgcgccctggacctgctctacggcatggtctcgaagaagaaccttatggagattgttaagcgattgctgggccacatggagcgggcagagggttcggcctatcgggacgaattgctttacaaggtgatcgagatatgcgcgcagagttcgtatctgtatgtgaccaacttcgagtggtatctaactgtgctcgtcgagctcattcaacttgaggctggctcacggcacggtcgccttatagcagagcaactacttgacgtggccattcgagtgcctgttgttcggcaatttgccgtcaacgagatgaccaatctgctggacacgttcaccgtttcggcgcaaagtaattccatgtacgaggtgctctacgccgccgcctggatcgttggcgagtttgctggcgaactggaggatgcggagaagacgctcaacatcctgctccgtccgaggctattgcccggtcacatccagggtgtctatgtgcagaacgtgattaagctgttcgctcgcctggccaccacgtgtttagagcttcaggatctgcctggcttggtgacactctgcgaccatgtgttggacaagcttcagcacttcaatggttccagcgacattgaggtgcaagagcgagccaattccgcttgcatgctgatcgagatgctgcgcaaccagctgtccacgtcgaccgatgccatggccatggacacgacgacggagggcggcattccgccgctggccattgagattgtccaggagatgacgctgctgttcacaggcgagctaataccggtggcgcccaaggcgcaacggaaggtgcccctgccagatggtctcgatctggacgagtggattaatgcaccgccaccggaagatgcggcaagcagttcatcctcggagcacgacaaggacgagctattcgttagtgccacgcaggcaggaacgggagctgatggcggcgaaaagcggcgacagagtctcgagctcacgcctgagcaactggagcggcagcgaatggctcgtctcattgagcagtcgaacaatcctcactacctcaagtccacgcccacggcgagtggtgcctcgaatgcggatcagtatgacaatattgatgacatacccattacggagctgccactggacatggagggcgtggccgcactgcgcgtgggcatcaccaagcggtcggataagtacctgcaggaacagcaggcggcgcagggcagcaaggatggcaagaagaagcataaaaagggtaaaaagagcaaaaaggccaaaaataaagtggcatacaacagcagctccgaatcggaaggtgaaccgaaacccttgcacattgtgaacaccacgctagacatgcccgaaggtgtctccatgtcggacagcgaggacaaggatggcaaatacgatccaaatgatccgcatcgagccctggacattgaattggacatgtaatcaacgagctgaaagctgcgcagaattaaaaaaaggctacggagttcgaggcgcccgcggtgaggtcagcgtccaaaaagtcagcggcggacaaagagaatctcaagacgccggcggattcggccggcggtggtaacgccgccaagaaggataggaaaaaggacaaggacaaggacaaggagaggaaggtgaagcgggagcatcgggagagcaagcgggaacgcaaggaggctgctgttcagtcggtgatcgatctcattgacgccgacacgcccactcccagtcccagccacatctccgccaccagcaacaacaacaacacttcaactgtccttccagatgcgcccaagcatcacaaaaagaagaagaacaaggagaagacgacggatgaagcgcctgatgcactggccaccgccaccgggagcagcatcatcgatgtgggcggcgaggaggcatccgaggtggcgtccaaggtgcacaagaagaagcataaaaaggagaagtcacagcgcaaggagaagaagaaggcttcagaatctgcatccgtatccgccatcgtttcgattggcgactacgaacagccactgggaatctcaacgcccagcaaagagattttgtaattgctaagctccaagttccactaatctaattaatcattattacgattgttttttgtgtcgattgattattaagcctttattcggaaattttgtgagaggcgaagctagcttcagaatctctccattttcgttaagttgaaacaattgcctcctaagagaatgaaaaaaacctaaaaaaattatcgctgcgatataaaaacaaacaaaacca

SEQ ID NO: 21108 - protein, 568 aa, DROSOPHILA
MSLLYECINTVIAVLISISSGMPNHSASIQLCVQKLRILIEDSDQNLKYLGLLAMSKILKTHPKSVQAHKDLILACLDDKDESIRLRALDLLYGMVSKKNLMEIVKRLLGHMERAEGSAYRDELLYKVIEICAQSSYLYVTNFEWYLTVLVELIQLEAGSRHGRLIAEQLLDVAIRVPVVRQFAVNEMTNLLDTFTVSAQSNSMYEVLYAAAWIVGEFAGELEDAEKTLNILLRPRLLPGHIQGVYVQNVIKLFARLATTCLELQDLPGLVTLCDHVLDKLQHFNGSSDIEVQERANSACMLIEMLRNQLSTSTDAMAMDTTTEGGIPPLAIEIVQEMTLLFTGELIPVAPKAQRKVPLPDGLDLDEWINAPPPEDAASSSSSEHDKDELFVSATQAGTGADGGEKRRQSLELTPEQLERQRMARLIEQSNNPHYLKSTPTASGASNADQYDNIDDIPITELPLDMEGVAALRVGITKRSDKYLQEQQAAQGSKDGKKKHKKGKKSKKAKNKVAYNSSSESEGEPKPLHIVNTTLDMPEGVSMSDSEDKDGKYDPNDPHRALDIELDM

SEQ ID NO: 21109 - DNA, 4067 bp, DROSOPHILA
cctttttgacacacttctttgccgtttatgtgtatttctattacttttacgcatatatgctaaacaactttcttcttctggttgcaaaggggcgcgctttgtgcaaaagtatttatcataaattttacacacacgcaggcgcacaccgacacacaaacacacacacacagagcgatagccccagcgagatccaagcacacatattgcatacacacacacaggcatagaaaaaggggagagcagattgttcagttcgcaaggtccatgaatccggaattccaattctgcgctttatcacattttcggcattatttgttgtgcctccaaaagtctcttctccgaacagcaggtttcgaatattgggaatgtaacaaaatttcattaccaaacacaaccactcatacacaatcagcacagcacgacgacacacacggacgcgttcactcacactagcacaggtttcgagccgcttttcttttcgatccgtttcttttccgttcggctcgagcgcgatcacgatcgatttgagactagttgctttgctattcgcggaatggaatccgctctgagtcgagctttgttgggggtaaagcttttacatagctccaaaaagctcgcttcgcaaaggcaactgcgcgtgcccaccactactatcgatagccgtccacggatcagcctaggagttccagtaatcgttaaaaatattttactctggtccccgttggaaaatctataatttcatttgtttttttttataaagccctcggctacacttccttgctataactatcatttcagcttagcatttttaatagttttaatttatataaatatttatatagaaaggttttacaattttttgttcgtaatctgctgcgatagatcgataggtgttcaacgtttgaacttgaacatcgtggtattttcaggctcttcacctgcggtctcactggctgcaacaattatcgaagaaacgataggttgaaattaataacaaaagagtgcaaaagggaaaacgcaaaaagttatggggaaccaattggctatacagatgaatagcgatgaagacgacgattttgattcttcggacaacgagctgggcttcaacgtgatcaactttacggtgaacgccatggatctgcgctccgattattgcagcagcgagatgccagttatacgaggcaagcccgatctagttaaatttcaggtaatgacgaaataccccgtccccagataacaattaatagtaatttattgcccacgcaatcttccagaaaactgatatgtacaaggagatccaggcgtcgagtggattagtgagcaatccgaacaatcgctggaacctggtgcacgcccttcagcagcgtgagaatgggttggcatcgccgcacagcgcatcgttctccaagaaccagcagcgctacatatccaatctttacataccaaacaaaaaggccacacgcctgatgtcgctggaatccaaaatatttgtgaccaagttcaatcgttcgggcagcaagttgctgaccgcttgtcaaggtcagcattcatgattaacgcttccgattggcattaaaacacgattttgaccccttccagatggctttgtgcgcatttacgatggcgccaagggcacttatcacctgctgaatcgcatccgagcccgcgatgttgagtggagcatcatcgatgcggattttagtccgaatggcgagcacttcgcctacagcacctggtcccgctcatgtaggtactccgcccaatctgtttatccacactaagttgttttccccttcagtgttcatcatgcccgtgaatgggggggaagacgactgccagtggatcgatgtcaatggactgccaagccataggttggccatcttctcgctgcgctattcgccaacaggcgacaaaatcatcgggggcagcaacaattccacggtcatcgtgaccgacattcgcacaagaaacacacagatcctgcgcacccaccgcatgcccggcaaggatgttaactcggtgtgcttcctacacgataaggatccaaatgtgataatcgccggctgtgacgacggcctgctaaaggtctacgacctgcgcaccaccttccgttcacgggacctgtccaagtctgtggcatccttcatcggccactacgatggcatcacctacatcgattcgcgcaacgacggctaccacgtgctgtccaactccaaagaccaaagcatcaaaatctgggacataaggcagccgagcaatatgcgtaatcgcagtcgttctagacagcaagtcgaccccaccacatgggactaccgatggaaccgcgttccgcgggaatgtaagctcgtgcccgttttattcttggaaaatttttaacgcccacctatcttgtcggcagtttacaatccgcataagccactggaaggagactccagcataatgacctaccgcggtcaccgagttaccaaaaccctgttgcgggcgaagttctcacccatggagcagacagggcaacgctacatttacacaggctgtgccaccggacgtattataagtgagttcacacctttatcttgcagtatttctctgattttctttcacaaggctatctaaaatacattttctagccagtaagttcgccaagtatttttagaaattctctatccatcaaaaatttggttgtgaaaccaaaggccatttctgtgtttccgttgataaacatattatgttttcaaaataatccaattttcttacagtttatgatgtacttactggtaagattcaagaggctattgaaggacataggactgtgataagagatctggactggcatccggatcgctcagaaatcgtgtctggctcggtaagcatcgaaatatgagtaatattcctctgaataataatgcacactcaactgcctacgcagtgggacacccatgttcacctgaacaacttcagccgcagcaacgccaatcgtccggtaaagcgatcacatagctcggatcatgacaaaaagcccctgagaagatcacgacgtttggcgaatcgaaatgttacaccggactagttgtaaggtttagagtataagctagtaaggtcccctttgatattacatttcgttacattcattcatagtggcttgcctaagcgacgcacgagaatattcaccacagtcgggccggctgggataattggttctattaaataagactgaagaatatgtcactcacttgaaatgtatagttcagtttaattagttagcgtgttatacaaaacagtacattaaaatgtaaaccatgaagcttaccaactacctacttaagttgtttatgtacaaaaacaatcataataagaatcacgttgaaatatatttcgtttgctcgatctaaattccttgaaaggcgactctcttcttgaccgctcgtatgctagttctttgcacccttaccggatacttgctatgctgtttgcttttaaaatgctcaacggctttgtttttccaaaggttgcgaatgcgcgtttcatcgtaaggacagtccaccacatttagctcgacgttttcgctgattccgtagcccacgatctcgcccagcgacgaattgtgaaacgcactcatgtcgaacaattgaaattggtctgcacagaatttagagatattaaaatgattgaatgatttgagtttttcttggatctcttccagggataagaggtccttaggcaggtcttcatcggctgactgaacgcttttattgccggaattattcttgtcagcacttacgtcgttcctatcttcgcctcctgtgtcctttcgattatcgacagccgcctccacggcgagcgcaaatgaggtgatctccagtttagtcgagggctccgcagacgattttaatttggatttcttcttcgatttcttttcagtagcttccgaggcgggaggtgtttcttctaaatctttttcatcattgtccttacgcttctcttccttggatttctttttcttcttagacggagcttcggctgttaaatctatggtaatttcttcctgaatttgagtggtttcttgactg

SEQ ID NO: 21110 - DNA, 1563 bp, DROSOPHILA
agtgcaaaagggaaaacgcaaaaagttatggggaaccaattggctatacagatgaatagcgatgaagacgacgattttgattcttcggacaacgagctgggcttcaacgtgatcaactttacggtgaacgccatggatctgcgctccgattattgcagcagcgagatgccagttatacgaggcaagcccgatctagttaaatttcagaaaactgatatgtacaaggagatccaggcgtcgagtggattagtgagcaatccgaacaatcgctggaacctggtgcacgcccttcagcagcgtgagaatgggttggcatcgccgcacagcgcatcgttctccaagaaccagcagcgctacatatccaatctttacataccaaacaaaaaggccacacgcctgatgtcgctggaatccaaaatatttgtgaccaagttcaatcgttcgggcagcaagttgctgaccgcttgtcaagatggctttgtgcgcatttacgatggcgccaagggcacttatcacctgctgaatcgcatccgagcccgcgatgttgagtggagcatcatcgatgcggattttagtccgaatggcgagcacttcgcctacagcacctggtcccgctcattgttcatcatgcccgtgaatgggggggaagacgactgccagtggatcgatgtcaatggactgccaagccataggttggccatcttctcgctgcgctattcgccaacaggcgacaaaatcatcgggggcagcaacaattccacggtcatcgtgaccgacattcgcacaagaaacacacagatcctgcgcacccaccgcatgcccggcaaggatgttaactcggtgtgcttcctacacgataaggatccaaatgtgataatcgccggctgtgacgacggcctgctaaaggtctacgacctgcgcaccaccttccgttcacgggacctgtccaagtctgtggcatccttcatcggccactacgatggcatcacctacatcgattcgcgcaacgacggctaccacgtgctgtccaactccaaagaccaaagcatcaaaatctgggacataaggcagccgagcaatatgcgtaatcgcagtcgttctagacagcaagtcgaccccaccacatgggactaccgatggaaccgcgttccgcgggaattttacaatccgcataagccactggaaggagactccagcataatgacctaccgcggtcaccgagttaccaaaaccctgttgcgggcgaagttctcacccatggagcagacagggcaacgctacatttacacaggctgtgccaccggacgtattataatttatgatgtacttactggtaagattcaagaggctattgaaggacataggactgtgataagagatctggactggcatccggatcgctcagaaatcgtgtctggctcgtgggacacccatgttcacctgaacaacttcagccgcagcaacgccaatcgtccggtaaagcgatcacatagctcggatcatgacaaaaagcccctgagaagatcacgacgtttggcgaatcgaaatgttacaccggactag

SEQ ID NO: 21111 - protein, 511 aa, DROSOPHILA
MGNQLAIQMNSDEDDDFDSSDNELGFNVINFTVNAMDLRSDYCSSEMPVIRGKPDLVKFQKTDMYKEIQASSGLVSNPNNRWNLVHALQQRENGLASPHSASFSKNQQRYISNLYIPNKKATRLMSLESKIFVTKFNRSGSKLLTACQDGFVRIYDGAKGTYHLLNRIRARDVEWSIIDADFSPNGEHFAYSTWSRSLFIMPVNGGEDDCQWIDVNGLPSHRLAIFSLRYSPTGDKIIGGSNNSTVIVTDIRTRNTQILRTHRMPGKDVNSVCFLHDKDPNVIIAGCDDGLLKVYDLRTTFRSRDLSKSVASFIGHYDGITYIDSRNDGYHVLSNSKDQSIKIWDIRQPSNMRNRSRSRQQVDPTTWDYRWNRVPREFYNPHKPLEGDSSIMTYRGHRVTKTLLRAKFSPMEQTGQRYIYTGCATGRIIIYDVLTGKIQEAIEGHRTVIRDLDWHPDRSEIVSGSWDTHVHLNNFSRSNANRPVKRSHSSDHDKKPLRRSRRLANRNVTPD

SEQ ID NO: 21112 - DNA, 3556 bp, DROSOPHILA
gattattggcaccacgggaacaacgacaccctttctgccggaaagtgagctgccggtcagcgcccggctgacaggaaactcggaggattcgatggaacaggaggcgatttccaatgcaatcgagcaaagcaaacgggagagcggtggcgccggtggcgggcccaacacgatcagtcctcaagaacgattcaccgaacaggatgtcaccgatctcatggcccttggctatcctcgcagcgatgtgcttaccgtgctgcgcctgtgcggcggtaacaagcaggcggccaggtccgtgctgctccaccgcaacgatgccgcctcggggagcgaactcagctgaacgcggctagacgcacagcccacaccaccacctaaagccgaactccccatagccagaaaccggattgcaataggatgatgaacagactggaccccattaactggaagccgttccaacgaaatactccgagcaataccaaataataagccacgccacgccacatataaagtcaaataggaaatagtaaggactatacacaaccacaaagcaatgaataccgaaacgaaaacctttctaatttagtgaaatgtttataaactgatgtcactttttttatacgaatcgtttgttacgatgtacaatatctaattagggtgctacgcagcactaccgggtcatttttaaagcagaggtgggttggttttttctagagagaatagtaagcgatataatctaaaatttaatgaatgaaaatctggacggtgatggaaacaagccgcatcaacgaaaacatgaaacaagtaaatacaaaagaaaaacgaaagaatgcctgactattaaataatattacacttatacacaatttgaattagtattaagggtctgtcaagaaaaactgaattgggttcaataataaatggtcgatagtattgttttggatttgaaaagaaaaagatgagcaagcgcattttgatttgtcttcttgggcatctcgctgttttcacttttataaatctttaatagcattcgttatatgttatgtatataaattataaaattacaacttctgatttttgcaaaactcctttaattgtttgttacagttgctatagttgtgtctgatgctgtggctacgctaatcctcttcctcctcctcatcctcctcgttcgcacgacccgcccccgatcccttgtggttgaactccttctctggatcgaactgcatgccctcctggtcggcgccatcctcctcgtcatcgtcgccagccacctgggcgttctcggcctcagcgcgctccaggcgtctggccagatccgcctcgtcgatggccgtaaccagtttgggtgccatgatcaccttgaactctccatcgtactcgctggtcttggcgcgaatgtgctcaatggccacctccagagcctttaaaccgtctgtcttcttggtagtggatgtggtcattacatagctaaaaggatacggatgaagagcgattacgtttaggaaccaattaactcatttaagcaacatttttagttatttcgatttcacaagaagttgtaaaattaaattgaatataagtttttctcttaaccaagtggtcatttacaatatatacaagatgaaagggatttccttattatttaacgataaatttcggctaaaatgaagaacagaaatctacaattttcgtattcttttaattaaagaaaccctcgttaatttcgtctacaccaagggaaattacaatagtttacaggtacttacagtggcggtgctatcaggttgatgcgaatgggcagctcctcggtgctcagctccaggcccttggtgagcgatgccttgacagcgtcgatgccctcgtaaccgtagcaggagcactcgatgtccgcacggatcttgacagtgggcgagaccagcttccgcttgatgttgctcaacaggacctccttggtctccggttccaggttgcactcatcgaagacggtgggatcggtgaccgattgcttgaagatgtcgtaggcgaccgtcttgttgttgtacttcttctcgaagtgccaggcggtcttctggtagagatcttccagcttctcgttgccctcgaagccgagtatgtcggcgacatggcggagcagtgagttgatggccttggccttagcgaagcgctcggtgcacttctcgacatcttcgggcgaaacgcgacgcttcgacagatcgatgtagcccttctccttgtcaacacggataaccaccaccggttcggtcttgccgacacgaatcagcttgttgatggagcggatgcgccggcgggacagctccgacagcaggatcatgccctcgatgttgttgtactcaagcagatgaacgtaggcgcccatctcggcgatggacagcacgttcaccataacgacatcctcgatctccggataccgctcgttgtagaagcgcgacgtcagggccatgttaaagtctgtggtctatggccaaaaaatgggcaatttggacttttcgaaatgaaaaacgtgtacaatttctgccgagcgggcgcaagaagaagaagcgtaaggtatgacagtggtgttatcgatatttaattgcgtagccggcaaaacgttgccaattggattgcttctggtcacactggaaaggtggggcagcagcggtctatcgattgtttgtcacatggattgccggtcaatttcaaattttactgttttggttttaattttgatcagaacattcgaaataatagtccaaatgtggaatgccatcccttggcgagcttgttatttaaataccaatcaatttcaaattggaaatgttaatttttgttaaatttattgcaatattacaaaaattgcgaaaattgacccaaaagttaaattctcaaaaagttatatagattgctaatactgataaataggaataaaaagcagttgttcttttatctatatgtcactttttatccatgttatgatgataattcccatatgtcaaattttcatttttcatatttatctgtttaaatttgcagaacattttaaaaggttgcatattatcgcatacaaaaaggccattaaatatgtaatgacatgtagcttgaatcggtttttttagaagctacacttttaatttaaagaacattagaatatttgtataggttggctccgtttattagttaattatgacagcgcgcgagtacaatatatatttatctaacagttatctatgatggtcccgatctattctttttgggaaaggtaaatacgcgcctcgtcgacctataattaaatagataagattaaattaaagcgggcctctaagtggtcaaaatcagaatagccaaatacttacggttttgaaccaaacggagggtctaaagatcatcttagataggaaggtcatttgggtgcgtgggctaatggcatgcatgtgaagatgcttcaccgtgataaacggcggcagatggaatccgaagagggcatcatcgacagaaactcccttggacaccagaagatccttcagggcgttctccatgagctgcactgtaaggaatc

SEQ ID NO: 21113 - DNA, 1257 bp, DROSOPHILA
cttcttcttgcgcccgctcggcagaaattgtacacgtttttcatttcgaaaagtccaaattgcccattttttggccatagaccacagactttaacatggccctgacgtcgcgcttctacaacgagcggtatccggagatcgaggatgtcgttatggtgaacgtgctgtccatcgccgagatgggcgcctacgttcatctgcttgagtacaacaacatcgagggcatgatcctgctgtcggagctgtcccgccggcgcatccgctccatcaacaagctgattcgtgtcggcaagaccgaaccggtggtggttatccgtgttgacaaggagaagggctacatcgatctgtcgaagcgtcgcgtttcgcccgaagatgtcgagaagtgcaccgagcgcttcgctaaggccaaggccatcaactcactgctccgccatgtcgccgacatactcggcttcgagggcaacgagaagctggaagatctctaccagaagaccgcctggcacttcgagaagaagtacaacaacaagacggtcgcctacgacatcttcaagcaatcggtcaccgatcccaccgtcttcgatgagtgcaacctggaaccggagaccaaggaggtcctgttgagcaacatcaagcggaagctggtctcgcccactgtcaagatccgtgcggacatcgagtgctcctgctacggttacgagggcatcgacgctgtcaaggcatcgctcaccaagggcctggagctgagcaccgaggagctgcccattcgcatcaacctgatagcaccgccactctatgtaatgaccacatccactaccaagaagacagacggtttaaaggctctggaggtggccattgagcacattcgcgccaagaccagcgagtacgatggagagttcaaggtgatcatggcacccaaactggttacggccatcgacgaggcggatctggccagacgcctggagcgcgctgaggccgagaacgcccaggtggctggcgacgatgacgaggaggatggcgccgaccaggagggcatgcagttcgatccagagaaggagttcaaccacaagggatcgggggcgggtcgtgcgaacgaggaggatgaggaggaggaagaggattagcgtagccacagcatcagacacaactatagcaactgtaacaaacaattaaaggagttttgcaaaaatcagaagttgtaattttataatttatatacataacatataacgaatgctattaaagatttataaaagtgaa

SEQ ID NO: 21114 - protein, 341 aa, DROSOPHILA
MALTSRFYNERYPEIEDVVMVNVLSIAEMGAYVHLLEYNNIEGMILLSELSRRRIRSINKLIRVGKTEPVVVIRVDKEKGYIDLSKRRVSPEDVEKCTERFAKAKAINSLLRHVADILGFEGNEKLEDLYQKTAWHFEKKYNNKTVAYDIFKQSVTDPTVFDECNLEPETKEVLLSNIKRKLVSPTVKIRADIECSCYGYEGIDAVKASLTKGLELSTEELPIRINLIAPPLYVMTTSTTKKTDGLKALEVAIEHIRAKTSEYDGEFKVIMAPKLVTAIDEADLARRLERAEAENAQVAGDDDEEDGADQEGMQFDPEKEFNHKGSGAGRANEEDEEEEED

SEQ ID NO: 21115 - DNA, 3094 bp, DROSOPHILA
gcgccgcgctggatatctacgatccgaaggtggaacccgagcagatcatcgatgacctcacgcatcccagtgtcacggaatcgccggagaaggtgaagaaggcggtgcagatccacagtgatccgtacagcgcagtgcgtgccacacatgcgttggtcatctgcacggagtgggatgagtttgttgatctggactttaagcgcatataccaatcgatgatgaagccagcctacatcttcgacggccgcaagattctcgaccacgagcgcctgcagcagatcggcttccacgtccagaccatcggcaagaagtaccagcgcaccggactgctccgctcgtggggcattgtgccgcagctttaggcgcgtcgggcggcggaggtggtggcatttacacttaaagttggcgaaatttccagtatttgcgagactaaactgtaaatatccgtattcttttctgtagctgagtgtatgttagattgggtcgattaagcttaagttgaatcatgtttaggagaatagaatcgtttcaaatcatcagaggactctgtcagttttaagtgaaaagtaaagttgaattcttgcattttgtatattagtttctaaaggatataagcttttaaaacatttctgtatataactagaaagcgaattacttatttgaacaacataaggcaatgattgattaaccacaaagttataaaacgtagtaactatttttgatcagacaatataatattatgtagctttccccatatcgacccaaactaacgagtgtgtttctaaatagttaaagtattcaactaggcacacccgcaagggaaaccctcgaaccgtatttgtattcatattcctattcctattcccctgtcgatccgccactcgaggatcggtagttgcaatattaagtcccagcaggacaataatcccctcctgcggcgggccaataaaaaccagcatttacacgagagcatgtaaatttttataataaaaataacaacagtgcgtttgatttgggttccctttttcagaagggtatcctcttgactatttggcggtaccacaaaaaggaggtggccgccgatagactgaaccaggtcaccaggtacgacagatgatcgttgcgcagggtaacgcgtgtctgtccaccgattggagcatgtgcagccgtttgcggatcgtagacggcgtccaggaacacaggagctgctcctgtggcggcgcacatgcgcgccaagtcgcgatagagatagacattgcccttgtggtcgggtgtgaactgcggacgcgcctctcctttgcgcacgacggcggtgagctccacttccgcctgttgttggcccagcggcctggtttccggctccacttgcttgcgggacacccagccccgattgacgagcactatgtcgctgggggcgaaacgatattaagatgattctatgggatttccttgagcacaacttactctctatctgccagctgaaaaggggttactattagatagccattgcccgagtcgcgctgcgagaagagtcctccttgggtttccacgccatcgggccgtatcagcgatctcggacccaggcgcatctccttgtcgtgaaggaaacgtccacggatcttgaccaggcggtactccatttgggccaagtcagtgagactacaggagggaatacactatagtgggtgggtatatagtggagaatatgtgggcaaacctactcgtctggtagagccacaggcgccgtgctcagctgcttgttgagatccttgatcaactgctccttccaaatcttgcgcttcacttgccagcagcccaagccaaaagtggtggccggtatgagctggggattggttaatggacaacaaggattagttgtgtgtataggtagaggagttggtgtctacccaccaggaggaaccatcccaaaggagctatcttctccttgtccttcgccgcctgattgggaatactggttgtccaattcaccggcggtcgctgttgtgtcatctttctggtgattaatctcggattgttcgcggtgcccgggtttcggaatacagtctgtatattaaaggccacttgccggcacatttggttccccaaacgtatcatactttcttttattttgctctaaattttctatttatttatttatttacatttccaactggaagttgatagtaagaccgttttgcactgttatgaacggataataacttcatgcggtcacaccacttccgaatgtaagctcttcttgattttatgaattaagactgcaaaggtttaaagtatataaaaaataaagtaatagttattacttttcacatgcaaaaaaaaaaacatttttctttctttacaaagatttgtatctgttactgttaatcatatgttagcaagtcactgttaacatgtcgttatacccaagttggcagccccgttacgatcagctgttttagtctgttgtcgcgtgcaattggattttttaaacgattttgttttagtaaatttaggatacatttaagaatgcagtgcactcgtgcagttgcaagactggccggcggcctagcgagaaccgcatgggtatgtttaaagcaggggttgtactttatttagtcaaaacacggtcatccgaatgcaccgccatcaactcttatataaacggatataaaatttttaaattaaacatattataggcaacacaacatacgtataagcacaggccagcgatactgggactgctggagcagccatgccgcttgtgttcatccaccggcgttgtggataataccaataaaacgaaacccggcacagcggaagccgcagaaggcggtattctgaagagagtgctcaacaaagtgggcttcacaccgaacacaaaggcggtaggactcggattactttgcccatttgattaatattcatcgaagtgatcccatttcagcgcctcaaggtaaccagtcatctgctgtacgaaagcgtcgccgacaagatcaactatgtgacctttttccgcgacttcaatctgcccaatacctttaactcctggttcttggtcaccgaactgcatgtttggctactcctgatgcgctcc

SEQ ID NO: 21116 - DNA, 908 bp, DROSOPHILA
atgtgccggcaagtggcctttaatatacagactgtattccgaaacccgggcaccgcgaacaatccgagattaatcaccagaaagatgacacaacagcgaccgccggtgaattggacaaccagtattcccaatcaggcggcgaaggacaaggagaagatagctcctttgggatggttcctcctgctcataccggccaccacttttggcttgggctgctggcaagtgaagcgcaagatttggaaggagcagttgatcaaggatctcaacaagcagctgagcacggcgcctgtggctctaccagacgatctcactgacttggcccaaatggagtaccgcctggtcaagatccgtggacgtttccttcacgacaaggagatgcgcctgggtccgagatcgctgatacggcccgatggcgtggaaacccaaggaggactcttctcgcagcgcgactcgggcaatggctatctaatagtaaccccttttcagctggcagatagagacgacatagtgctcgtcaatcggggctgggtgtcccgcaagcaagtggagccggaaaccaggccgctgggccaacaacaggcggaagtggagctcaccgccgtcgtgcgcaaaggagaggcgcgtccgcagttcacacccgaccacaagggcaatgtctatctctatcgcgacttggcgcgcatgtgcgccgccacaggagcagctcctgtgttcctggacgccgtctacgatccgcaaacggctgcacatgctccaatcggtggacagacacgcgttaccctgcgcaacgatcatctgtcgtacctggtgacctggttcagtctatcggcggccacctcctttttgtggtaccgccaaatagtcaagaggatacccttctgaaaaagggaacccaaatcaaacgcact

SEQ ID NO: 21117 - protein, 293 aa, DROSOPHILA
MCRQVAFNIQTVFRNPGTANNPRLITRKMTQQRPPVNWTTSIPNQAAKDKEKIAPLGWFLLLIPATTFGLGCWQVKRKIWKEQLIKDLNKQLSTAPVALPDDLTDLAQMEYRLVKIRGRFLHDKEMRLGPRSLIRPDGVETQGGLFSQRDSGNGYLIVTPFQLADRDDIVLVNRGWVSRKQVEPETRPLGQQQAEVELTAVVRKGEARPQFTPDHKGNVYLYRDLARMCAATGAAPVFLDAVYDPQTAAHAPIGGQTRVTLRNDHLSYLVTWFSLSAATSFLWYRQIVKRIPF

SEQ ID NO: 21118 - DNA, 2816 bp, DROSOPHILA
ctggccggcggcctagcgagaaccgcatgggtatgtttaaagcaggggttgtactttatttagtcaaaacacggtcatccgaatgcaccgccatcaactcttatataaacggatataaaatttttaaattaaacatattataggcaacacaacatacgtataagcacaggccagcgatactgggactgctggagcagccatgccgcttgtgttcatccaccggcgttgtggataataccaataaaacgaaacccggcacagcggaagccgcagaaggcggtattctgaagagagtgctcaacaaagtgggcttcacaccgaacacaaaggcggtaggactcggattactttgcccatttgattaatattcatcgaagtgatcccatttcagcgcctcaaggtaaccagtcatctgctgtacgaaagcgtcgccgacaagatcaactatgtgacctttttccgcgacttcaatctgcccaatacctttaactcctggttcttggtcaccgaactgcatgtttggctactcctgatgcgctccatggccgagggctccgaaacgggcgaggatggacgcttcctgcgcaactgcattgtggaggcgatgtggggagatgttaacacacgcgccaagaaattgggagtaggttttactttagttcacctttatatatataatctttatgctcttcatatgtgtttcccaacaggctcacaatccttcacgcacccgtcagcaaatcgagaccttatccgagcagttccaagcggccctaatcgcctacgacgagggcatcatgtccgacgatcgggttttggcctgcgccttgtggcgccgcttcttcgagatgaactgtgatgattacgcgcagatcgagcgactggtgaagtacgtccgccagcaggccagcatgctggacagtttgccgcgcgatcagttcattgtcaagccgaaagtggcatggttggaattggacaagtgcaaggtttaatcttagttatattctgttttttaaaaataaagtttgagagtatgtgaactggaaactagatgctaaggtcctccacggactgattactcaaggcacgcagctggcacttgagcagaaatgctgtaatccttcgttctgcccttctccgctgcggttcctttagttgggccagtatttggtccatctggagaaagctgcttctgggcgagattatttcagcgggctcttgttcctcgtagatgatttcctcttggatgatctgttcactgggctcctcgatgacctcctcgattatgaacgtactcgactgctgtggaacatccccatcctcaaaagtgtcccacaaaaattgcacaggagtttccgtctggatggtcgcctcctgtttgtttgttttgggtttggttttcactttggagggcggctggatctcggccaaaaatcgcaggcgttccaggtacggccaggtggatccactggtgtccgcgcggcgaaactccttgcgaaactgatagtgcagattgttccagcgcatcaggcagaagtccactaagaggattataactttaaatatatatatcttattcttttattagctgacttaccatcacagcccatcatctcggctatgcgagcccagatatcggttttcgccttcatggcatcgtagttcgagagtccagatctcttatagagcacaggattgggttccaccagatcaattagcttgaagtcgaaaggtctgtttttcttgtaactggtgcgcatggctaccaaattgaattaaactagcttgaacttgataattaagaatcccttgcttgagccatgtttatttaccttatgaagtacagcagagctacgattaagcgaaaaccatttggcacgtattgtatgtcataattgcgggcttaagatacttaacaaatgaagggaaattacataataataaattatattttaactgcattattagaaccttgtttattagttattactttacagatagaaatttacaggttaactacattgagcgatcactgtaatattccaatttatgtccacactttggtttttgggtcgttctataggctggtcacatttttcttgctgaccattattatcgaagttgctttacccgataggttccagacaaacaatatcagacgtctttgttttgcttaaaaaattaatagttcttattgttaattaccggtgccgcattaaaaaaatactggttagacaacgaagtaactacaaactagcaaccatagtgctctaaagtgctcttaatagtgttccatattcttttcagttattatttttatttaatttgttattattagaaacgttcacaataattatttatatattaaaagtttcctactaacaaatattttgacatttttccctattcgttgtgatcgtttctagaaaattcaatcgatgtttccagaaaacctaacctatcgaaccaatcgatattaacaccgattttttccacagctctattgacgacgtagaagctgaaaaaattgtggagtgaaaaattgtaaaagtgaccgaaaaaactatactttggccagctatatttccacttacatcacaccagcaatgaacatgtgagtattgaaacacaggcacacattttttaagcccaaatttcggtttagcatgcggccaggggccgagtgtcgaaaatcaataaattcaaaatggcagtaaaaaatgaaaattacataaaaaaaggtcgcttcgtgtaaatttcaacattttggcaacgcattaaagggctcaaaattctaattttatggcacaaaacgc

SEQ ID NO: 21119 - DNA, 760 bp, DROSOPHILA
caagcaagggattcttaattatcaagttcaagctagtttaattcaatttggtagccatgcgcaccagttacaagaaaaacagacctttcgacttcaagctaattgatctggtggaacccaatcctgtgctctataagagatctggactctcgaactacgatgccatgaaggcgaaaaccgatatctgggctcgcatagccgagatgatgggctgtgatgtggacttctgcctgatgcgctggaacaatctgcactatcagtttcgcaaggagtttcgccgcgcggacaccagtggatccacctggccgtacctggaacgcctgcgatttttggccgagatccagccgccctccaaagtgaaaaccaaacccaaaacaaacaaacaggaggcgaccatccagacggaaactcctgtgcaatttttgtgggacacttttgaggatggggatgttccacagcagtcgagtacgttcataatcgaggaggtcatcgaggagcccagtgaacagatcatccaagaggaaatcatctacgaggaacaagagcccgctgaaataatctcgcccagaagcagctttctccagatggaccaaatactggcccaactaaaggaaccgcagcggagaagggcagaacgaaggattacagcatttctgctcaagtgccagctgcgtgccttgagtaatcagtccgtggaggaccttagcatctagtttccagttcacatactctcaaactttatttttaaaaaacagaatat

SEQ ID NO: 21120 - protein, 218 aa, DROSOPHILA
MRTSYKKNRPFDFKLIDLVEPNPVLYKRSGLSNYDAMKAKTDIWARIAEMMGCDVDFCLMRWNNLHYQFRKEFRRADTSGSTWPYLERLRFLAEIQPPSKVKTKPKTNKQEATIQTETPVQFLWDTFEDGDVPQQSSTFIIEEVIEEPSEQIIQEEIIYEEQEPAEIISPRSSFLQMDQILAQLKEPQRRRAERRITAFLLKCQLRALSNQSVEDLSI

SEQ ID NO: 21121 - DNA, 4028 bp, DROSOPHILA
gcgcacacaacttcagcaaacatatatagacagaactaataatggcgacattataaataaactagcttaagccacttctaaactgtaactggaaatgtagtctaaaacgtacaaaataaattaaagcaaatgcagaacgcagaattatataagcaaacttttgtccctcacgcgttgaagaatcgaaaagaaaagtaataaaagaaatgtaaacctaaaacaatatatatagcaaattgaatgtatttttttatttattttggtggggctcgcagtttccgatattatgaactttggaggccttatctaaaatccagcaggaaattcttaagtagcactgataaccacatggattacgaatcaaattccttcataatgtcatccaattttattcgcttaacattggttaaatacatgaattcgattgtacttttcttttgtgatgaaaataacagacatcttaacgactatttagaaaagcttcaacagaatcctaaacttattaattacgatcccatattagcaaggaatatagcttaatttcaaattggccccatttacttgccaataaaacaagagagctatgccattaacaatgtttatttgcgcgtataaacgtagtaaaaggcaatgcagattaagtcaggcacaaagtattactttgctgtttctaaagcaatggtggaaattcgtgtggatgttgcaaagggtatccactgtttgttgtgtgtgatgtgcggtggaataggttatagaaaaaatcacaaattgggtgcacacatataggatcaaggacgaacagaacatcaacaaaaggcacttggacagctgctcatcgcgtggccaagtgcacacagttagaaaacataaaaaatagaagagcagtcgagaacacgttaatggaaatgggttaatagaaactattttatgctgataaggcttaaagaaatggatctactaaagctaagtgaagcggcccggaatactgacggtgctcggtctaggagtactgcgtgtgcgggttcacgttgatcatctccatgttgctgttgggtaaacagaaataaaaccatgattagttcaagagcccttagtataggaggtgtcaatcattttggccagtgcccgattaggtaaaacgctactatcaaacgctacttaattgtcaatacttatcgcgcaccgagcaaaacgctaatttggccatgagaaacgattcggcttcaatggggaatgaaatactcgactcttagcagacttaatgaactataatgctgtgggagtgggggataagggcaggatgaatgacgatcggtacaatgaggatgaatcaacgatgtgcgatgatcaactcacctgcgactgcatcgcatatgaataaatagcagggccaggcccagggtgatgcaaatggcacccaccacaatgtacgcaatgcccaggaacgggttcttgccaccgagcacggatgtggtggagagtatcattcgcttcgtgccgtcgaacgacaccaccggataatctgaagggcaaaacacaaatacattagatacagcattcgcgatatcccagccattcgtacttactatacttaatgttaagcgtataattgccagacttcaggccgttggcatagttggtgttcgtttggttgagacggcgatatagcttccggaagctgggcagagcggcggtgcgcatccacacgatcagatcctcgttctggaagccattgttgtccggattctccgggtccaggtcggccagacccttctgccagaaaattggctttgagaagccctcaagggagacgttcaggttaccctctgggtttcggaacttgacgcgcttgtccgacggccaggcaatgcccgtcttcagcagcttgatctcggatccaccctgcaagagggtcagcgtgtctggaagatatcaatgttagttgcggtacagtcaaggtagtttctgtgccgcaccattgaacagcgagttggcaatggcaccgcagggcgcgatgggctttccggaatcgggatcataggcgaagggggcacagtctgtactgggcgtttgcgacaggtgacccagcagctgctcgtcgtcccgtgacttcacatagcgccgatggttctgatagtagttggtcagtccgtagtacatgtataccacaccctttaaaaaaggaagttaacgaaatacttaaatgagaatctctttctaaagtattataaggaatccaaatccactatcaatatcatcaatatcttttccaaacctgctaaaagcaatgttgataaatgccttgcagattataaaagcagcatatagcttttcatttgaactacttcactacctaaactaagagctgattaattgagctggacagctactgaagctctggatccctataactcacattgaagtccgagggcaggacgaagggcacctcgcaggggcacgtaacgccggggttggcctccagatactccgcacaggtggtatttccgcccgagcgcctgcacttggtgtagtcgatgatcagctcgttggcggtgttgctcaggtggagcaggaccacgccgatgggtatgaatagaactccgataacgaagaaggtgggcagtacggtgcgggcggtcaggacgggctgccaggcgggcaggcgctgttgcttgaaggccgaatctgtgggtggacaacatgggaaacgggcaaacgtgagcgacttggcatgacctcatggttaatgcagggacaccaggatgggccccgaaaatcgatttgccattggatattagtcattcccctccttatcacttgttacgcagacaagtgtgtgtgagtgtgttattgggggattgggatttggatggggcgactcgcatgaaactgggttttcacctgaaggtcgcttggacttcgccgctgcactctcctcattctccgcttgctgtgtggacatggtggcttatctggtttctcgctatgctcctcgaaaagctccttggtgtccaaacgctgcaagtgactccaattgaataaagtaaatacaataaaatttcgatgacagcacatgagtcatcgatatgtatcgatacctgcagtgatggtatatatcgatgaaattttatctatatttagcttttgctccatttggcttacctttgagaaatatgttaaactaaggtaagaggaaaatcatttgtctctccaaattcgtcgtaatacctccaaatgagcaatgctctagccatcccattcaactatcgatagtcagaccgcgaatagtatcgataaggcgtcgcatgcaaccgcgtggaggcggcgttttcgttgttgtgtcaaaacaataagcgagcagcagaatatcagcacacccatccagctagcaaagataaaggcgaaaaggctagaccagcagagattgtgattcactttgccacccaccagtgcagtacatacccgcgctcgctaacattcgatccacctaaaccacggtaacacagaaacgccaacacacatacacacagtacgcagcggcaatgaaaatcacagtgacgaccagcgatgacaaggtcttctgcttggacgtggcccaggatcttgagctggagaatctcaaggccctctgcgcgatggagatcggtgcggaagtgtcccaaatagcggtaattttcaacgggcgggagctttccagcgacaaacagacgctgcaacagtgcggagtcggcgacggcgacttcatcatgctggaacgacgcaggagcgccaatcgcccaggtgagagagagagagagttgaaattcggcgttggaatggaaacgagatgggaaagtggaaagagcggggtgaagagagggggagccattatccttatgtgggtcacgtttttccccgtggagggggggggatcttgagtgtgttttggaggatggtgaagggggttcattggtcagataacgcgaattcgcacaataataaaattaattattgtcctacatgatccataacacgtttatattcaaatg

SEQ ID NO: 21122 - DNA, 1140 bp, DROSOPHILA
tcacttgcagcgtttggacaccaaggagcttttcgaggagcatagcgagaaaccagataagccaccatgtccacacagcaagcggagaatgaggagagtgcagcggcgaagtccaagcgaccttcagattcggccttcaagcaacagcgcctgcccgcctggcagcccgtcctgaccgcccgcaccgtactgcccaccttcttcgttatcggagttctattcatacccatcggcgtggtcctgctccacctgagcaacaccgccaacgagctgatcatcgactacaccaagtgcaggcgctcgggcggaaataccacctgtgcggagtatctggaggccaaccccggcgttacgtgcccctgcgaggtgcccttcgtcctgccctcggacttcaatggtgtggtatacatgtactacggactgaccaactactatcagaaccatcggcgctatgtgaagtcacgggacgacgagcagctgctgggtcacctgtcgcaaacgcccagtacagactgtgcccccttcgcctatgatcccgattccggaaagcccatcgcgccctgcggtgccattgccaactcgctgttcaatgacacgctgaccctcttgcagggtggatccgagatcaagctgctgaagacgggcattgcctggccgtcggacaagcgcgtcaagttccgaaacccagagggtaacctgaacgtctcccttgagggcttctcaaagccaattttctggcagaagggtctggccgacctggacccggagaatccggacaacaatggcttccagaacgaggatctgatcgtgtggatgcgcaccgccgctctgcccagcttccggaagctatatcgccgtctcaaccaaacgaacaccaactatgccaacggcctgaagtctggcaattatacgcttaacattaagtataattatccggtggtgtcgttcgacggcacgaagcgaatgatactctccaccacatccgtgctcggtggcaagaacccgttcctgggcattgcgtacattgtggtgggtgccatttgcatcaccctgggcctggccctgctatttattcatatgcgatgcagtcgcagcaacatggagatgatcaacgtgaacccgcacacgcagtactcctag

SEQ ID NO: 21123 - protein, 357 aa, DROSOPHILA
MSTQQAENEESAAAKSKRPSDSAFKQQRLPAWQPVLTARTVLPTFFVIGVLFIPIGVVLLHLSNTANELIIDYTKCRRSGGNTTCAEYLEANPGVTCPCEVPFVLPSDFNGVVYMYYGLTNYYQNHRRYVKSRDDEQLLGHLSQTPSTDCAPFAYDPDSGKPIAPCGAIANSLFNDTLTLLQGGSEIKLLKTGIAWPSDKRVKFRNPEGNLNVSLEGFSKPIFWQKGLADLDPENPDNNGFQNEDLIVWMRTAALPSFRKLYRRLNQTNTNYANGLKSGNYTLNIKYNYPVVSFDGTKRMILSTTSVLGGKNPFLGIAYIVVGAICITLGLALLFIHMRCSRSNMEMINVNPHTQYS

SEQ ID NO: 21124 - DNA, 8418 bp, DROSOPHILA
caaaaagatgatgtcgttgccctccatggtgatcacgttctcgtgggagctcatcaggtgctggtatacgtccctcaacggtccctgccaggagcacttgtcatccggatacgggcagaagtacggacggcattcgcaatcctcctcgtgcttggtcttctctgcgtaagagagccgcgctctgcagccgaaatgcgaatgcttgcagggaaagatcagcttggaggccaccttctccattgccaggctgcggatgttggtcatgaacacccggcagacggggcaaatggtcaactttgagcggcaggtggagcagatgaggtggccacgcgggcactgcataattggcggcattatgtagccaaagcacaccgggcactcgagcaaagccattagaaaatcgtctcttgcaccactgcgtgttgtgtccaatggcccagtggccacaattcccgactgcacagccaccgagtccttccgcctagacggcaccagttctccggcagcggctgcgtccggggattgccgcttgaccaccacaacgtgcgtggtctcctccggcggcacgaccaacgctggtgccgattgacgacgagtcaacatttctccggatgccgttggagtgtcaatagtcctttgcggacttacccgctccggccacgataactgggggcgtgagttgcgaacagacatctgtgcttcagccaacaatcaatgcgcaagctattaatcctaagacctaacaaccaaacgattctgaagaatgagagtgccgatggttttactttttttttactttttctgaacactgaaattttgcttaaaagaattcgaaaatacaatctgtaccacaatacaacgaagctaaaagtataatgagctacttttacttcggagcctacttgctttaaatcattttaaaatcagcttaaaaatttatttttgaaattggcctaagtatcctagtaagataccaatccagctaaatctttaagatgcttcggcggtgcaccactaaaaacttgtgccatctattattgcaacgttttaaaacgcattagaagtaacccaagtatctcaaagataatccaaattaaacagataactgatttaaatcgacaagtttataaagtggcgtagctcttctttgtaattcagcttcccccagattaatttcaataattaacgagcattgtttacttttactaatcatgtttatttcagttttgtagttttgtgtctgtgtgagtgatctcatatggtagtggcgcggtaaatcggcgcattaaaagctaattacggtgcagatgcttaaaatcattaatttttcttccgttttcgattgggaaacgttggccgaatggaaatcaaaaccaaaacatgagccaaaccggggagatcgtcttaactagatagaaatttaaacattaacattgctttatatgtttggggggacttggggggaaatgggaaggggcaactgtctttttagcattgcgaaaaaaaatgttttcttttttttttagtgtgtttttgttattttgtgatggtttggcatgaacaaaattgcgggtcgcagtttcgtttaggctgcaactttcaaacaactctcgagttattacagattatcgctatcaaatattacttttctttgtgggttattaggtttgttaatttcgttaaactgttcgttttacttattaccatttacaagtattgtataaaataatttacattaactaaactagactttgcagtacatgttcgagtggatgagtgacctcctcgcctttcttgctgttctcctcgttttggtgagtgggtctgtgtgttcctagcgttcactgtagtaggtggtgggcacgtgggcacgcgcaggcagctctgctccaggtgtgtggaccttacgaactaaattaaactaaagcagaaccccatgaactaacaaaacgggtaacactgaaactttgaaatatatagtattgtgtgtgcggtaactgaaaaatcatgtcctagaactagagtaccaatcgaaccgattaaacatacaaacatacaggtcagccacgattttcgcattcgacaggaaagtgtgttatacaaatctgcgaaatctcaccaaaaatatttggcatttttctgcaaacgagtgagatttacacacagtcatgtgcaaactaaaaatgaaaatacgaattttaaacgcggttttacaggtttaacgaacgtgtgcaataaacactgaacatcacttagcaattgctttaatacgctttccatttcgctttggaaaattgtgagtgtcttagcttaaaaatcaaagaaaactgcgatatcgtgccgaatgtgataatcgaagcagcctgatatttccatagatatatatacatatgcatgtaagtggctcttagaatagagaatcatttttataaaacaactctgcaaaactctttcttcttaatctccagactcacaatctgtccacgagttagacgcctgatgcgaacagagggctataaactatatatgtatttgtatcggaatagtaaacacaagaaatgaaagaacccgacgaattgacagtgcgtttagaccagagatatggtcacgttaatgcccaggttgccattgtcggcgaacaattgcgcaatcgacgtgtcgaacaccaggcagtccgagttgtgaattgcggaagcgacgccctcgtggatcgaacgcggcattgcctcccaggtgagccggcgtcggtttccgttcaactccaggcgatagacaaagttctccgcttccttgcgcgacccgatcagctgaacgatggcaaagaactgctggtgtccgtcgtacttctcctgcttctccagcacgagcataaaatggtggccgaagcaggactgcatcattacccaatcgacggcgccgggcaggttgatgtcggtggccaggaacacgatgtcctcgccctgcagcgttgtgatgctcttgtgcgacatcatcagatgctgcatgactaggtcaagcgggccctgccacttacagctggcgcccgggcacggacacaggtagggccggcactcgcacgtctcctcgtgttctgtcttttccgtgtaaaccagcgaggcggtgcatccgtagccggagtgcttgcacgggaacttgacgttcgaggcaaccttctccatcgccaggttgcggatattcgccagcggaccgcggcaggtggggcagcaggtgagcttggagcgacaggacacgcacaccaggtgcccgctggagcactgcaggatcggcggtagcacatagtcaaagcacacggggcattcaaacagcgaggtcaagtcggcggacatgcccgcatcaccgccaccggcggacgacagcgaggagctggacgacgaggatgtgttggccgaggacgtgttgccggcactggaggatccggtcgaggtgctcgtgttggtggccactcccgtggcaccggctcctgctgctgctgctgtcggttcgcggcgcttcgggttgattttattggacattggaagggttctcgcaacggcacgaatgtgtctacaattcttctgggtccctgcaattctcgccaggttcaggttcttcgccctcccggtggcttcggcaatggctttcttgtgcttctgtctaaaatgagatacaatcacaggtcagtgagtaatgcggtcaatttagtcatagcatatgtataatttttttttcttttttttgtaattttgttcgttcagtgataagaaactccaaaaaacaataacctacaaaaccatacagatatcttaacaaaaatagtttgtttcgattaggcttagttaatccaaaaataacatatatcaaccaacaaaaaaaatcacagtataacacactgcataaatgctggtttaaatttgaacatatgttatgagctttctatcgattttgcggcttaagttcggagcatactattgatttgaatgttcattccaaactattgtgcccactgggacatgagtaataggcaaaaatatttttccatgaagtaatagaaatgaaatgaatgcaaactgtgtaagcaaaatctactcgattgctataaaaaatgttgcccagcaaaactactatccatttgtaataatttaatttgagccttattaatttaaaacttatttcgcgtaatcactactactaggtagttcgtttttcgtgccgcccaatagaaaagccaaagcgatttatcattcctggccttaaccttgccgtggattcccaattgttgtaattaccgaaaaaagaaaacacacgcatttgcgtgtatgggaattgcatttaagcaattacttaaagcggaacgtatcgaaccggagttggtctgcgaaaagcaaagacacagcccgaggtcgccgtcacgtctccgatcgaaatgaaggcccgattccgattccaactccgagcccaagcccaaaagcctcttggcggcacgtgtggaacggcgcaaatatgttggctcttatcaggcggagctgacggagccgacgctgatggacggccattagggacgtcgacccatggcgggattgtgcgatggtgggtgtcgtgctggttgtaatgggtgtggttcggtttcacgggtttgtccactttggacagaatgggcacacattagtgtgaacaatatgctgtgggtgctttggtgcgtttataagataaatatcaatataataatataaagttttcgtaattgtttagctttgatgtacaaacaaaacttgttctctttcctaacgggaatatatttgctatatgattgctatcaaaattttgtgtgaaaggagttcagtaatattgtttatattcgaaaacaaactcaaacctaaaaaataaataatatgtttccttattaacccaaaacaaaaacacatgaaacgcatgaacatacaaatgtttaatactttaccctatatattggaaaaattatttgaacatttgccattatgaaattcgtaccatcgcccgcataaacgtaatatcgtaatgaagagtgcgtaacgtaacaaatgcaacgaggatgtgtagggggtgggtggcggtaggggatggcagccgcggggagggaaactcacacacttacaacacagacacagatcgcacacacataattaacagttcgtttacgttgcgtaccgttggaaacgttcatacggggtaaaaatggtaattgccacaaaagtcatagccatgaatataattaacttagcttctgctttcatgagttgcaaaatggtaaaatagaaaacgtaagttgcggagcaaagcgaaatgcgactatctttctttaatttatgccgccattaagtgcgactaggctgctgtttaaacagcaacaacaactgcgaaatacataatcgttgatatgtaaacttacatggcaggctgcctccaagaaattgtgccgaggtattggtgccccgctgcgttggtgtgtgtgtgtatgtgtatattttattttcttgttatttttttgtttccttttttatcagtcagtcagcctttacggccatgcacacacacacacgcatacagccagcatgtgtgtgtatatatcctaggtgcaagttccgttttttacgttgcaatttgttatttttttaaccgcatatatatatataaccaatgcaggtggttttgctactgcacacgcacactgggaaaatggaaaaactgttttgattgcttttcgccttttcgttcaccttgcaccgaaccgaaactcgaaattcaggcgtgagctaatttcatttggctttttatctaattttctttaacgcgacccgcacacatacacatttattcatatttagctttactagttattttcgccttttctgcctctgtgttgctgctgctgctgatgttgtgttgttgttgttgctgcacaaaaataaaccatttgcatttacacacaggcagcgaaatgggtttttttcgtgtgtctcactttttctatattgcgttctttgatcgtcgcagtcggcgtttattgcacttgcccttgcgcggtgtggaattcagtctttttcggcattctccatgtactttgggcgtgatgtctgcctttagctggttaattaattaatttactttactatactgagtttcttctaatgtccgcgtcggttgcagagatggaaccccaattgtcgtctattcgattccagatagtcgattacacgcaatcggcaacatcgcagtgcctcctggtagctatcaattgctgtcatcgattacttaacagccttgccacgtttgtcaaattaatttaataacaggaaaacatcagttttgaaataatacaaatcgaatcaggcgcataatttttaaaggatcaaagttaataatgtagtctgttactcttattgacaactaaagcctaatttttaaaataattcattaataaatacttttttatgatttatagtatttccaatcaaataatataggcaatacaaaaaattaaataaaaatattgattggtgataccttgaccttgtgtcacatcattggcgggaatgtttaagaacttagtttggatcgggaaattcgaagaaacaaatttacgaaagagtaaaattgcgttttacgaatatgaagtaaataaatatcctaataccaaaaatcccattaatcttcttcacttttatgcatttccagagggctacctcacgtcctgctccttcgactatctttcggacaactttgacacccggttgtttgtgggcaccatcttctttttcagcttcgtgtgtcccacgctgatgatcctttactactactcgcagatcgtgggccatgtcttcagccacgaaaaggccctacgggagcaggccaagaaaatgaacgtggagtcgctgcgctccaatgtggacaagagcaaggagacggcggagatacggattgcgaaggcggctatcaccatctgcttcctgttcttcgtgtcgtggacgccctacggcgtaatgtcgctgatcggggcattcggggataagagtctgcttacaccaggagccacgatgatcccggcctgcacctgcaaactggtggcgtgcatagacccattcgtctatgccataagtcaccccagataccgcttggagctgcagaagcgctgtccctggctgggagtcaacgaaaagtctggggagatctcttcggcgcagtccacgaccacccaggagcagcaacagactaccgctgcatagaaccaaggacaactctactctaagacaactgaccatgtaacatgaaagccaaggaaaaagtataaaatgccgacaacgaaactgtataacattaattttataatttgtagtgtgacattcttgagtttgaaataaataaatagtaacttattgcaaacgaagtagaaaatgagtcccgttttttatttgaaattcggttctttgatgtcattattttgttactatttctacacttacacttaaaaattaaataacaaattcaactcaaatcctaaacacatttacacagttatttggagcctcttcattcctaataaaatcataaaatcgagtttttttttcaaaatagtcagttatgtatttattcggtttttgggtaatatctttaagatacccattgtgaaatctgttggcatttgttaaacaaaatgaaggtgacccaccaggaaataaattccatgaccctggctaatcctcagttgcacatcagggaatgcagtcgaatgaccgctcggtaatcgttgtgcgacagcagaccacgctgcgatcgctgtagcactcgtttcagccgctctacggtctctgtgttggaggtcatcttgaaaagatcatcgaggtactttagcgattcgcgtgaccagaacatggacggtttgttggcgtccttgttgatgctgccaggttgattgtgatccatttcactcaacagacggtcacactccggattgagagtatggcgcagctgaagatcggatcgtgatcgttgctggagattattgtagggcatctggtcgatctgtggacgtcgtagattctgctgatattggttgttgtcttgctgctgatgctgctgctgttgttgcatacgttgctgttgcacacgttgttgctggtgttgctgttgtagactttgctgctgttgcttttgctgctgctgcaagcgttgctgttggttttgatgttgctgctgcagacgttgctgttgctgttgctgctgccgttgttgattttgtgtttgctgatccagggcttgacgttgcttcttctttgacattttaggaggtggtggtggagccatgtcctgccgaactggtgggagaggcgttggcgatggtggccccttactaggcgattgcggctgactctgcgttttcttttg

SEQ ID NO: 21125 - DNA, 4647 bp, DROSOPHILA
cgtttgcaataagttactatttatttatttcaaactcaagaatgtcacactacaaattataaaattaatgttatacagtttcgttgtcggcattttatactttttccttggctttcatgttacatggtcagttgtcttagagtagagttgtccttggttctatgcagcggtagtctgttgctgctcctgggtggtcgtggactgcgccgaagagatctccccagacttttcgttgactcccagccagggacagcgcttctgcagctccaagcggtatctggggtgacttatggcatagacgaatgggtctatgcacgccaccagtttgcaggtgcaggccgggatcatcgtggctcctggtgtaagcagactcttatccccgaatgccccgatcagcgacattacgccgtagggcgtccacgacacgaagaacaggaagcagatggtgatagccgccttcgcaatccgtatctccgccgtctccttgctcttgtccacattggagcgcagcgactccacgttcattttcttggcctgctcccgtagggccttttcgtggctgaagacatggcccacgatctgcgagtagtagtaaaggatcatcagcgtgggacacacgaagctgaaaaagaagatggtgcccacaaacaaccgggtgtcaaagttgtccgaaagatagtcgaaggagcaggacgtgaggtagccctctggaaatgcataaaagtgaagaagattaatgggatttttggtattaggatatttatttacttcatattcgtaaaacgcaattttactctttcgtaaatttgtttcttcgaatttcccgatccaaactaagttcttaaacattcccgccaatgatgtgacacaaggtcaaggtatcaccaatcaatatttttatttaattttttgtattgcctatattatttgattggaaatactataaatcataaaaaagtatttattaatgaattattttaaaaattaggctttagttgtcaataagagtaacagactacattattaactttgatcctttaaaaattatgcgcctgattcgatttgtattatttcaaaactgatgttttcctgttattaaattaatttgacaaacgtggcaaggctgttaagtaatcgatgacagcaattgatagctaccaggaggcactgcgatgttgccgattgcgtgtaatcgactatctggaatcgaatagacgacaattggggttccatctctgcaaccgacgcggacattagaagaaactcagtatagtaaagtaaattaattaattaaccagctaaaggcagacatcacgcccaaagtacatggagaatgccgaaaaagactgaattccacaccgcgcaagggcaagtgcaataaacgccgactgcgacgatcaaagaacgcaatatagaaaaagtgagacacacgaaaaaaacccatttcgctgcctgtgtgtaaatgcaaatggtttatttttgtgcagcaacaacaacaacacaacatcagcagcagcagcaacacagaggcagaaaaggcgaaaataactagtaaagctaaatatgaataaatgtgtatgtgtgcgggtcgcgttaaagaaaattagataaaaagccaaatgaaattagctcacgcctgaatttcgagtttcggttcggtgcaaggtgaacgaaaaggcgaaaagcaatcaaaacagtttttccattttcccagtgtgcgtgtgcagtagcaaaaccacctgcattggttatatatatatatgcggttaaaaaaataacaaattgcaacgtaaaaaacggaacttgcacctaggatatatacacacacatgctggctgtatgcgtgtgtgtgtgtgcatggccgtaaaggctgactgactgataaaaaaggaaacaaaaaaataacaagaaaataaaatatacacatacacacacacaccaacgcagcggggcaccaatacctcggcacaatttcttggaggcagcctgccatacagaagcacaagaaagccattgccgaagccaccgggagggcgaagaacctgaacctggcgagaattgcagggacccagaagaattgtagacacattcgtgccgttgcgagaacccttccaatgtccaataaaatcaacccgaagcgccgcgaaccgacagcagcagcagcaggagccggtgccacgggagtggccaccaacacgagcacctcgaccggatcctccagtgccggcaacacgtcctcggccaacacatcctcgtcgtccagctcctcgctgtcgtccgccggtggcggtgatgcgggcatgtccgccgacttgacctcgctgtttgaatgccccgtgtgctttgactatgtgctaccgccgatcctgcagtgctccagcgggcacctggtgtgcgtgtcctgtcgctccaagctcacctgctgccccacctgccgcggtccgctggcgaatatccgcaacctggcgatggagaaggttgcctcgaacgtcaagttcccgtgcaagcactccggctacggatgcaccgcctcgctggtttacacggaaaagacagaacacgaggagacgtgcgagtgccggccctacctgtgtccgtgcccgggcgccagctgtaagtggcagggcccgcttgacctagtcatgcagcatctgatgatgtcgcacaagagcatcacaacgctgcagggcgaggacatcgtgttcctggccaccgacatcaacctgcccggcgccgtcgattgggtaatgatgcagtcctgcttcggccaccattttatgctcgtgctggagaagcaggagaagtacgacggacaccagcagttctttgccatcgttcagctgatcgggtcgcgcaaggaagcggagaactttgtctatcgcctggagttgaacggaaaccgacgccggctcacctgggaggcaatgccgcgttcgatccacgagggcgtcgcttccgcaattcacaactcggactgcctggtgttcgacacgtcgattgcgcaattgttcgccgacaatggcaacctgggcattaacgtgaccatatctctggtctaaacgcactgtcaattcgtcgggttctttcatttcttgtgtttactattccgatacaaatacatatatagtttatagccctctgttcgcatcaggcgtctaactcgtggacagattgtgagtctggagattaagaagaaagagttttgcagagttgttttataaaaatgattctctattctaagagccacttacatgcatatgtatatatatctatggaaatatcaggctgcttcgattatcacattcggcacgatatcgcagttttctttgatttttaagctaagacactcacaattttccaaagcgaaatggaaagcgtattaaagcaattgctaagtgatgttcagtgtttattgcacacgttcgttaaacctgtaaaaccgcgtttaaaattcgtattttcatttttagtttgcacatgactgtgtgtaaatctcactcgtttgcagaaaaatgccaaatatttttggtgagatttcgcagatttgtataacacactttcctgtcgaatgcgaaaatcgtggctgacctgtatgtttgtatgtttaatcggttcgattggtactctagttctaggacatgatttttcagttaccgcacacacaatactatatatttcaaagtttcagtgttacccgttttgttagttcatggggttctgctttagtttaatttagttcgtaaggtccacacacctggagcagagctgcctgcgcgtgcccacgtgcccaccacctactacagtgaacgctaggaacacacagacccactcaccaaaacgaggagaacagcaagaaaggcgaggaggtcactcatccactcgaacatgtactgcaaagtctagtttagttaatgtaaattattttatacaatacttgtaaatggtaataagtaaaacgaacagtttaacgaaattaacaaacctaataacccacaaagaaaagtaatatttgatagcgataatctgtaataactcgagagttgtttgaaagttgcagcctaaacgaaactgcgacccgcaattttgttcatgccaaaccatcacaaaataacaaaaacacactaaaaaaaaaagaaaacattttttttcgcaatgctaaaaagacagttgccccttcccatttccccccaagtccccccaaacatataaagcaatgttaatgtttaaatttctatctagttaagacgatctccccggtttggctcatgttttggttttgatttccattcggccaacgtttcccaatcgaaaacggaagaaaaattaatgattttaagcatctgcaccgtaattagcttttaatgcgccgatttaccgcgccactaccatatgagatcactcacacagacacaaaactacaaaactgaaataaacatgattagtaaaagtaaacaatgctcgttaattattgaaattaatctgggggaagctgaattacaaagaagagctacgccactttataaacttgtcgatttaaatcagttatctgtttaatttggattatctttgagatacttgggttacttctaatgcgttttaaaacgttgcaataatagatggcacaagtttttagtggtgcaccgccga

SEQ ID NO: 21126 - protein, 314 aa, DROSOPHILA
MSNKINPKRREPTAAAAGAGATGVATNTSTSTGSSSAGNTSSANTSSSSSSSLSSAGGGDAGMSADLTSLFECPVCFDYVLPPILQCSSGHLVCVSCRSKLTCCPTCRGPLANIRNLAMEKVASNVKFPCKHSGYGCTASLVYTEKTEHEETCECRPYLCPCPGASCKWQGPLDLVMQHLMMSHKSITTLQGEDIVFLATDINLPGAVDWVMMQSCFGHHFMLVLEKQEKYDGHQQFFAIVQLIGSRKEAENFVYRLELNGNRRRLTWEAMPRSIHEGVASAIHNSDCLVFDTSIAQLFADNGNLGINVTISLV

SEQ ID NO: 21127 - DNA, 4916 bp, DROSOPHILA
gtcaatcagctctcggcggacgtgacctatcaccagaatcagctaaacgacaatatcctaaagctggaggagctgatctttgagaacgagcggctcaacagggagaagttctttcagatcgaggagtttctgcagcagatcaatgaggacatcaaaacaaagctgggcaacagtgactatgtgacgtcaaagcaggccacattggactatgaggtgaagaatgtgaagaacattgtgtgcgaaacggaggaacgttgcgataaattggatcgagcacttcaccagaccatgcagaatatatcggatttggagacccaaatggccatgcagcagcggattgccagtgtccagaatataaggggtacatattgttggttcaatatagtaatttaaatatataatatctggtcgtacaggacacttgatttggcgcatcaaggattactcgaaaaaactggaagagtccaagcagtacgacaccatcctccatagcgccatgttctccaataaagcctttggctatgctctacgggtgagttgaggttggatcttggttggatatgccatttatatatgtataccccattactagctggatatatacttgaatggcaagggcacctggaagggcaggaacatgatcgcctgcttgaacgttctatccggagagtacgatccccttctggcctggccatgccgccttcaggccgagatcatcatccgggatcagtgcacgaatgtggcagatgccgaggattatgtgaagaccatctttgtgcgcaagaagagcgatgattttatccaaagcaaccagtacttccatataccacacaaggtaatcaccagtcgcaactatcttcgcaacgattccatgttcatcgaggttcgagttctaaaataaaacccatgcagcatcgctatcccacccaccaggagcgataagaaaaaaaaaatccaattgcggattgtcacatacataaaacataatttattccattgagagcgaactggaagttaaaaacccgcttacaaacacgagtatgtgtacatatatagtgtataagtgcatacgaatcgattcatcgtttcaatatgcgtatattgtagttttaaatgtcattgcagttttaaatgctttttttcaaattaggcaatagtcacattgaggcactgtcgagacgaagtcggtagttagaaagcatagcttttattgcaacatttccctggtcactttgtcaagatataagcaactctttcattttttggtttttcatttcgagcaaattaacaagcgatttttgagaggaacttccatattatttgtctttacgaacgcatttaaatacaaaggtcttttaataaaatacaacttcaacacttgtcaactgtcggttcccatgttcatttctttgaaagaggtatcaaatgtctgatcccgttcaggtattatttgtgtgcacttatagtctacgttgtggatcataattgtctggcttcgttggcgtgttcttgtatgttgtatgcatttaaatgaacgaatacatagaagagataatacatattcgaataattgatttcacgtcggatttggtttgaataatacatatatatgtatatgcggagattcttaagaggagcgctgttcacccaccagggcataaagggcgtgcttgtagtggcccgaagtatcgccctgcaagtaggattttatatgattatagaatatagatatagatagatatatatatcttaccttgatccagctcttgagggacttgccgtacagacgttcgaacgctaccttaatgtccgtcatatcaatctgaaaaacgttgcaacattttagggttgaatgatattatatatagatgtacttacctcgctgcgcgtgatgatcacacggatcaactgggtgtcattggtgccaattccggccatcgccttgtgcaggcgcgaagcgaagtattcggccttgttggtgacgcacctgtagatggcaatcaggccctccatcacatcgccggagaactccttcttgatcgccttctccagcgagtggccagtcatgccctcgtactcttggaatatctgcggttaggtatgattatgttggagtttcaattgtacacacaagtactcaagtatcaagcagcataccagtttcaattgctgatagttcctctggcagaggatcatgttgaacatgctctcatcggtgccgacgcgcagttcgccggctttcagtagctccctagcatcgttcttggccgccacgggatccacgcgaccactctcatcccgcgccgccgtgcacaaggaggtaagcagccgcttaaagttgcccgacgtctccgactttagttcagactccaaatgggcgccgtacactaatatacacgattggcagaaacaaaatccatattagaacaaagagaaaaggctaagccaaatagattacgacctacatcgtaagtactggtttttgatcgtattgatctccatgttggacagcgtgcagaggatctcgatgaggacctcctcgtcggtgcccaggccagccatggcatcgtttagctcggcgcagtagtagtccacgatgggacgcagcaggccgacgaggagtttctcaaagttgccgctcgtctccgacttgatgtcctcgatgaggtccttgccgaagtgcgtcttgaactggcgctggatctcctggcgctgctcgttggatcgccgacagatgatgttaatcagagcgtcctcatctgttccaaagcccttcatggccttgcgcaagtcgtgagcatccttgacggcatcgaagtttgcggcaggcaccaccgtgggagttccctgaaaagaacagtcaaaacagtcactgaaaacgagctcagatctgatgggcatgatgaacatgtattgttttagacccgccctggaacaaattcgactgaggatggggaagtgcggttagtgtggacgtgagtccccaaatttgatgaccaacctctctgtgagctgggagtgaccgatgcgcgtgcccctgaccattcccatgcccctgtccatgcccatagccctgcccatatccatgcccatattcatgtccttgcccatgtccgtgcccatgtccttgcccatgtccatgtccttgtccatgtccttgtccgtttccgtagccatagcccgcatcatatccggctgtcatggccggtgtgtatccacgatccgcgggatagggactgttcgacaccgatggctgctgataatgattgtgcgctggaggagcgtattgtgccgggtaaggattcgaggtgggatatggtggataggatggggcggcggacgggtacggtgccgacattggtggataaggagctggagctccgcctggatattgctgatgctgctgaggatgcatttgggacgatggctgtgagtgtgggtgtggctgggagggtggtgggtatggcgagttttgctgcatcggtggcacccaaccagctccaaagggcgcccgtggcggctcgtggtggttagtggaggtaggggggtgcgatggcattccagaaccctataaaagtcagaaaatgtacaattcaagttgactccatggcgctgaattaaacacagagctcacaagaatgacatctatctcttagaaaaatgaatcagactaaacgaaagaactcacccgaataaattattatagttttatacccaaaaaaatatgttataccaaacttatttataaaatatattgtgaatatgttatgatatttaagaaccaaggcacttattaatgctgatacttttataactaaaatctacaggatgtgcattcaaaacttacgaagggatacattttgagggaggttctatggagattctgtggataatttccggtgattgagattcagtactggaaaagagcaaaataggaattatgcgtttcgttaaattgaaaatattcacacacatgcacaagtacaatgtacatatagttttaatgtttaatcagctgatctaacatcatgttaaagattggtgctcaaatagaaggtacaagcgactttgaaccgaaacattagattacactacgcaacaaaacgtgctaatgtacaaatcaaactttaagttataaaataggtctaacttgtatttgagtatacatacattggaaaccaatcaaattggagtggggattgcgctattagataagaacactattacagggtatgccttataatttaagcaattaagagtaatatgaatttgcgtcatatatgggataaaggcatccggttttgcttagagagggaacttcccaaaaaaataaatcaactgatatggatatatgaaatatgcaaaaacattaaaataaaataattaatttcggcgatatagtaaactgtcccaagagaccttataatggttccactgaaatgtcgccaatgtagactttcgccacatgtacacatgtatgctacacccatttgtggcccacaaggtacttcatatctacatatatatatatatatatacatatatatacatatatataaacgttgtgttttcccttttaccttatattatatatgcgcaatatagctgcgggtcatgcgtgttacttgtaatttataattttttgcttcagacagagggacgcctcctgacttaatgggtatggaaacaaatgtgaggcctgaatataatatattaaactatttgcacaaaggctttgggtttgttttccaattgtttcgtcatttgcaaagcctttcttgaaaacttttcaattgataaacataaacaactgcatgtacggtctgttctgtcccactctttatacatttttaaccaaaaaattaagttaaattcgttttggaaaagacttcaatggcacctcgcagcgcaaataa

SEQ ID NO: 21128 - DNA, 1653 bp, DROSOPHILA
tactgaatctcaatcaccggaaattatccacagaatctccatagaacctccctcaaaatgtatcccttcggaactcccacggtggtgcctgccgcaaacttcgatgccgtcaaggatgctcacgacttgcgcaaggccatgaagggctttggaacagatgaggacgctctgattaacatcatctgtcggcgatccaacgagcagcgccaggagatccagcgccagttcaagacgcacttcggcaaggacctcatcgaggacatcaagtcggagacgagcggcaactttgagaaactcctcgtcggcctgctgcgtcccatcgtggactactactgcgccgagctaaacgatgccatggctggcctgggcaccgacgaggaggtcctcatcgagatcctctgcacgctgtccaacatggagatcaatacgatcaaaaaccagtacttacgattgtacggcgcccatttggagtctgaactaaagtcggagacgtcgggcaactttaagcggctgcttacctccttgtgcacggcggcgcgggatgagagtggtcgcgtggatcccgtggcggccaagaacgatgctagggagctactgaaagccggcgaactgcgcgtcggcaccgatgagagcatgttcaacatgatcctctgccagaggaactatcagcaattgaaactgatattccaagagtacgagggcatgactggccactcgctggagaaggcgatcaagaaggagttctccggcgatgtgatggagggcctgattgccatctacaggtgcgtcaccaacaaggccgaatacttcgcttcgcgcctgcacaaggcgatggccggaattggcaccaatgacacccagttgatccgtgtgatcatcacgcgcagcgagattgatatgacggacattaaggtagcgttcgaacgtctgtacggcaagtccctcaagagctggatcaagggcgatacttcgggccactacaagcacgccctttatgccctggtgggtgaacagcgctcctcttaagaatctccgcatatacatatatatgtattattcaaaccaaatccgacgtgaaatcaattattcgaatatgtattatctcttctatgtattcgttcatttaaatgcatacaacatacaagaacacgccaacgaagccagacaattatgatccacaacgtagactataagtgcacacaaataatacctgaacgggatcagacatttgatacctctttcaaagaaatgaacatgggaaccgacagttgacaagtgttgaagttgtattttattaaaagacctttgtatttaaatgcgttcgtaaagacaaataatatggaagttcctctcaaaaatcgcttgttaatttgctcgaaatgaaaaaccaaaaaatgaaagagttgcttatatcttgacaaagtgaccagggaaatgttgcaataaaagctatgctttctaactaccgacttcgtctcgacagtgcctcaatgtgactattgcctaatttgaaaaaaagcatttaaaactgcaatgacatttaaaactacaatatacgcatattgaaacgatgaatcgattcgtatgcacttatacactatatatgtacacatactcgtgtttgtaagcgggtttttaacttccagttcgctc

SEQ ID NO: 21129 - protein, 322 aa, DROSOPHILA
MYPFGTPTVVPAANFDAVKDAHDLRKAMKGFGTDEDALINIICRRSNEQRQEIQRQFKTHFGKDLIEDIKSETSGNFEKLLVGLLRPIVDYYCAELNDAMAGLGTDEEVLIEILCTLSNMEINTIKNQYLRLYGAHLESELKSETSGNFKRLLTSLCTAARDESGRVDPVAAKNDARELLKAGELRVGTDESMFNMILCQRNYQQLKLIFQEYEGMTGHSLEKAIKKEFSGDVMEGLIAIYRCVTNKAEYFASRLHKAMAGIGTNDTQLIRVIITRSEIDMTDIKVAFERLYGKSLKSWIKGDTSGHYKHALYALVGEQRSS

SEQ ID NO: 21130 - DNA, 2703 bp, DROSOPHILA
tggaacttgtagacgatgttcattttgcgcagatcgcagaccagcacattacccatagccgttcccacagcgaacaaattgtcattgtagggcgagcagcgcaccatagtgagttggtgatttcggggcgagatgaaagtggagcgacggcagtaggtgttggatgccacacaatagatgaccagatcactggcgtccatggatagaatgttaccattggccaggtagctcatcagcacggagttggtagtgtggtgcacgacgcgcacatcccgcgcctcgtgctggtgctgatgggccttgtgcccgatgacggcttcgcccaatgcgcagtcccacacctgaacgcttagatcgtcgcccacaatggcgaatggcttggtcggcccaccgttgcccaagccccacatgggactaacgtccagggccagtatgttgatccgcgtcgacatggtcaccacttggggctgctctccgtttgccggcggcgcggatatgtagttgatgcagcgaatgccggcgtacagcaaaccgccgtcgggagcagcggccgccaaagatacgttgcccggcggtgtgggcacattgtggtacatcacctgcgagttcatggcgaacaataaggacttggcatctgcaggatgaaggaatatttcccgctaacagttggcgtcgttcggggaaaaaacttctgtaaagctgttagtgttaggcagcttcttaaactttgccagcgatgccacctggaaggcacggaacttaacagttaattaaaattgataataattaaaatataaatttgttattttcgaacttgtatttataacaaaaatctggatctgctttatataaataatttaaaaatataactaagtaccttatgctacaaagcctaaaatctagggatcacgttagctttagtatatttaaattacccgctatttaccacagacgttttttgtctatctgccaactctatgcaatccatttcctgtgaatggcaaccagcaggtagagaggaagaagaagacacacaataacaacgcaaaaaaaaaaggtagaaaaatctagcaaattctaaaagtctccgtaaaaataaaatacaatcggccacaatggaagcaaagcgcgagagaaagtcatccctggtacgtaccttgtagatatatgcgaagaagaaagaaaaccctgatagaagtgcgattttcaggcaccactttcgccatgtccaattccggatattaccgatgacgatttggtgagcatttcggtaagggatcttaatcggaccctcaagatgcgtggcctgaaccgcgaggagatcgttcggatgaagcagcgccggagaaccttaaagaatcgcggatacgcagccagttgccgcatcaagagaatcgaacagaaggacgagctggagactaagaagtcgtacgagtggacggaactggagcagatgcacgaggacaacgagcaggtgcgccgcgaggtgtccaactggaagaacaagtacaaggcgctgctgcagttcgccatccagaacgagatacccattcccagcgagctggagggctgctgaacgattgcccagtcacattcctgtttctgtcaaaattacaataaacccaaaacggaaaaaaacacctgtaactaaagtacaatagctggcaaatatccttcctcaataaacgtaatctgctcaagaacctctgcatcgcctttattgaagcaccctgtatttagcataaacaaaacccgtgtcggcgctgcgctgcgaatgtcataagatccggagcgcacaaggaactcggcaaaaggctggtggttatgtattcatctcgatagctccgctctccaaccagttcatccatggcatttcggttctttggcaagtccttgctgtacgctctgccacttggcgtcactttcctggactgcgttggttatgtggccagggtggatggtgagtcgtccggagtttattcgctccatgttagtgtgcgctaattaatccacaactttttgcaggcatctccatgcagcccgctctcaatcccgtgccggatgaaaaggactatgtgttcctgctgcgctggggcacccacaacagtcaggtggagcgcggcgacataatatcgctcatttcacccaaggatcccgcccagaagattatcaagcgcgtggtggggctgcagggcgacgtcgtgtccacgctgggctacaagcacgagatcgttcgcgtacccgaaggacattgttgggtggagggcgatcacacaggccactccatggacagcaatacctttggacccgtcgccctgggcctgatgtccgcgcgggcagtggccatcgtgtggccaccggaacgctggcgaatactggagaacgaactgccgcggcgacggagacccatacaggcctccaagaactccagcaactactacaactagactgaccaactggcggagagcctgcgcccaagatagttccaattgtgtacatactgaaccgtatattttataaacaatttgttgtgttcccgcatgcaaagcaaagtaggatgttccaaagtaaaaattaaagttaaagccaaaggaatagctcttatactacatcatttttagctcccgaatgccgaactcctccatgaggctgagtgtcggcttgagagccacgccggcgcgcactatttcatagtagccagga

SEQ ID NO: 21131 - DNA, 641 bp, DROSOPHILA
gcaaccagcaggtagagaggaagaagaagacacacaataacaacgcaaaaaaaaaaggtagaaaaatctagcaaattctaaaagtctccgtaaaaataaaatacaatcggccacaatggaagcaaagcgcgagagaaagtcatccctggcaccactttcgccatgtccaattccggatattaccgatgacgatttggtgagcatttcggtaagggatcttaatcggaccctcaagatgcgtggcctgaaccgcgaggagatcgttcggatgaagcagcgccggagaaccttaaagaatcgcggatacgcagccagttgccgcatcaagagaatcgaacagaaggacgagctggagactaagaagtcgtacgagtggacggaactggagcagatgcacgaggacaacgagcaggtgcgccgcgaggtgtccaactggaagaacaagtacaaggcgctgctgcagttcgccatccagaacgagatacccattcccagcgagctggagggctgctgaacgattgcccagtcacattcctgtttctgtcaaaattacaataaacccaaaacggaaaaaaacacctgtaactaaagtacaatagctggcaaatatccttcctcaataaacgtaatctgctcaagaa

SEQ ID NO: 21132 - protein, 132 aa, DROSOPHILA
MEAKRERKSSLAPLSPCPIPDITDDDLVSISVRDLNRTLKMRGLNREEIVRMKQRRRTLKNRGYAASCRIKRIEQKDELETKKSYEWTELEQMHEDNEQVRREVSNWKNKYKALLQFAIQNEIPIPSELEGC

SEQ ID NO: 21133 - DNA, 3734 bp, DROSOPHILA
aagaagaagtagcagaagcaaagccggccggccaattaattgatttattctattcgattttccactatcttttactgcatttttttttatttgccccttcctctccaattcgaccttcagcgtactgcaattctaattggaattcaatttcaataagaagaagagcgaagaagcaacagtttgttgaaggagccgcacgcacacacacgcacatcagcgaaggcgcacgcacacatgcacacatttaagcgcggctcacacgcacaccggttaaacttgttatcggccgcatgcaagaacccaaaaactacagctacaacaacacaaaactctaggccaaaaacaagttctggaatatcagcaacaacaacaccgcactcgagtgttttattttgaaacacggctttttctcgctgttagtttattgcatttttgtggtaggtaatttagctaggagtaaaaagcaatgcacacacttaacactcacacacacaaagacagtcactcactcgttgccgcgcaaactaaaaacaaacgaaagtaaatcaacgtaaaaacgaaacgaacgcgatccgccgacgcgcttttggcttcagctttggctttcaaaacactgcgaaaaatacgaatgttgcggctgttggccagtgtgaacgtagctggctaaagtagaaataccaaaagtaccaggcacaactgaaaaataccaaagtgaaacgggatttcgaaagacgactgtgttaataccctttaaaagtaaaagcttatagatattcttaattatagatgccatattctatgaaacaaaaaatatgttacgctcctatttatttcaattaaaaaatataaaggatttaaaaaaaaaatggaacatttatctgtgagaaagcattgaaaccaactaaagaaaaacatttattttttactaataaaatgaacgcttggcgtgcatcaattcgtttattgtgattggcactggtaaacaagtgattccgcgtaactaactccctgcgttcgtctgctccacggcacgtatttgctcctggagctcctggatatgctgctcgaacttctggatatcgccggtgatctgctgcagactggtcagcacgttcttcagtttctccccatcgatttggacctcaagttcgcggatctgcttggtcacgtttcccgtgagggagacgcactcgaccagctcattgcaattggcgtgcagttgggccagtagcttgtaggcccgcttcgcgtggagatcatgcttggcgctctggaagagcaggtcgtccgtgtagttgaactggcgctgcaactgggcacccacgacattaagctgcttttggagttgtcgcgtgtcatccagaactttgtagatatccgctcgttgcttgcgtatgttcccgatgaattcatgtatcctgcgggtgtactccttgcgaggtgccaaggactgactggcgctacgcagggtggcattaagttcgttgtgctgttgggtcttggccagaagctcctgctccagctgctcgatgctgttgcgaatgccctggacctcctgagcctccttggcggtctttagtttctctaggctttccagcagcggtttcctgtaatcctgccactgctgggtaagcgtgagccttttgctttgcgtggattttagcagggcctccagtttggccaggttttcctcggaatcggcgagaaccaaggaggtgcgttcgtgcagtttaagcgtgggctgaatgcgactgatctcctctctcgctttagtttcccgctgtttcagagctgcaatggcaacagcatgtgctttgcgttccgctagcaggttttcgcattggactcgcaactcctggacttggtcgctcagttcttggatgggtgaaggctcctcctccttctccgcactggcgggcggttttacggtcggaatcaggggcggcgctggatcctcgctgctcacaaagataagtgttgaatccggcaatatctggccccacctgtccagctcattcttgtgcagcacggaggcaatgagatccgtcgaggtggaggatgtttgctggaagagattgggtgcctgttggtcgagatactgctgctgctccttggaacgctcctcgggattggcggatggaatgttgagattgatgtttggtcgaaattcaatgcccaggctactgcaaccgagtaatttacgattgcccacggaccgggcaaactgtgggacccagggtgtcttcagttgttgggcgagctcctttcggatcttccgctccaggagttgcctgtggctcagggtttgcgacttgctggcaccgtcctctgtgccttgacgctcccgcggaagttgttcgatgagaaacattagcagtcgccgcaattccacggcattgggatacaaaaaggtctgataaccaatatcgcctcggtaaccgctatccttgcaaccctgcgccaaggagctggccactccgaagcgctgggccatcgctccgccggggagagtgcgtggaagctgcaagtctggacgaatctccgccagacagccggagactgctcgcaccacctgttccggggtgaagtcggacagctcatccgtcggctcgatggtcgcgtccacctggtgcagctggtgcatgattatcttgtccacttcgtccatgattcgctttatttactatttattttcgcattttaatgggagtgttttttttgtgacccaattgtgacagtcaccgcgattcgtgaacaagttggtacggcaacgttagcgggtttcttgaaccgatgtggcagcaccatttaattcaaaaagttctttaggttgtaactaatttgtttgtactaaaaatgttatttacaactgcattaaaagcaattacggaattcggttaacccacctgccacaaaacaaataattatattcaattaggattggtattcaatatttactttgaaaacatttttgcagctttctaaggtttctttggacaatgttgaaatattaaaataataacttatttatttctttaagaatgactaataagcaggcaatccttatcggagattaatataagtttcgtcatatgcaaagatattcttgtgtcaccccattttatttttaacatttacatttactgtaccctgaaattttaaccctgacacggtgtcttaacgtcattattttataaccaaccctttgcccgtgattgtgcgaaatacttgctgatatatttttacagcagactgggcagaaaatcgtctttgcgggcacgcaaccacaaagtctaattgaatttggttggcagcacaaaatgcgatataaacgaggcattgcggtgattggaaacagttcagccctgtggcgcacacagagcgaaacgggtagcggttaaggcgtatcggttgggaatcggttcggtatcgggttgaccgatatggagccgttgtgcaacgccagtgaaccgccacttcgcccggaagcgcggagctctggcaacggagacttacagttcctcggatggaatgtgccgccggatcagattcaatacattccggagcactggctgacccagctggaaccgcccgcgtccatgcactacatgctgggcgtcttctacatatttctcttctgcgcctcgacagtgggtaatggcatggtcatctggatcttcagcacatccaagtcgctgaggacaccatccaatatgttcgtgctgaatctggcc

SEQ ID NO: 21134 - DNA, 1734 bp, DROSOPHILA
cacaattgggtcacaaaaaaaacactcccattaaaatgcgaaaataaatagtaaataaagcgaatcatggacgaagtggacaagataatcatgcaccagctgcaccaggtggacgcgaccatcgagccgacggatgagctgtccgacttcaccccggaacaggtggtgcgagcagtctccggctgtctggcggagattcgtccagacttgcagcttccacgcactctccccggcggagcgatggcccagcgcttcggagtggccagctccttggcgcagggttgcaaggatagcggttaccgaggcgatattggttatcagacctttttgtatcccaatgccgtggaattgcggcgactgctaatgtttctcatcgaacaacttccgcgggagcgtcaaggcacagaggacggtgccagcaagtcgcaaaccctgagccacaggcaactcctggagcggaagatccgaaaggagctcgcccaacaactgaagacaccctgggtcccacagtttgcccggtccgtgggcaatcgtaaattactcggttgcagtagcctgggcattgaatttcgaccaaacatcaatctcaacattccatccgccaatcccgaggagcgttccaaggagcagcagcagtatctcgaccaacaggcacccaatctcttccagcaaacatcctccacctcgacggatctcattgcctccgtgctgcacaagaatgagctggacaggtggggccagatattgccggattcaacacttatctttgtgagcagcgaggatccagcgccgcccctgattccgaccgtaaaaccgcccgccagtgcggagaaggaggaggagccttcacccatccaagaactgagcgaccaagtccaggagttgcgagtccaatgcgaaaacctgctagcggaacgcaaagcacatgctgttgccattgcagctctgaaacagcgggaaactaaagcgagagaggagatcagtcgcattcagcccacgcttaaactgcacgaacgcacctccttggttctcgccgattccgaggaaaacctggccaaactggaggccctgctaaaatccacgcaaagcaaaaggctcacgcttacccagcagtggcaggattacaggaaaccgctgctggaaagcctagagaaactaaagaccgccaaggaggctcaggaggtccagggcattcgcaacagcatcgagcagctggagcaggagcttctggccaagacccaacagcacaacgaacttaatgccaccctgcgtagcgccagtcagtccttggcacctcgcaaggagtacacccgcaggatacatgaattcatcgggaacatacgcaagcaacgagcggatatctacaaagttctggatgacacgcgacaactccaaaagcagcttaatgtcgtgggtgcccagttgcagcgccagttcaactacacggacgacctgctcttccagagcgccaagcatgatctccacgcgaagcgggcctacaagctactggcccaactgcacgccaattgcaatgagctggtcgagtgcgtctccctcacgggaaacgtgaccaagcagatccgcgaacttgaggtccaaatcgatggggagaaactgaagaacgtgctgaccagtctgcagcagatcaccggcgatatccagaagttcgagcagcatatccaggagctccaggagcaaatacgtgccgtggagcagacgaacgcagggagttag

SEQ ID NO: 21135 - protein, 555 aa, DROSOPHILA
MDEVDKIIMHQLHQVDATIEPTDELSDFTPEQVVRAVSGCLAEIRPDLQLPRTLPGGAMAQRFGVASSLAQGCKDSGYRGDIGYQTFLYPNAVELRRLLMFLIEQLPRERQGTEDGASKSQTLSHRQLLERKIRKELAQQLKTPWVPQFARSVGNRKLLGCSSLGIEFRPNINLNIPSANPEERSKEQQQYLDQQAPNLFQQTSSTSTDLIASVLHKNELDRWGQILPDSTLIFVSSEDPAPPLIPTVKPPASAEKEEEPSPIQELSDQVQELRVQCENLLAERKAHAVAIAALKQRETKAREEISRIQPTLKLHERTSLVLADSEENLAKLEALLKSTQSKRLTLTQQWQDYRKPLLESLEKLKTAKEAQEVQGIRNSIEQLEQELLAKTQQHNELNATLRSASQSLAPRKEYTRRIHEFIGNIRKQRADIYKVLDDTRQLQKQLNVVGAQLQRQFNYTDDLLFQSAKHDLHAKRAYKLLAQLHANCNELVECVSLTGNVTKQIRELEVQIDGEKLKNVLTSLQQITGDIQKFEQHIQELQEQIRAVEQTNAGS

SEQ ID NO: 21136 - DNA, 4411 bp, DROSOPHILA
atttaaacattagcctaaccacacaaatgtaaagttcgacaaaggacagccggtgggttttgtacatcctaaaacctcaacccgatcggctccctttggaatttagttaagtttcgcgggctaatggcggtgaccaaggggagcaccacatccagaaatccccagaggtgtctccttgggcgcaagccattttccggacgtttattctttgccaagagcttgacagcgttatttaaggtgaacctaaggcctggagttgtaagccctaaaatgtaactagtaaacttactaatatgtttagtaatagcctaaataaaagacaatttatacaaaataaccattcgtacttgaatgctgccaatgctgcttattatttcatgtgcgcttacagagctgacaacttagtaaaataaatattaggatccttaaattatgttgatcattgctcagttagtttagtgtatattccaatttagagctatagcttgtgcctattttcataaatatattagaaacagtaattttgttttaggtttagcttttttgaacttagcgttctttcccaaaaaaaatgggattttcttcggaaagagttgcaactctggctgatgattgtcaagttggccttgccgcattctgctttttgtcaggcattttggattaattcgtttgttgaaattgtcaattgcttcagtgaagaatttttaatctgcttaaacttggaaaatgattcgcgccatggtaatgaccaaatggagtaagtcggtggcgggaccactggtcacagcgtggagtaagtgaagcaggcacgtgtttttttcttagcaaactttaacgccttttcccaccataaagactactccacattgaatcgcctcaatggcaatactgtgcgcccgcgtgctctgttcctgaatctcgaccgcaagttctccgccgaaggtggcggcgatgagaagcccaagaacgtgccgcctggatttgcggctccagggtttccatccaccttgggcaataacccagagaacaccacgcgtaaggatgtgcccattggcgaggtgcaggcgccaactatttccgtagtgaacgcaggcggtaaactgggcagagctgagccactggaggccagcaccatcgtgcgcagcaagggcacttcgaacgaggacaagatgaccgaggcgcagaagaaggcatcggaggccaaggaggcggccgccaagcagttgcaggatgtcatggccaacttgcctagcaaggagcagaccgaaaagtatttctttcgcgtggttgccttcttctatgacttgacctacctaaccgccacctggttgctcaactttgtcgagcacaatatcgttcaaaatgccaaggtgcagcactactggaagcgattccacgaaaaaatggagcaggccaagaaggattaactcccagcggagccgaaaaatatattataaaactcatgcgaaagcaaaaaataaaacaactcgctgacgagtacaaaattacacttgacttggccacttttccatcagattaacgccgaggtgtagccatccagtagtttggccaagaatttgagtatcttgttgcgagcggccaccagttgtggcggatcggttttcaccggctcatacatattggcgcagtgagcggttcctaaaaaaaaaaacacaataaatgcttacattacccaagttatatgtgaaaaatgtgttggtaagcacataccttctatgtaaatggtaggaagtgctgcgttcgtggacttgaccaagcccaaagcatgccagggatcaatggaaccgtgcacgtacaacacatttgtggtctttggctttagggcgccatagttatcatttgtggcggacaccaccagtttgaggaacttggcgttcatattcttggagaacacatccatgcactggcgtataaagaagtcgacaccgaagcgatcaccaaatgtgtcagccgggttatccgaggtctgatagaagccgaattcgtggcaggtctgatatgtccactggcgcattcccttggccgtctccgagtcccaggaaacgttcttcatgtccgccaccatcttgtcgtacttgtagtccaggcaggtggtgttcgattccttcaatagcatatcgttgaccaggcccaaacgggtcacaggtggaccagccgtggtgtttagcatgacatcgcagatctatggagttcaaacattcttagtatggacttgatagggatcaaagtgaggatgaaacacacgtcgtcaatggtgatggtggcatggggactgttgtccttgttgtattgcaccactccagcaaagttgccagccagattctcaaagaaattggccatgtccaggtcgttttcaatggagtccttgatgggagtgcatgttctgagtataaaatggtttacaaaattaaaatttgtgcaggacgatagcctaatccactcacttgaacttctcgtccaggctgcgttgtccaatcatgtgcttgagtagaatctccacttgcgcaaagctgcgggtcacggcgtccacgcattcgggcttgtaggcagctagagaggctttgaccacctcgaaatactccttgaagtcaacctcagccagcagaggaccactggagctaattgaaccgtagatgagctcgggatacttctcgcgtgcccaggcggccagcgatcccggataggagccaccgaaagcgatccatttctggccatcgcccagattgaacttaaccttcatggcggttacaaagctggccaagtcctccagagcctgctccgagctgagatagtgcagattttcggtggacagatcagcggtgggatggctcttgccatagaaacgatgctccaactgcagacacagcgctccaaagtgctcggcatagtgcacccaggctccttcgcgcatccacttggccgacgcctcgccctcgccaccgatcatcaggaatacgggtgcggagctgtcattccgatagaagtcggcattcacaaagtatcgctgctgccaggtgcgcttatcgctcgacttgaagtgatccaatcgctgctcgaaccacagatcctccgagtgcaggctcctttgcagggttggaatcttgctgggctccccgaggaatcccttggtcagccttccgcgtcgaaatcccattccggaaatgggcgcaagcagtcccaggagcagaagacccactcccaagggcctcaaaacgcccccaatgaaaagcatatttgcttcctttgtttgttcgggtcaagtagaatttgccagtaattgaagtatttaattagttggaacctcgcacagtgcctaactgtaaatagcgactgaaggagagtggtgtgttctatttatataggcaccgttatgtgtgtcgcactctcctgattattcagttctcgctgtattatctatattcgcaaagccggcaaagcaaaactaaaacagtaggggcattcatagttattgatttcaatcattaattgaattaatttaattttaagcagagaaagatttctgtatgctgtaagtgttctggtaactttacaaaacttaatttagctttttatttatttatattatttcctagctagatattatcgatgagcttaatagcaccgtaaatgtgaacgtgttttgcaaaatttttgtcaagtaattaagaaaagtatacattcttgcatgctttgataatttccatctgcgtgtaattttaaattctcactgaactaatttaatggaagtttcctgaatttcaaatgctttaggtagctttaataaacaacatatagtttatttgaattattccatatattaggtaaatattattgtggagtttcactgtgccgttaatgcgaaagcttaataaatgtatttgtcaaaaattttaggaaattgtgcatgtgtatgcgttgtttttatatttttcatctgtatagtcagttataagtagccaaatttagtaactagattttgtagctaagtatggcagcactgttgctgtggtagcatctctttgtattctgaaaacggtaacactaattgcgcgacaatttggattgtttacgtttttatccagtttaattgtaatataatttaaaaaaaatattgttgttaactgtcataatggacttcaatagcctagcctacgatcagaagttcttcaatttcacagcggcacagttgtctgcagagcgtgagtgctacatccttatatctctggatcagcgtcctttatccattaattccttttaaataggcgaacatattgtgcaggacataattaagaagggtattggtcagatcatcgacaagatcaagacacccgccacagcggaattgctggaagccgagaaggagaccgttgagcgtcgtttccaggcatcc

SEQ ID NO: 21137 - DNA, 2216 bp, DROSOPHILA
caggagagtgcgacacacataacggtgcctatataaatagaacacaccactctccttcagtcgctatttacagttaggcactgtgcgaggttccaactaattaaatacttcaattactggcaaattctacttgacccgaacaaacaaaggaagcaaatatgcttttcattgggggcgttttgaggcccttgggagtgggtcttctgctcctgggactgcttgcgcccatttccggaatgggatttcgacgcggaaggctgaccaagggattcctcggggagcccagcaagattccaaccctgcaaaggagcctgcactcggaggatctgtggttcgagcagcgattggatcacttcaagtcgagcgataagcgcacctggcagcagcgatactttgtgaatgccgacttctatcggaatgacagctccgcacccgtattcctgatgatcggtggcgagggcgaggcgtcggccaagtggatgcgcgaaggagcctgggtgcactatgccgagcactttggagcgctgtgtctgcagttggagcatcgtttctatggcaagagccatcccaccgctgatctgtccaccgaaaatctgcactatctcagctcggagcaggctctggaggacttggccagctttgtaaccgccatgaaggttaagttcaatctgggcgatggccagaaatggatcgctttcggtggctcctatccgggatcgctggccgcctgggcacgcgagaagtatcccgagctcatctacggttcaattagctccagtggtcctctgctggctgaggttgacttcaaggagtatttcgaggtggtcaaagcctctctagctgcctacaagcccgaatgcgtggacgccgtgacccgcagctttgcgcaagtggagattctactcaagcacatgattggacaacgcagcctggacgagaagttcaaaacatgcactcccatcaaggactccattgaaaacgacctggacatggccaatttctttgagaatctggctggcaactttgctggagtggtgcaatacaacaaggacaacagtccccatgccaccatcaccattgacgacatctgcgatgtcatgctaaacaccacggctggtccacctgtgacccgtttgggcctggtcaacgatatgctattgaaggaatcgaacaccacctgcctggactacaagtacgacaagatggtggcggacatgaagaacgtttcctgggactcggagacggccaagggaatgcgccagtggacatatcagacctgccacgaattcggcttctatcagacctcggataacccggctgacacatttggtgatcgcttcggtgtcgacttctttatacgccagtgcatggatgtgttctccaagaatatgaacgccaagttcctcaaactggtggtgtccgccacaaatgataactatggcgccctaaagccaaagaccacaaatgtgttgtacgtgcacggttccattgatccctggcatgctttgggcttggtcaagtccacgaacgcagcacttcctaccatttacatagaaggaaccgctcactgcgccaatatgtatgagccggtgaaaaccgatccgccacaactggtggccgctcgcaacaagatactcaaattcttggccaaactactggatggctacacctcggcgttaatctgatggaaaagtggccaagtcaagtgtaattttgtactcgtcagcgagttgttttattttttgctttcgcatgagttttataatatatttttcggctccgctgggagttaatccttcttggcctgctccattttttcgtggaatcgcttccagtagtgctgcaccttggcattttgaacgatattgtgctcgacaaagttgagcaaccaggtggcggttaggtaggtcaagtcatagaagaaggcaaccacgcgaaagaaatacttttcggtctgctccttgctaggcaagttggccatgacatcctgcaactgcttggcggccgcctccttggcctccgatgccttcttctgcgcctcggtcatcttgtcctcgttcgaagtgcccttgctgcgcacgatggtgctggcctccagtggctcagctctgcccagtttaccgcctgcgttcactacggaaatagttggcgcctgcacctcgccaatgggcacatccttacgcgtggtgttctctgggttattgcccaaggtggat

SEQ ID NO: 21138 - protein, 508 aa, DROSOPHILA
MLFIGGVLRPLGVGLLLLGLLAPISGMGFRRGRLTKGFLGEPSKIPTLQRSLHSEDLWFEQRLDHFKSSDKRTWQQRYFVNADFYRNDSSAPVFLMIGGEGEASAKWMREGAWVHYAEHFGALCLQLEHRFYGKSHPTADLSTENLHYLSSEQALEDLASFVTAMKVKFNLGDGQKWIAFGGSYPGSLAAWAREKYPELIYGSISSSGPLLAEVDFKEYFEVVKASLAAYKPECVDAVTRSFAQVEILLKHMIGQRSLDEKFKTCTPIKDSIENDLDMANFFENLAGNFAGVVQYNKDNSPHATITIDDICDVMLNTTAGPPVTRLGLVNDMLLKESNTTCLDYKYDKMVADMKNVSWDSETAKGMRQWTYQTCHEFGFYQTSDNPADTFGDRFGVDFFIRQCMDVFSKNMNAKFLKLVVSATNDNYGALKPKTTNVLYVHGSIDPWHALGLVKSTNAALPTIYIEGTAHCANMYEPVKTDPPQLVAARNKILKFLAKLLDGYTSALI

SEQ ID NO: 21139 - DNA, 3836 bp, DROSOPHILA
tgtgtttatgcagtgtgtgtgtgtgtgctgcccactctcctcgccttgctccctgcgctgtcccccgccctctctcctgctgcttatcgcgcgtctccatcgccatgcactttgttgctgtcggccatagctgcagttgttgttgcctgcttttttctttttctctctgtttcgttttttttatcgctgcgtgcgtgtaagccgacgctagcggcatctcccctctcgctctggccccctaggaacacaacactacacaacaacgcagcagagcgagctccatgggcagagctgaccggtcttagcgggaaaatagctagttctggctatgaagagtcatgttaagtaaatgtcgtttgcaagtaattctatagtgtgcgttttactagtatacaaaagtcccttttacaaaagctatgttttctaagcatagaaactgcaacgaaacttcaggtcatgtaaaagggactttacctaactttgaaggaccgaatgttctcaaataaactcaaataaatttttacatagaaggttacggaagtctgactataaaaagaatatacgtttaggatatttagtgtattggatattttctcatttcaaagcctattctcaaaaaagaaaatgtttctaacatcgaaaacatcactaaaccggctgagctggcagctctatcccccgacgtcgtcagtctcagtcccttttgccccaactccgcccgctcgccatgcttgcctgcttgccagtgtgtgtgcgtgttgtgttgtgtgtgcctcattgtttgctttttgttgttgctgcgttgttttgtgcctctctgctcgtttctcgattcgtacgaaaaaaatgtagtacagcgtgtggtatggcaaacgaaagctatgagttttcagtgtatcttgtctgccctctctttcccgcccggaatctatggttgggaattataagagccgcgagcggcctccttcgccgcacaggcgttgcagtcgtggtggacgcatcacctgaccagccagaggcccaggttgagcttctgcagcttgggcagcttcatgatgatgtcgatgcccttggaactgagttgcgtgcagccgtagagatcgatggtcttgagattagtcagatcctcggccagcgtttgcaggcccttgtccgttatccggctgcactgtccgatattgaggttctccaactcgtgcaatgccttggcgatctttagcatgccgtgatcggtgatctggcactgattgagggacagggatctcagtctgtagagtccctgggctatgtgtgtcagggcctggtcgctgatcttgtcgcagaaactgacgtccagcgagttgatcccgctgccgccttccgtgaggtaggccattccgatatccgagatgttgtcgcaggagcgcaagttcagctgctcgagcttgggcatccgggccaggtgctttagtccgctgtccgtcaccgagacgcagaagctcaggttgatcgacttcagcgaggtcaggccctgggcaatgtggcccaaagcctcgtcgcttagccgctggcaatcctgcagacccaagtactccagctgcaggttgccttcggccgtttcccgcgagaaaccagccaggtgtccgattccctggtcgctgatgtgccagcaggagcgcagattgaggtgcttcagcttcttcaggccccacgcaatgagcagcagtcctgtgttcgtgatgttgcaacagccgcccagttccagggtctcaagattccttagatgctgggcgatgcgccccagactcgtgtccgtgatctgtttacagagggagaggtccagtgtcttgaggtttggcagatccacgctaaaggcatggcccaggttcatgtccgccacgttgaagcagccgctcaggttcagagaggtcagagccggaacgcccaggaccaaatccttaagcgagcggcgcagcgataggatctgcaccttcttgatgccgcgcttgaccaggcagttgaacaggctcggactggaacgcttaaggtgcagcttggcctcgactcccttccaaacgctcttggcataggccgcatcccgccatgcggtgcaaacctgagctgcccgacccaaatccctcactggtaggtgctcgaatatctgctcgaggagttctgggaacaggttgcttatgtgggtgccctccaccggcggcgggctctccggagatgctggtctgtgcgggagatggtggtgatggtgatgatggtgctgggcgtgggccgctgctgctgccgctgccgccgcagctgctgcggcatgctgcaagtagagggccggcggcaaggtctgcagctggtggtgcggcggtcggtggtgcagggcgtagggcgtgaagcgcagcaggtggtggtgggtggtggtggctccggttcgcgtcagaccgggcagctcagtctgttgatagagttcgtccatggcccagctgggcgctcctccggctcctgctccgccaatcgccgcgccgccactggtggccgctccgttgctcccggatccgccacagtggctattcagattgttcaacaccgcgattgtttgatgatggaagggcagcagctccgtgttggtcgccatctcctactcttgattttacacttggcttgtcgcttgactgctacttttgaaattaactgttggattggctatcctatatgcgctgcattttactgtttgtatgcttagttgaagactagtagggttcactgtggttattcactgcacttaactcgagcactgtgtgtagttggaagtccaagttctatttgtgtgttctttgttcttgcggccgagacgcgatgtgcacgaaccggatgataaagaaaaactgaactcgcagcggcaaagcgccttgcttttagcctgaaatacagatgcagatacagatacggggggtttgtgttggtattggtcatatttttatctgaacgtattcagcgctctcaccgctctctcgagcgagtagagagtagcgagtaggtattcgtccgttcagtctgttgtatgtcccgtgtgtgcggttcggtcgttcttccattgcgattgcacttggaattgactttgtgcggcatttttattagaatcattgcaacgcgtggttttcttgctaattttgccataagttcttattaaaaggtagctagcatatgctctttctgtcctttatcaccagttctgcgagtcaatttttaaccagttcggcttgtatataaataatttaggttcagacataatctctattgctcgtaaggagtttcacaaattgtttaaacttaaagtttgaagaccgttttgcgtattcaactcatccgtgacccattttttttattatttatcatataaatatatttattatctcgacattgtgtggcgttctacttaggatctcctgcagcttatgataagagaagcttccccatatttcctttctcgccagctctctcatcactaacgctggttataagaccaggcttggatttatctttcgggtttttcggttttggacgccagctccatgtttcaggttattctttacccgtcgagccaaactcaatgccaaactccgacgcatttgttgtttctgctgccgctgcattccgaagtcgagcaggtacctgtctttctccctccctcgccatctctctcgctctctatcgcatctgtgtgagtgcgatcgctgctcgctacctgcgaacgcaagagcagcaacaacacaatcccggtttccaggaaaatattaacgataactccaaaaaaagcagaaactccgttgccgcaccacacacagaaactcaga

SEQ ID NO: 21140 - DNA, 1836 bp, DROSOPHILA
cgtctcggccgcaagaacaaagaacacacaaatagaacttggacttccaactacacacagtgctcgagttaagtgcagtgaataaccacagtgaaccctactagtcttcaactaagcatacaaacagtaaaatgcagcgcatataggatagccaatccaacagttaatttcaaaagtagcagtcaagcgacaagccaagtgtaaaatcaagagtaggagatggcgaccaacacggagctgctgcccttccatcatcaaacaatcgcggtgttgaacaatctgaatagccactgtggcggatccgggagcaacggagcggccaccagtggcggcgcggcgattggcggagcaggagccggaggagcgcccagctgggccatggacgaactctatcaacagactgagctgcccggtctgacgcgaaccggagccaccaccacccaccaccacctgctgcgcttcacgccctacgccctgcaccaccgaccgccgcaccaccagctgcagaccttgccgccggccctctacttgcagcatgccgcagcagctgcggcggcagcggcagcagcagcggcccacgcccagcaccatcatcaccatcaccaccatctcccgcacagaccagcatctccggagagcccgccgccggtggagggcacccacataagcaacctgttcccagaactcctcgagcagatattcgagcacctaccagtgagggatttgggtcgggcagctcaggtttgcaccgcatggcgggatgcggcctatgccaagagcgtttggaagggagtcgaggccaagctgcaccttaagcgttccagtccgagcctgttcaactgcctggtcaagcgcggcatcaagaaggtgcagatcctatcgctgcgccgctcgcttaaggatttggtcctgggcgttccggctctgacctctctgaacctgagcggctgcttcaacgtggcggacatgaacctgggccatgcctttagcgtggatctgccaaacctcaagacactggacctctccctctgtaaacagatcacggacacgagtctggggcgcatcgcccagcatctaaggaatcttgagaccctggaactgggcggctgttgcaacatcacgaacacaggactgctgctcattgcgtggggcctgaagaagctgaagcacctcaatctgcgctcctgctggcacatcagcgaccagggaatcggacacctggctggtttctcgcgggaaacggccgaaggcaacctgcagctggagtacttgggtctgcaggattgccagcggctaagcgacgaggctttgggccacattgcccagggcctgacctcgctgaagtcgatcaacctgagcttctgcgtctcggtgacggacagcggactaaagcacctggcccggatgcccaagctcgagcagctgaacttgcgctcctgcgacaacatctcggatatcggaatggcctacctcacggaaggcggcagcgggatcaactcgctggacgtcagtttctgcgacaagatcagcgaccaggccctgacacacatagcccagggactctacagactgagatccctgtccctcaatcagtgccagatcaccgatcacggcatgctaaagatcgccaaggcattgcacgagttggagaacctcaatatcggacagtgcagccggataacggacaagggcctgcaaacgctggccgaggatctgactaatctcaagaccatcgatctctacggctgcacgcaactcagttccaagggcatcgacatcatcatgaagctgcccaagctgcagaagctcaacctgggcctctggctggtcaggtga

SEQ ID NO: 21141 - protein, 538 aa, DROSOPHILA
MATNTELLPFHHQTIAVLNNLNSHCGGSGSNGAATSGGAAIGGAGAGGAPSWAMDELYQQTELPGLTRTGATTTHHHLLRFTPYALHHRPPHHQLQTLPPALYLQHAAAAAAAAAAAAAHAQHHHHHHHHLPHRPASPESPPPVEGTHISNLFPELLEQIFEHLPVRDLGRAAQVCTAWRDAAYAKSVWKGVEAKLHLKRSSPSLFNCLVKRGIKKVQILSLRRSLKDLVLGVPALTSLNLSGCFNVADMNLGHAFSVDLPNLKTLDLSLCKQITDTSLGRIAQHLRNLETLELGGCCNITNTGLLLIAWGLKKLKHLNLRSCWHISDQGIGHLAGFSRETAEGNLQLEYLGLQDCQRLSDEALGHIAQGLTSLKSINLSFCVSVTDSGLKHLARMPKLEQLNLRSCDNISDIGMAYLTEGGSGINSLDVSFCDKISDQALTHIAQGLYRLRSLSLNQCQITDHGMLKIAKALHELENLNIGQCSRITDKGLQTLAEDLTNLKTIDLYGCTQLSSKGIDIIMKLPKLQKLNLGLWLVR

SEQ ID NO: 21142 - DNA, 4060 bp, DROSOPHILA
caaggtgtgttgtctctgggcgccccttttacccggctttgtctctttgacgcacatcttgaacgtggagccatagggttggtccaaaagagacttcagctccagtgtttctttgcccaatgtggccgtggtgtccagactgccgaatttttgtagcttcgtatatttctgccgctggatgacgatgtagtcgcccaattggattctggggatgtcctcttcggtggccatggttgcaactctatgttataattcttataaacaacgtgtttgtcgaaaacaaacgaaagccgcaaattctatagagaagaggaagagaaattcagtgctggaaaacggacaaaatctggtaatctagtcacctgttgcatgtgattagtaacgaaattttaaataaagagctataattaacaacaaattattttcttaatttggcaatacaaattcatttatgcaaacaagaatatttggattgatatttgactgatctggcagctccattacctgttgcttggccaaatgtttcacaattctaattaagaaataaccatgagtacttataccaaaaatttcatttactttaactaattaatttttgatcatgcaattagaacattcaagcacaatatcaatactcctagttaaaatatacacaaaaataatatacaacaaatatgtacatacattacccatttttgagataagtggctgtttgctgttgtgctttaataagtagagttggttgctatgaatgcttaagttgaacatgggtgtagctaacagggatggtgaaagtgtgagtaaataccttgaattactatgactaagtaataatcattgccaaaaatacattatttactgcccatacttacggtccctcttggcgattacggaagggaaggactgcgcccatgcgtaacggcacccctcaaatcgcttgtatcgacgcccataaatcataattttcaacggtgtggcaacgccgttcgatcgagtacagctgatacaacgcggcgataatcttgtagtgcggtgcggttttaacctttgattggatctgtgttgtaatcagcgctcttcgggcactgcagttgcgtctccacgtgaccactagttccaggcgaaccccccgccacgaggatataccctaatcccgaaatcagagtgctgtcgcaggcgcagggaaaatcaaaccttcccgccctcctaccggttttgtggccaccgcgaaaataactgaccgcgcaagttttcgggtttcaagcaaacgcctcaagcacacgccccaataactgctgtcgcccgcatcagcagaaccagaaagaaatccgagccagagcagaacagaagtcgcgcagatatggcggaggctaaatcggagaagtcgccttttattggcaaacagcaggcgccggtgacgttaaatccctcgtgggaatccaagttgccgccccatgattccaacggcaagggatcaacgtcggtgttggcgaaactgggcctgccagcgccaaaagataaattccttatcgtgttctttatattcctgctgcacggcgtgggcacgctgatgccatggaacatgttcatcacggccaagtcctatttcgaggacttcaagttcggaccaaacaacaccgtggccacggaagtgagttaccgcacccatttcatgcaaaatatgggctttgcctcgcagattcctaacctggtcttcaactggctgaacatctttgtcaactttggcggcgacctgaccacccgaatcgtctacagcatcatcttcgaaatggtcattctgctggttaccattattttggccatgctcgactcctcgcagtggccgggcgtcttcttctggaccaccatggtgtgcattgtgttgttaaacgtgtgcaacggcatctaccagaacaccatatacggaatagtggcatcgttgcccatcaagtacacaggcgccgtcgtcctgggctccaacatcagcggctgcttcaccaccgccatggccttgatatgcggtgagatcttctcgtccaagaggacttcggccatctactacttcgtgaccgccatcctagtgctgctgctctgcttcgacacgtactttgcgctgccgctgaacaagttcttccggcactacgagaccattagccggagcagcgaaaagaaatctgattctaaggcccagctgaacgtgccttactggcagatcttcaagaaagcagcgccccaactattcaacatcttcctcacgtttttcgtcacgttgtcggttttcccggcgattcagtcgaacgtgcaccgctccgacccaaatttcgtagtaggcccggactactttacactggtcacttgcttcgcgacctttaacgtcttcgcaatgctgggcagtttaaccacatcgtgggtgcaatggccgggtccgaggttcctctgggtgccagtggtcttgcgtctggcgttcatccccttgtttgtcatgtgcaactacgttccgccggactcggtgcgctcattggccgtattcatcgagaacgattgggtgtactggggcatcggcatcgcaatggcctacagctccgggtatctcagctctctgggcatgatgtacgccccgcagacggtgcacaccaaataccagaccactgccggaatgtacgcagctgccatgctgatcacgggcatcttctccggagtgctgttctcgtatctgggaccatttttcgtcgtgtagtcttacatttattagtatgacgcttactaacaattttcattgttcattgcattgcattatttgacacattttaaatttagttttgtgctcaataccagttccgggacctggccatttggtttcgtcttaaccaattaattatattcttttcatttaataaaggttttacttttcattttaataatatggtgtctaatatttcatagttagactgcacacacataaatttagttttgcgctcaattctagttctaggactaatcaatcattttaacacgttttatttaataaagtttttcaatttgtattttattacatcaacgaaataatacaaagatagtggtacaaattaaagcaacaatatacctcgcatccatgggaaaattgtgccgacaaaaagagcaaagggaacttgcagagtctgacaattgggtcctaattgatgtacatatatctatcaattaggagggggtctaacaagtcaatggaatatttggttcgttttatcacagcttcatccgattgaatgaaataacaaagtgggacaaatatgcacgaccaaagcatttaatcaatgcactcttttggtggccaccgaaaccgcccagctgaaattgtggacacccttgtaatgataaaaaacactgttaacagaaaacgtacaaataaaacgttctaataaaataataaatgtgcagataacggccttatacaaaactaatttaattaatttcaaattggcagaaaggttacaaaaactggatttaaacgttagtaataattactatattataatctccgaaatactttattttgcatctgtgccaaagtttaatgccatcttgcaaagaggcgtaaaccattccaaagccgatggaattgtttggacatggcgccgaaaaatatttggtaaacaaaaaaataaccaaataaacgaaccttatctgagaagacacataattaccgtgggagcagctagtagcagataaacatatcagttccacttgtcacttgggcgacgtctagtacctatttatgtatttacaagggcaaagttagggggaagagccgaggcagagccctgaccagctcaaggtcatttcttatctccgccctgcggatccgacaagaagtacacgatcttcagaagctcattgaactttggcgtatgcctgggatggcgtttctcaaggccagcaatctgctcgagggccacttccacatccactacattgcctaagatcgaatgcaggcgctggggatattttctcgcggctcgctccacacgtttgcgcgttttctccagcatactcagttgttcct

SEQ ID NO: 21143 - DNA, 2060 bp, DROSOPHILA
ctgatacaacgcggcgataatcttgtagtgcggtgcggttttaacctttgattggatctgtgttgtaatcagcgctcttcgggcactgcagttgcgtctccacgtgaccactagttccaggcgaaccccccgccacgaggatataccctaatcccgaaatcagagtgctgtcgcaggcgcagggaaaatcaaaccttcccgccctcctaccggttttgtggccaccgcgaaaataactgaccgcgcaagttttcgggtttcaagcaaacgcctcaagcacacgccccaataactgctgtcgcccgcatcagcagaaccagaaagaaatccgagccagagcagaacagaagtcgcgcagatatggcggaggctaaatcggagaagtcgccttttattggcaaacagcaggcgccggtgacgttaaatccctcgtgggaatccaagttgccgccccatgattccaacggcaagggatcaacgtcggtgttggcgaaactgggcctgccagcgccaaaagataaattccttatcgtgttctttatattcctgctgcacggcgtgggcacgctgatgccatggaacatgttcatcacggccaagtcctatttcgaggacttcaagttcggaccaaacaacaccgtggccacggaagtgagttaccgcacccatttcatgcaaaatatgggctttgcctcgcagattcctaacctggtcttcaactggctgaacatctttgtcaactttggcggcgacctgaccacccgaatcgtctacagcatcatcttcgaaatggtcattctgctggttaccattattttggccatgctcgactcctcgcagtggccgggcgtcttcttctggaccaccatggtgtgcattgtgttgttaaacgtgtgcaacggcatctaccagaacaccatatacggaatagtggcatcgttgcccatcaagtacacaggcgccgtcgtcctgggctccaacatcagcggctgcttcaccaccgccatggccttgatatgcggtgagatcttctcgtccaagaggacttcggccatctactacttcgtgaccgccatcctagtgctgctgctctgcttcgacacgtactttgcgctgccgctgaacaagttcttccggcactacgagaccattagccggagcagcgaaaagaaatctgattctaaggcccagctgaacgtgccttactggcagatcttcaagaaagcagcgccccaactattcaacatcttcctcacgtttttcgtcacgttgtcggttttcccggcgattcagtcgaacgtgcaccgctccgacccaaatttcgtagtaggcccggactactttacactggtcacttgcttcgcgacctttaacgtcttcgcaatgctgggcagtttaaccacatcgtgggtgcaatggccgggtccgaggttcctctgggtgccagtggtcttgcgtctggcgttcatccccttgtttgtcatgtgcaactacgttccgccggactcggtgcgctcattggccgtattcatcgagaacgattgggtgtactggggcatcggcatcgcaatggcctacagctccgggtatctcagctctctgggcatgatgtacgccccgcagacggtgcacaccaaataccagaccactgccggaatgtacgcagctgccatgctgatcacgggcatcttctccggagtgctgttctcgtatctgggaccatttttcgtcgtgtagtcttacatttattagtatgacgcttactaacaattttcattgttcattgcattgcattatttgacacattttaaatttagttttgtgctcaataccagttccgggacctggccatttggtttcgtcttaaccaattaattatattcttttcatttaataaaggttttacttttcattttaataatatggtgtctaatatttcatagttagactgcacacacataaatttagttttgcgctcaattctagttctaggactaatcaatcattttaacacgttttatttaataaagtttttcaatttgtattttattacatcaacg

SEQ ID NO: 21144 - protein, 458 aa, DROSOPHILA
MAEAKSEKSPFIGKQQAPVTLNPSWESKLPPHDSNGKGSTSVLAKLGLPAPKDKFLIVFFIFLLHGVGTLMPWNMFITAKSYFEDFKFGPNNTVATEVSYRTHFMQNMGFASQIPNLVFNWLNIFVNFGGDLTTRIVYSIIFEMVILLVTIILAMLDSSQWPGVFFWTTMVCIVLLNVCNGIYQNTIYGIVASLPIKYTGAVVLGSNISGCFTTAMALICGEIFSSKRTSAIYYFVTAILVLLLCFDTYFALPLNKFFRHYETISRSSEKKSDSKAQLNVPYWQIFKKAAPQLFNIFLTFFVTLSVFPAIQSNVHRSDPNFVVGPDYFTLVTCFATFNVFAMLGSLTTSWVQWPGPRFLWVPVVLRLAFIPLFVMCNYVPPDSVRSLAVFIENDWVYWGIGIAMAYSSGYLSSLGMMYAPQTVHTKYQTTAGMYAAAMLITGIFSGVLFSYLGPFFVV

SEQ ID NO: 21145 - DNA, 7302 bp, DROSOPHILA
ggtcaccccaaaaaatcggttataagttttgaaatctttatggtgacaatatactaagtttggatgcaatgcctttaccaagcacccgtataaaaaacattcattttcgttgataatttattaatttatttagattgaatttcattaaatagttaaggacattgatataatgttgtgtcgcaattatcattattatttgtgtgtgtgtgtgtatttagtgcttcaagtaagcggagtctctaaaataggtaaatagataaaaggacgaagggatcgtaacgaaaataatataaactaaacaattcattcaatggctaggacttgtgtctgtgtgcgtgtgtgttccttgtgttgctgtttaataaacataatttactatatatatatatcaaacataaatcgtgtgtggtttttaatacaatagaactgtttagaactgaaaccagcggttaggaaactttcatcgcgttcgactcgctcgtcgcttggttaaaacttaaaataaataaataaacatacatttttcaatgtggcaacaatagttacaattggatcagtatttcatattgatttttttgggtttttccattttttttgttgtttagtggttttgatttcgttctgaaatgcaattacaaataataagtttctatacaatctgatgtgctgctctactcgcgtgaagataaagcaaagttaccatagattttagctaacactatcgacttgaagtttacaaaatttgatttgcttttgatttagtaggactcatcatcattatcatcatcatcagcttcagctaattttctcatatctaatgtaagtgtaaggcattatcatctcttgtatatcgtttaatacatctgtgtatattcctcttcatcgttttccacttgtaagtatccctctgatttgatccataatttcgttgaatttgtttatggctaatttaagcttgctgctccacagctctcccacatccagactcgttgcagacgccttacatcagcttctgcttggcacaatcggggcacaggatatcgggtccgtcggtgatgaagccacgaccaaccagactagccttgcagctggcacacacaaagcagtcgtgatgccagtggcgatcctcaaacgatatgaagcgtgtgccgccaatgcctgatatagagattggttttcagtcagatttccttgatatatgtatgtatatatggcttatttgactcacctgttatgggcttcacacaggccgtgcaccttttggcaaagagctcgccaaagcactccgcacaatagggcttctcgtcgcggctggtgaatcgctggccagctagcgtgatgttgcagtgggtgcaggtgaagcactcgcgatgccacggctcgttcttgtaggtaacacctcccgaggtgatgacctaaagcaacagaaaggttcgattggattagatttaataatacaatgatactacaatcgaaatagtctaaactacgaattcaacaaaacaaagttccaatcaaataggcatactcccatcttccataccttattgcacttgatgcagcgcgtggcaaacttctcctcgtagcagccggcgcaatagatctcctgctcccgcgggatgaaggacttggtcccaatggccgtcttgcagacgcagcagcagaagcaattctcgtgccactgcctggttttatactccattttcttggtgcctgaaagcaaaagagcgggtgaggaaaaatcaatccaagtcgaaatcaatttccgcgttcttgaggccttgaaccttgaactttggcaacccactaacccagctccggagcctatcaattcaatctgaggagaactcaatttttaggcagcgacagattgagggcagagtcaatcagtggatggaagacaatccgtttacaatatagaaacaaaagctttccttcgttatgtcagccagacatgcaactttttttccccaaagcgaggggtgccagtcacgccccgctcgattcttcccttttggctttaacattttcataataattaatgcaaaaattacgcaaattttggctagtctcgagacaaaagccattctccatatgatttagggctattgcggtgttagtagtccatataaacctttgaggactttgctatcttcttgctttatttattgcgtgctcgtaatgtttctggccaaaaataatcagacaaaaaagagttgaggcaaattctctccgtcacgagtaaaaaaaaagggtctgctagtgcgggtaattgagtggaaatgttgactatgtcgtctgcaaattattctttaattcacggttgccaagcaagacgacagttgtgaaaaacaggggcagtctcgggaaaattcattctgggagttgtgctaaattgtctaacgaaaattccattaaaatgcgtcattaaatttcactcgaccttaattttattcatctacgttaatttattaaataatacaaaaatcatacttcatatcagacctagtatgcaagccttaaaaaatcaaccttgttaataaaaagatttacttcataacattggtttcattattcaaattttataggttgtctttctttactacacatccaagttaatagaccctagatttataaagtaatacattagttgtctgtcttgtttgagagaccccttaaatggattcattactcatcatcatcatcatccatcgatggcgatgacgctatggatctcgccaccagacagtgggcggttcctttcttctggccaatttgaatagttttcggacaataatattgataaattatgatgtctcatccgttgttaattaacataggatcgatttatgagtgtgtggaccactggaatattactgctggccatgttacctgctttgctggcacgcggatcgccgaggcgacaataatcgcccaactggcaatagaagttccggttctcctccacggcggaggcgttgggcagaaacatgctcagcacggcgatatcctcgttattatccttggccttcttgatccgctccgcgccaatggtcttggtttgcaggtgaagtcgagacttcattctcgaactaagtacatccacgtcggtcatgatcgcgagctaccttttgtgttacttgatcggattagttcacgaatggaaagtgtacccagctaaatgacttcacttctgacctgcccctttcttctaaacgagaacaccttgataagtcacgaaaaatgcagttttcttcatgccatcgctagctaaagtgggtcagtttgagatcgaagaccggctataaaactcatttaagatattccacacaaaccagcaaactctgcttatctgaaatcgatctctggacttggacagaaaacaaatttggcgacgcctagtctctctctttttcacccatagatctggtatgatccgaaggcgttgcctctatgacatcatttgccaaataacgagtttcatttaacttagcgaatgcttataaataaaatcccaagccaaattggttataatggaaatgaaatgaaacaacaacggtctatcataaatcattaaataattaactttttgtaaatacaacaaaaccaaaaatttgttaaacttcgtgaacaattttttctgatttggccgaagctcgtgcgcaaattgaagcaggaaattgtccaagtcagaagcgcacaggaagctcagattggaatagaatagattagagtggaataatagctatagaaacccacacaattgggaattgggaaggtgtagatggataactagaaatgccggagaaatcataatggtcaagaaatgtgatttgaattgggttgatgatgtaagattagggtctgcagagcaaatgatggaagtgcgaggttctactaataaatacagatctttaaaaggattttttaggtagtatacagcaagattctatataatgttcatattaaacaataaagactctttagagatagttacatagtcaacaatttaaatgtcaaacaatgaaaatgtcaacatatgattgtcaaaatctatactccgttaataacaatagcattatttacttctaaaatgttgataaacagtaagcaaatatttaaacttccataaatatgaatttaagcaatcagaaaactactctttgtagtaaaacaaagcattggtatttattttgacttgggaatgtgaaacctatcatttgaaatataaaattcaaacagagctgcaagtttttatcgcgtgtgacttcagtagagaaataataataaaatggctttcaatatcgactgcttagctctatctagttcaaactcaattgaccccacagttagtcccatcaatattgggttaccaactcgcaaccacagcattcgtatgggtttgcgacgctctttgcggccaaatggtggggcataaacaacgtttatttatagcgaccagcgtctaacataattataactaattgtgatgggctgtcagctccgcaaagaccaaaggcatcgcccactgaaagattggagtctcaaccgacgtctacaacaaacgttgccgccgcagcaatgacgctcggattccgagggtcaagtggcgaggcattgaggcaatgatatattgacaggtcgccgattgcgagtccgacgccgctgattgatgacatttgcgtttacatttgcattggcccattcagagtgtcacagctccgaaaatgaaagtggattcgaatcggattcggatatgtcaaccaaagcccaaaacgccgtgcgagccaaaaaaccgaagccaaaatgaaacccttacttcgtgcatggtctgcatttttaattgcaattggaaaccatcagcagcgcaaatatcgcacacagaaagaaaaaatgtaatgagtttgataaatactacattttatcttaagctcttcttttaaatctgaagaattcgtttgcttctgattacaatgatttcttgggttataaaaatgagctatcattatgaaaagatatgaaaagtttctttttatggcgaatagcgaaggaattttgtgtacatatttcattaagataacacttaaatgattaacaattaatttacgcagcttaaagatcttctttttgagctgtgcattaaaatgggattcatttagcggcttgccgcaatatttgatttccactgcgagatctttgactttgacccgccgcagggcacaaatgctggctcaaaagacgagatttattcgtctgttggattcgggaaaaagagaaattgaatttgcttgtttgctggccttttgttttgataagacgaacggatgacaacggctaagcggcattagcttttggcggtcaagtatgagggagttcatgatggaccccatagataggatctttaattagccaggcaattaagtggactgccccaagggaatcgagcgaatcactcgcaccgcaattaacgaattgaattgaaagccatgtggaaatagttcaaagcgatttcatttcgattgatattcaattgcaatgacaacagtaataatggaaagaaattccaattcaattgcgtgcatattcatatgtctgcgtcgttggtttacatgtttggctctacatgtttttccatttcggatcaaatttaaatgtggaacgcgtcgaaatggccatcgcttgacactaaatgcagccaaaatgggtccaatttcgtttccggttttggtggcacgaaattttcattggttatttatgaatttgacttgaatttgatatcgaaatgtttgcatgggaaatcgtaagtaagttgagcagaggcggtgcgagtgtctagatttcatttctggggtgacttgcagctgcaacctgaggattgtgtaatgtgtgcgatgtgtgggccgctcgttacgtatacgcccaggatgtgtgagcgagtgcaaagtgaaatcaggcattaagtatacgcaatgtgggtcgctagttcctcgctgttccccgcggttgcaatttacacactatgaaaacagaagccatttgggtacacttttccatattgtttacaggtgaattgctctaaacaacaatatgtttataattggagacgggcactggtttcttttaatcagcgccgccgtctctcaactaccagattttggttgcggaaatacttttttttggttctttattatatcgagatgatcaaagtttatgcatcaaattcgcatgcaacacgttgctccaaacaaaacaaacacactgtctatagggaattgatatctaagcaaattcttttgtatccgcggcacattccacgcgctttgaaagccgctttgagactgaaatcccgagtcgagggccccaaacaaaagcagacggcggagttcagagagacaaaccagccgagagaaacgagtcgaaattgaatcgagctgagtgaaaagtgaattgagtggaaattaaaactgtttactggagaggcggtacctgttgcatgccgccttcgccaacagatcatcttgttgtatcgaagccgacaagctgaaatagctgcactgctcaaaaataagattactttaattgaagcgaactatcttaatatcggaaaataaagagcaacaaattgtcacggttataaatttgtacttcaaaacattgctagcatctcgattataatattcatacctaagtcgctcgaaattatctttgctttacacaaggaaatatctgtaagatacacttctttctgtgtgacacttggcaaggcagtcgaggtgccatttagagacttcaatctgccgatctccgcccgctggtggggcaattatgaactattttgagtgaaggaaccggcccgggaggagattgacgaacccgccggcgcatggcacttgatatagcctctgtttatgcagattacccccggttatgagtgtgggcaaccattatgcattgtggctaggaacatgtcaactgatcacaacttggagtcagactggttggttgcatggtcgcaacgcccagtggcatttgggacgcgatcgaataggaaatatttgcagtgcctaatcaattctgtcccgatttggagcgacggaatattatgaccatagggcgttgcggtatgaagttcatttcgctggcatcgtttttgattaattcgttcgacttacggaaatggaacgacacgcgttggatgatcgcatcgtgcgtgggattcccctccgatcgctaccagcaaatcaatcaattgaaagtcaataaaaaaaatcgaaattcattagaaaaatgtgtcggtaattg

SEQ ID NO: 21146 - DNA, 883 bp, DROSOPHILA
cggatacaaaagaatttgcttagatatcaattccctatagacagtgtgtttgttttgtttggagcaacgtgttgcatgcgaatttgatgcataaactttgatcatctcgatataataaagaaccaaaaaaaagtagctcgcgatcatgaccgacgtggatgtacttagttcgagaatgaagtctcgacttcacctgcaaaccaagaccattggcgcggagcggatcaagaaggccaaggataataacgaggatatcgccgtgctgagcatgtttctgcccaacgcctccgccgtggaggagaaccggaacttctattgccagttgggcgattattgtcgcctcggcgatccgcgtgccagcaaagcaggcaccaagaaaatggagtataaaaccaggcagtggcacgagaattgcttctgctgctgcgtctgcaagacggccattgggaccaagtccttcatcccgcgggagcaggagatctattgcgccggctgctacgaggagaagtttgccacgcgctgcatcaagtgcaataaggtcatcacctcgggaggtgttacctacaagaacgagccgtggcatcgcgagtgcttcacctgcacccactgcaacatcacgctagctggccagcgattcaccagccgcgacgagaagccctattgtgcggagtgctttggcgagctctttgccaaaaggtgcacggcctgtgtgaagcccataacaggcattggcggcacacgcttcatatcgtttgaggatcgccactggcatcacgactgctttgtgtgtgccagctgcaaggctagtctggttggtcgtggcttcatcaccgacggacccgatatcctgtgccccgattgtgccaagcagaagctgatgtaa

SEQ ID NO: 21147 - protein, 245 aa, DROSOPHILA
MTDVDVLSSRMKSRLHLQTKTIGAERIKKAKDNNEDIAVLSMFLPNASAVEENRNFYCQLGDYCRLGDPRASKAGTKKMEYKTRQWHENCFCCCVCKTAIGTKSFIPREQEIYCAGCYEEKFATRCIKCNKVITSGGVTYKNEPWHRECFTCTHCNITLAGQRFTSRDEKPYCAECFGELFAKRCTACVKPITGIGGTRFISFEDRHWHHDCFVCASCKASLVGRGFITDGPDILCPDCAKQKLM

SEQ ID NO: 21148 - DNA, 2405 bp, DROSOPHILA
aactttaggacacactctgcgctggcgtccagctgcttgtgcacctcctcgcgccgattggcgcccagccgcagataccgtgagtctatttcctcgggaagcaccttgagcacctccagcaggggccagatggcgcactgatgtggcgccagtgtcaccagaagatcgttgatcggctcccgccagctggccatcagcagggccagatcggcaaccgccagactgagctgcgtcacaatcacattgtccgtctgctcgtcgatctggcctatgtgtgtgatcagtgaatcccgcagagattcgtgcgtgtgcggtggcagttcgctgaaggagttctgtatcttgttccgcatggtctgcgcagcaaagtagttggcgtgcaggtctcgtttctggtgaagcagctcgtccgcaatcgtccaagaatagatctttaaggaagtccaaaaaaaaacttagcaatcgcacgaaggtttcgtacaccgggcgattatcactcaccgacttctggaagtcctggagccatttgttggccttctcctgctccttgggattgttgccttggaagagggcgctgattgcttggtacaccacgtccaccgagtacgtatccatttcatcggcagctttaatcagcgcataaaatttcttaattacttattattatactttattagcgatggctgattgcgtacatcccgtgtatcgataacgcaaggaggtggcatgcgataactttgaaaggtgaatgtccgatagtctgcaggactttttgaaattattcagggttgtcaagtgcgtcaaacattaaggaccattaaaaataattaaaatatttttacagtcaaatattttttagcttatgtgaattcgttttttgagcaataaagctactcggtttttatatcttaatacttgccacccctatgtagtcgatacatcgataccattggttgctcgcaacaacatctctaatcagttttctgatcagaattctgcaatggattcggacagcaccgtgacttccttggaggagaacacggagaacttttgcacgaatcccacgcgcgacatcctcgccgagggcatcaccaatctcttcaagccgacgatcgagcggttggacgagcgcgtggcctccaccatccagctgcaggctgagctgcgtggccaactggatgcactggccgcccagctgagggacatcgaaaaggcgcagagtcagatacccgagttcgcggacaaggtgaaggagctgctgaacgtcaagcacaaggtgacggtcataagcaacgtgttggtgaccagccaggagcggctgacgggtctgcacaagctgatagagaaggagcagcggcggcgacaggcgcttctcgattccgcgctcagcaccaacatatcctaaatccaattactgttcgtcatggagacgccctacaccgaccacttgagcccagaagatttcgagcacgtttacgagccagcggaggactcgttcctgctgctggatgccctggaaaaggatctggagtacctggaccggctacagccgagtctctgcgtcgaactgggctccggttcgggtgtgatcatcacggcgctggccaagaaactggctggcttttcgctgtgcctagctacggatatcaatcccaaagcctgcaatgccactcgaagaactgcgactcggaatggcgctcgcttggatagcattcgctgcagcctagcggatgcactgcgtccgcgatccgtggacgtgctgctcttcaatccgccctatgtagtcaccagtgacgaggagctgcagacgcaacagttcgattcgcacagcgaatcctcaacggatcgcaatctggttttctcctgggctggtggacaggacgggcgacgcgtcacggacattctactcaagcaattggatgacattctttcgcctcgaggcgtgctctacctactcctgctgcgggagaacaagccggaggagattatcaaatacttagagggcctccagttccgggctgttaagttcatggagcgacgcattcctggcgagcatttgtgcatactgaaggtcaccaggtacttggcatcatcatgactcgtgcaatagcatcaaattaaagttgtattttaattaaaagataaacttttttaggcgtttattcttaaatttgatactaaataatatggagaataattttaataaaagttgaaataaatgaaagaaatggcttatgaaacttaaaagctcttaaacttttagaaatttttgcgcttatatttgaatttgaatataaaagtagctcaacttcatttgcccaacgaagagcccggaatttcatcattcgtttttttaataggcatctgctaaggctaatcgattttcaatccgaaaaaggtactta

SEQ ID NO: 21149 - DNA, 405 bp, DROSOPHILA
atggattcggacagcaccgtgacttccttggaggagaacacggagaacttttgcacgaatcccacgcgcgacatcctcgccgagggcatcaccaatctcttcaagccgacgatcgagcggttggacgagcgcgtggcctccaccatccagctgcaggctgagctgcgtggccaactggatgcactggccgcccagctgagggacatcgaaaaggcgcagagtcagatacccgagttcgcggacaaggtgaaggagctgctgaacgtcaagcacaaggtgacggtcataagcaacgtgttggtgaccagccaggagcggctgacgggtctgcacaagctgatagagaaggagcagcggcggcgacaggcgcttctcgattccgcgctcagcaccaacatatcctaa

SEQ ID NO: 21150 - protein, 134 aa, DROSOPHILA
MDSDSTVTSLEENTENFCTNPTRDILAEGITNLFKPTIERLDERVASTIQLQAELRGQLDALAAQLRDIEKAQSQIPEFADKVKELLNVKHKVTVISNVLVTSQERLTGLHKLIEKEQRRRQALLDSALSTNIS

SEQ ID NO: 21151 - DNA, 2675 bp, DROSOPHILA
gaatagatctttaaggaagtccaaaaaaaaacttagcaatcgcacgaaggtttcgtacaccgggcgattatcactcaccgacttctggaagtcctggagccatttgttggccttctcctgctccttgggattgttgccttggaagagggcgctgattgcttggtacaccacgtccaccgagtacgtatccatttcatcggcagctttaatcagcgcataaaatttcttaattacttattattatactttattagcgatggctgattgcgtacatcccgtgtatcgataacgcaaggaggtggcatgcgataactttgaaaggtgaatgtccgatagtctgcaggactttttgaaattattcagggttgtcaagtgcgtcaaacattaaggaccattaaaaataattaaaatatttttacagtcaaatattttttagcttatgtgaattcgttttttgagcaataaagctactcggtttttatatcttaatacttgccacccctatgtagtcgatacatcgataccattggttgctcgcaacaacatctctaatcagttttctgatcagaattctgcaatggattcggacagcaccgtgacttccttggaggagaacacggagaacttttgcacgaatcccacgcgcgacatcctcgccgagggcatcaccaatctcttcaagccgacgatcgagcggttggacgagcgcgtggcctccaccatccagctgcaggctgagctgcgtggccaactggatgcactggccgcccagctgagggacatcgaaaaggcgcagagtcagatacccgagttcgcggacaaggtgaaggagctgctgaacgtcaagcacaaggtgacggtcataagcaacgtgttggtgaccagccaggagcggctgacgggtctgcacaagctgatagagaaggagcagcggcggcgacaggcgcttctcgattccgcgctcagcaccaacatatcctaaatccaattactgttcgtcatggagacgccctacaccgaccacttgagcccagaagatttcgagcacgtttacgagccagcggaggactcgttcctgctgctggatgccctggaaaaggatctggagtacctggaccggctacagccgagtctctgcgtcgaactgggctccggttcgggtgtgatcatcacggcgctggccaagaaactggctggcttttcgctgtgcctagctacggatatcaatcccaaagcctgcaatgccactcgaagaactgcgactcggaatggcgctcgcttggatagcattcgctgcagcctagcggatgcactgcgtccgcgatccgtggacgtgctgctcttcaatccgccctatgtagtcaccagtgacgaggagctgcagacgcaacagttcgattcgcacagcgaatcctcaacggatcgcaatctggttttctcctgggctggtggacaggacgggcgacgcgtcacggacattctactcaagcaattggatgacattctttcgcctcgaggcgtgctctacctactcctgctgcgggagaacaagccggaggagattatcaaatacttagagggcctccagttccgggctgttaagttcatggagcgacgcattcctggcgagcatttgtgcatactgaaggtcaccaggtacttggcatcatcatgactcgtgcaatagcatcaaattaaagttgtattttaattaaaagataaacttttttaggcgtttattcttaaatttgatactaaataatatggagaataattttaataaaagttgaaataaatgaaagaaatggcttatgaaacttaaaagctcttaaacttttagaaatttttgcgcttatatttgaatttgaatataaaagtagctcaacttcatttgcccaacgaagagcccggaatttcatcattcgtttttttaataggcatctgctaaggctaatcgattttcaatccgaaaaaggtacttaatcaaaggaaatttccgattgaatttttccatcatcccttagtatatgatttctttcatagggaggattgtgggaaccagctcgtcaacccccgaacgaaaactgggatatggaagggatggatcggagtaatgtaggggcggccaatctatgaattatgtacctacatacgtacatgctcctggctaagaactactacccctgggaacaccgaagcgaggtgattgccccacccaaaatggccaactgcaattgaaacaaacttttattggcatcggaacagatgccaaatgggtggtatgtacgtacggttttcgcttttacgtaattacaataatttatttcatcgttcaaaattgtttcttattctcgttttcgattcgtggttcttttctctttttgccctttcgcgctactagatgttattctcgcacggagcagatacatgagtaattggtatttacaaaaatgcatagttctttaacattgtctgtgatatcgctattgtttatcagttatcaaatcggatgatttatcttgggcatattggtttaattgcactcaattattcagttgctggttggcattaccagctttaagcctcttggagtttggatctgggtcagtgggtggattgtgtgtgtatgttgggctggtctgtctttccgggacaaatcgtttagattcgaggat

SEQ ID NO: 21152 - DNA, 675 bp, DROSOPHILA
atggagacgccctacaccgaccacttgagcccagaagatttcgagcacgtttacgagccagcggaggactcgttcctgctgctggatgccctggaaaaggatctggagtacctggaccggctacagccgagtctctgcgtcgaactgggctccggttcgggtgtgatcatcacggcgctggccaagaaactggctggcttttcgctgtgcctagctacggatatcaatcccaaagcctgcaatgccactcgaagaactgcgactcggaatggcgctcgcttggatagcattcgctgcagcctagcggatgcactgcgtccgcgatccgtggacgtgctgctcttcaatccgccctatgtagtcaccagtgacgaggagctgcagacgcaacagttcgattcgcacagcgaatcctcaacggatcgcaatctggttttctcctgggctggtggacaggacgggcgacgcgtcacggacattctactcaagcaattggatgacattctttcgcctcgaggcgtgctctacctactcctgctgcgggagaacaagccggaggagattatcaaatacttagagggcctccagttccgggctgttaagttcatggagcgacgcattcctggcgagcatttgtgcatactgaaggtcaccaggtacttggcatcatcatga

SEQ ID NO: 21153 - protein, 224 aa, DROSOPHILA
METPYTDHLSPEDFEHVYEPAEDSFLLLDALEKDLEYLDRLQPSLCVELGSGSGVIITALAKKLAGFSLCLATDINPKACNATRRTATRNGARLDSIRCSLADALRPRSVDVLLFNPPYVVTSDEELQTQQFDSHSESSTDRNLVFSWAGGQDGRRVTDILLKQLDDILSPRGVLYLLLLRENKPEEIIKYLEGLQFRAVKFMERRIPGEHLCILKVTRYLASS

SEQ ID NO: 21154 - DNA, 3236 bp, DROSOPHILA
ctccacatggttgatcgtttgcttgagacccactgtgttctgctcctggcggctttcctccgcttgcagcgtctcaaaggacttgtcgatcttacggcccaggaggtactcctcgcggttgatcagctctgtgctgtctggagcaagataaatatgtatggataatgagttttataagagtttcacatgtatgactcacttttgtacatccactccagcttggcctcgccggcggctccgccattattgctcagcactccggaactttcgcccaatcgccttagttcctctctgtcccgctcctcgttgatctccttgcgcagatcctgcagcttgcgctcctccatcttcgcttgctcctccgccttccaaacgcgctcctggtttttcatcgtgtgcggatgccatgatttcttcagattctgcgggaaaaatcaatggtaattgacggataatcagttgggagacattacttactagatctccgccacccatcttgggtttgatttgcgttttaacagcaaaacaaacaaattacaaacaattccagattttccctccttttctgttgttttcaacaaaatcatatgttcgcccgggctgccagatcgtggtgaagtaatttaacttggtgttgccatagggttacatttttcttttactttttcgaaaattattgaaaatagttaatttagttacttattttcataattacttcctcatcgtgcattgtattttcagtcaaaaacaggtaataaatttatttaatatgcttccaattcggcagagtttataccaaagagctcaaactcgatttacaaaattaagatttccaagattttttagcaaagacgattgcaatggaaagcaagtaaagaagttgagcttaaaaaatgtagatgtggctgggaaaagggtttttatgaggtgagtatccttgccagatatgttttagtgtgtgatttataaatttatttttagagtggactttaatgtacccatgaaagatggcaaaataaccaacaaccaacgaattgtttccgcacttcccagtattaaatatgccttggacaagaaatgtaagtccttggtgagttgatatatcttccttcaattcctaaaaagtatagaacgaataacttaattttttgcctaggttttggcatcccacttggggcgtccggatggcaaaaagaacaaaaagtttagcctggaacccgtggccaaggagctggagagtgtgctgggccagccggttcaattcctggacgactgcgtgggtgatagcaccctgagagctttgaaggatccctccgacggcactgtgttcctgttggagaatcttcgtttctatgccgaggagacgggcagcagcaaggacgataacaagaagaaggtcaaagcagatcccgcgaaggtgaaggaattccgagccaagttggcgcagctgggcgagatctatgtgaacgatgcctttggaacagcacatcgtccgcatagttccatgatgggcgatggctacaaggtgcgagcggctggtttcctgctggacaaggaactggagtactttgccaaggttctccacgatccggccaagccctttttggccattctgggtggcgccaagatagccgataaaattccactgataacgaacctcctgaacaatgtaacggccatgatcatatccggtggcatggccttcacctttctcaaagtgctcaatggcatggagattggaaagtccctcttcgacgagaagggatccgagttggtcaacgacatagtctgcaaggcgaaggagaaggacgtgaatatactatttccgattgactttgtcatagccaataagatcgacaaggagccggataaagtggaacatgtggatgccacacagggcataccggaggacatgatgggtctggaccacggccaggcatccagtcagatgtttgctggcgctatttgtgcatccaaaaccatcgtctggaacggaccgccaggcttgttcgaaaacgagctattctccaaaggcaccgagtccatgctggaggcagtaatcggggccactaaccgaggagccaccacaatcgttggtggtggggatacggccaccgcttgcttgaagttcggaggcgccgacaaggtctcgcatgtgtccaccggtggaggagcttccctggagttgctggagggtaaggttctgcctggagtggctgctctttcggatgcctaaacgcactgctttacaatggttattccacttatatgtacatgtatcttaaattcaatttggacaatttaaacaatcagtctctcaaaatacaaagttatttttattgtggaataacattagtcggttaaaacgtgataaaagggcgggcctcgatctcgtgcagcactactttccaactatctttttacctccatagatttggtctaaacttaaaatttatcatgttcctctttctcgcaacaaaaacttttgaaatagtaactaataaccgcgttcaactaaacaaaacatacattttttcgcttaacagccgcacgagaactttctgacccagccctgaagggtaatacaaatggaataacatctcttggattaatcaaagctaatcagttccgccgtagccggctcctcagctttaacgggcgcgggtcccggttcgttttgcggcggagcaggtgcagcagccaccgcttggacttgattgttggcgatttcggtaactggaggtgcctgtgctgctggaggagcctggtgctgctgcagcattacgtgacccatttggggttgtggctgaggttgctggacaggaatctgctgtggctgctgaccaggaatctgttgaggctgctgaccaggaatctgttgaggctgctgaccaggaatctgttgaggctgctgaccaggaatctgttgaggctgcggttggaatggtatttgaggaggctgggcgatcgaatgctgctgcggcagctggaggatagcagcaggattgttggcaaactgattttcgggcatgggcggcatcatctggggatttccaggtggcgcgggctgttgcattaatccgccgggctggagattcggcggcatcggctgctgtattgccggattgtacatgcccggcggaatggcctgaaactggccatgtccgttgggagccggtgcaggaccctgaggcaaatagccgggcacaccggcagcatagggattataaacgttg

SEQ ID NO: 21155 - DNA, 1170 bp, DROSOPHILA
atgaaagatggcaaaataaccaacaaccaacgaattgtttccgcacttcccagtattaaatatgccttggacaagaaatgtaagtccttggttttggcatcccacttggggcgtccggatggcaaaaagaacaaaaagtttagcctggaacccgtggccaaggagctggagagtgtgctgggccagccggttcaattcctggacgactgcgtgggtgatagcaccctgagagctttgaaggatccctccgacggcactgtgttcctgttggagaatcttcgtttctatgccgaggagacgggcagcagcaaggacgataacaagaagaaggtcaaagcagatcccgcgaaggtgaaggaattccgagccaagttggcgcagctgggcgagatctatgtgaacgatgcctttggaacagcacatcgtccgcatagttccatgatgggcgatggctacaaggtgcgagcggctggtttcctgctggacaaggaactggagtactttgccaaggttctccacgatccggccaagccctttttggccattctgggtggcgccaagatagccgataaaattccactgataacgaacctcctgaacaatgtaacggccatgatcatatccggtggcatggccttcacctttctcaaagtgctcaatggcatggagattggaaagtccctcttcgacgagaagggatccgagttggtcaacgacatagtctgcaaggcgaaggagaaggacgtgaatatactatttccgattgactttgtcatagccaataagatcgacaaggagccggataaagtggaacatgtggatgccacacagggcataccggaggacatgatgggtctggaccacggccaggcatccagtcagatgtttgctggcgctatttgtgcatccaaaaccatcgtctggaacggaccgccaggcttgttcgaaaacgagctattctccaaaggcaccgagtccatgctggaggcagtaatcggggccactaaccgaggagccaccacaatcgttggtggtggggatacggccaccgcttgcttgaagttcggaggcgccgacaaggtctcgcatgtgtccaccggtggaggagcttccctggagttgctggagggtaaggttctgcctggagtggctgctctttcggatgcctaa

SEQ ID NO: 21156 - protein, 389 aa, DROSOPHILA
MKDGKITNNQRIVSALPSIKYALDKKCKSLVLASHLGRPDGKKNKKFSLEPVAKELESVLGQPVQFLDDCVGDSTLRALKDPSDGTVFLLENLRFYAEETGSSKDDNKKKVKADPAKVKEFRAKLAQLGEIYVNDAFGTAHRPHSSMMGDGYKVRAAGFLLDKELEYFAKVLHDPAKPFLAILGGAKIADKIPLITNLLNNVTAMIISGGMAFTFLKVLNGMEIGKSLFDEKGSELVNDIVCKAKEKDVNILFPIDFVIANKIDKEPDKVEHVDATQGIPEDMMGLDHGQASSQMFAGAICASKTIVWNGPPGLFENELFSKGTESMLEAVIGATNRGATTIVGGGDTATACLKFGGADKVSHVSTGGGASLELLEGKVLPGVAALSDA

SEQ ID NO: 21157 - DNA, 2960 bp, DROSOPHILA
agctattgcagaccttcagagccgaacagcaaatcagaagtcagtcgccttttcttcgacccactccgcacattatgatattcccctgtgttcccagtgtcatgtgccagaccagagcaaacattaatccgagtcccaatctattccctagaccggagtctgaaatatgctggatacctaactccaagccacaaaacctcgcgtgaggaatggtcagttaaagacttaataaaatatactttttctataaaataacataataaataaaaataaattaaaaatatttaaaacctcatcttctggttgtcagatatgggtgatacaattggaactgatatggcaagtattccgctggctgtcaaaaccgcctcaagtttggatgtatccacattttggggaattagaattttttgcttaatattcacgttcttataatgggcccgaacatagatgtgactatccttcagctgaatgcaaatattttcaatgggaaaatctcgcatatcgaactcccaggacactctattttccttttcccctttagttcgcatagcctttatccatgtagtgctgatatcttcaacttcttcggcattgttcatcattcggcaacagtcgtaaacatctttttccagttgttttaccctcttttcgcattcggattgcattattctaaaatcttgggaatcgaatacaggacacttatatttttgcccagacattttgaatgcttttgtcaagacttattttgatagttttgattttcttttggtcgtttgacatatattcctgagtctgaaacatatggaaaataaataaaatatattgtcatacaattttattattaaccaactgtttgcaaaggaagtaggctagttggttaaagtctgtatcgataaaggttaatcgataagctgtttcgctaaaactgtgacagtgtgtgtctgaagtaaagcttcgcaatataattatttagcaatttgtgtcgtcaaaaatagacatgaacgactacgaactggaaaccatgctccgcataaacagcatcatggtgatcagaaaactaggatccggatccttcggagacatctacgaggccaagcacatggggtcaggactccacgtagccctcaaggtggagcgcaaaaatgccggccaatcgcacttgagcatcgagtccacggtgtacaatctgctgagacatggtatgggaatcccgatgacgtaccagtttttctcaaacaggcggcacgacgtgctggtcatggagttactgggcccctcgttggagacgctattcacgatgtgtaatcgccgcttctccatgaagactgtactcatgctggctgaccagatggtggaccgtttggagtacctgcacctccatcactacgtgcaccgcgacattaagccggaaaactttctgatgggcgttggcctgaccagacaccggctccacctcatcgacttcggcctatccaagcggtactgggacatgaaggagaacaggcatgtgccacaaaggcgcggcacaaagtgggccggcaccgcccgctacgcctccgttaacgccctttgttgtaaagtgcagtcccggcgggacgacttggaatcggtgggctacgtcctcatttaccttttgcgaggtagcctgccctggcaaggcctcttgcccaacagcaagttgcagaaggcggagatgatcttggaaatgaagctgtccaccttgccgaatagcctgtgtgctggatatccaaacgagttctacaactatattatatacacccggcaactgggcttcgaagaggaaccggattatcggatgattaggtgcaccttcttgagtttgctgtttaatctgaagttcaccaatgatctcatctacgactgggaccacgccgagaagaacagtggcaagagcggctcggaggaagatagggtggtggtgaaaaaggtcgtctaagggcggcggactgctggtagtacgatgcatattccatgttgaataaaaccgtccgacttttctaaatgtcacaaatgccaattttgaaatacacaaactgccagctaccaaaatgagtccaattaacaaaactggcatttgtgcaacgtttgcattccgggtagattcacagattccatctggaaacgggagggccgagcaactttcgaacaaatgaaaacgtagcaaatgacagcatccaatttacgtttgcaattaaactgacaccgaacagacacttgatttagtcgggagccagtcagtccatgggtctggtccggagccaccccccaagtcactcggttctggaaaatgtcgatttatggacgtgggcagtcgaactacttttactggccagcagatttatgaatatgaaagcacaccaaatggctctttatttgcctgtttatgtggcaggaaacctaaccagcaggacgcatccttttagcaggatgcgggagagggtgcgggtgcgagtgcgacctcctcggttaggatcatcaccgccttgtggcacctgaacaggcccgtgtagtcggccatcttttttttttttgtgcaggcgggctgaattttcaatttgtttggcaacttgtcgaaaataatttgaagctgagttttgatttgatttgaatcatagtatgtactttggaattacagatggctcggtatgttttaagaaagatttccgtttaatatctagtttggtaggcattccagttatgagctgttatttatatctctagactaattgtatatgacttccttaattgtctgccgtacgaggtgtgaaatagctggtgttaatgaggcataggagttggagccatatatcaccgaactggacaaaacggttggaaccaacgcaagggaattattaatgcggacttcttatcaaaaatggcagcaatcagcacgctcgcttagcacctcgttgggcgagtgtgggaatctcctggac

SEQ ID NO: 21158 - DNA, 960 bp, DROSOPHILA
atgaacgactacgaactggaaaccatgctccgcataaacagcatcatggtgatcagaaaactaggatccggatccttcggagacatctacgaggccaagcacatggggtcaggactccacgtagccctcaaggtggagcgcaaaaatgccggccaatcgcacttgagcatcgagtccacggtgtacaatctgctgagacatggtatgggaatcccgatgacgtaccagtttttctcaaacaggcggcacgacgtgctggtcatggagttactgggcccctcgttggagacgctattcacgatgtgtaatcgccgcttctccatgaagactgtactcatgctggctgaccagatggtggaccgtttggagtacctgcacctccatcactacgtgcaccgcgacattaagccggaaaactttctgatgggcgttggcctgaccagacaccggctccacctcatcgacttcggcctatccaagcggtactgggacatgaaggagaacaggcatgtgccacaaaggcgcggcacaaagtgggccggcaccgcccgctacgcctccgttaacgccctttgttgtaaagtgcagtcccggcgggacgacttggaatcggtgggctacgtcctcatttaccttttgcgaggtagcctgccctggcaaggcctcttgcccaacagcaagttgcagaaggcggagatgatcttggaaatgaagctgtccaccttgccgaatagcctgtgtgctggatatccaaacgagttctacaactatattatatacacccggcaactgggcttcgaagaggaaccggattatcggatgattaggtgcaccttcttgagtttgctgtttaatctgaagttcaccaatgatctcatctacgactgggaccacgccgagaagaacagtggcaagagcggctcggaggaagatagggtggtggtgaaaaaggtcgtctaa

SEQ ID NO: 21159 - protein, 319 aa, DROSOPHILA
MNDYELETMLRINSIMVIRKLGSGSFGDIYEAKHMGSGLHVALKVERKNAGQSHLSIESTVYNLLRHGMGIPMTYQFFSNRRHDVLVMELLGPSLETLFTMCNRRFSMKTVLMLADQMVDRLEYLHLHHYVHRDIKPENFLMGVGLTRHRLHLIDFGLSKRYWDMKENRHVPQRRGTKWAGTARYASVNALCCKVQSRRDDLESVGYVLIYLLRGSLPWQGLLPNSKLQKAEMILEMKLSTLPNSLCAGYPNEFYNYIIYTRQLGFEEEPDYRMIRCTFLSLLFNLKFTNDLIYDWDHAEKNSGKSGSEEDRVVVKKVV

SEQ ID NO: 21160 - DNA, 4981 bp, DROSOPHILA
tatatataaacacggcttgcttaagaacctagaccctatctagaacccaccgagttctcccaccgctgccttctttctcattgagccttttttttacttgatctaaacggcgacaaagtgttgaacgaaaaaatattttgtggacttttgggcatggaaacatttaccttgcttatggagagcagctgaggaatttgttttctttgcttgtcttttttggtttctttaacacttgggtcgcacttttaactagtttctctgttttttttattttcatttagtttaattttttagcatttagtttttaggttaaaacaacatcacttggtttcacgtttgatttgaattgcgtgtttctttcgcttttatacaaaggaaatgtttcgtttacattttaatttagttaatttgatttaatttaagcaagtttttcaaactttaaaacaaactaaaatggtggatggcagcctccccatcttctccacctcctccactccctgctcctatttaagctgaagtttaacacagattaatgcactggtaaaaaagatgatttctcaacctcatcgacggacctcatcttatttctattctttaaagatttgcatacagtcgagcttgtctaacgtggaactcaatatggttcatattgtttaagtatatatgtttaaaatgatttttttcagtcgccaatttagtaacagattttaagaacactgtgaaatgctattttcaaattttaaaaaacctcaaaacaccgcagaaataaaatattgaaaaatttcaaaaatattcttatgacttacgaaatattctgaaatgctcacagctagttaaattttagatagctacttttgcgatcattcgaatcgaaccaactgagttcgcgttagagaagttcgactgtacgattctagggctgctcccgcttgaaatgcggccacccattcgacgccgaatcctaggaggactcatagccgaaccaggcggccgacgaatgctattcgccacccgctccgcccgccccgccaaagctgttaaagtgccgtaccgctcccggtgccgccgccgctccaaactgcagactcaactcgaagagtcggcgggcgtggagctgctgctgctgctgctggtggtggtggtgctgctggtgatggtggtgctgatagtggtggtgctggtgcagcggattcagattgagatggccaccaagcaccgaggatgcggatccggccggcgaggcggaactgggcggctggagtggcaggccactgttgctgccggcacccggtgacaattgggagttgctgctggtgccgccgacggtctgctgctgcgagtgctgcaactgatcgctcgtgtggaacaggtgcggatggtgggcgggattcaggtgcggatgctggtgcggatgcggatgcgggtggtgcggatgctggtagcgcatgggatccatgtacatggcggctgctgcagcggctgctatgctggatgcctgctgttgttgctgttgctgctggtggtgtttaacttgctcctcgttgttattgttattattgttattgttggtgctgctattgttgttgttattattattattattgttgttagcctgattgccagcggaggagctgcccagcggactctgcggcgacatcacctggctggtcatcgtagccgatgatcccgcactggaggatggtgtattcggtgtgtgctgctgctgctgatgttgctgctgttgctggtgttgctgctgctgctgttgctgctgctgctgttgctgctggcttagactattgagggatgcaggagtggacgcagctgcagctgagttcgactcctggatttctgattgctagtgggccgccaactgatgcgccgctaccgccgaggattgcatattctgtgggctcagcatgggcggactgtgcgagtgggagtgtgtgcccatcggactgccgtgcatatcgtgatgcggatgatagccaccatgatgcatatggcccggcggcatgccgtccatcatgtcgccgccgagcgtatttggcggcgtcatgcgcttctccttctgccgccgattgcagaaccacacgcgtaccacctccttctccagctgcaaggagtcggccaacgaggttatctcctgggcggatggcttcggctgcttgtggaagtgctgctccagtgcccccttcacgctcacctcgatgctggtgcgtttcttgcgcttacgcccctgagcggcgatcttgtcaatggacgtgggtgaacccgttgtggagtccgcctcctccagccacttctgcagcagcggcttcagcttgcacatgttcttgaagctcagctgcagtgcctcgaatctgcagatggtcgtctgggagaacacattgccatagagagtgcccagtgccaggcccacatcggcctgggtaaagcccagcttgattcggcgctgcttgaactgcttggcaaaggcctccagatcatcggacgtgggagtgtcctcctcgccgccgcttatggcatcccgatcgccgccgcccatgtgatggtgtatgtgcagctgtggcgattccccgcgcagcgtatgatgcagtggcgccacactctgatgatgggccgctgcaaccgcatgggccggatgatggagcattccgttcatggcatgatggtactgcaacggtgacccgcccgttggcgcatagtgtcccgcatggggggcatgccaggcggcatggggcgaggccatgccctgttggatgcgcgtctgctgcgagagatgcgacatctcctgcttgacggtatcagcggccgaggcaacggcagcggcggcgggcagatggtgcgtatgatgggtttgcatccacggatccggatggagggcactccatgagcccaacccggaaccggaacccaatccaagtccgccaccattgccctggccattgggcgatggcgacgagggcaactgatggtgggcagctgccgcggcagcggcatgatgatgatgatggtgctgcatgtacttcatttcaccggcatcagccgccgagcgcggcgacgaggtgtgatagccaccgcctccgagggccatgtccagatcaccgctcggcggcgtcatgtacgaggtcgcggccatccccaccgctctggggctgttcaggccctccacgctggcggggtagggctccaagttggggctcagtttaacgactttgtacaccgatcgatcgaaaggaagaccagggtccctatgctcattccactcgaaccgtgaggcaaccgtcttgacgtcttttacgggcaacgtggcaggcgcaaaaatattctatttcgcttattttgtttttttttgggttcgacgtttgcttttttgggggcgtggccctcgaacgcgttcaacaagtttatttcagctttgggttaagtaaaaaatccgacggcaatttgcttggggtttcacgtttatttagcttgactagcgttgagctaactgcgttttatttggttatttatttagatttttttattttcgaatttcatttagcacttctaacacttggcactttttgtggcgatttttcgcaacgatttaaatcatcgatagaactcagtggtcagaacgcagaactctgatattcagatacagattgagatttctcgaatgtgtgtttctactgggttgcttgaccgattcgatgccgattgagatttgagattgtgtgttgtgagatttgagcagtcaagacagccgagagcccagggaaaattcacgtgcagactcgtagagctatcgaagtgaactaacgtcatgtctcgcaccgcagctctacgttgagcgctctcgacgctcggcggtacgtcacaccgatacgtttacgcacaccaacgagcgcagtacgcacacacaccccggcgagcgaaaccagtttgtccgctggccttccagcgttccatgtgtgcgagcagcaccgccattggtgcggcaagcgagatagacgctctaccgagcaactggaagggagacttgcgctctattgggctcgctgtattccagcgttacgcccccaaaaccaacaaaaacaaaaaaaatatatgagatgaaaaaataataccagagccggctctacgaagttccctcagtgcattcccatgcagagtgacatttttaattgcccagtgcccagtgcgagcgagagagggcgagagatgatatgaacggcgacggcgcatctctcgatttcttcgagtccagctatcgggaacacagggattacacgtagtgccatctcccagttggagcttttgcgtccaggacttctctctcccgttcggggagctttgtttcagttccttgcagctccttggccagacaacttttcccttggctttgtgagtgtgtgtgtttgtttgggaggggggacatctggagtggttgccattgcgatttgaagaacatattactaacgtggcgtagaaaaggaattaaacaaataaacagtttaaatatttaactatttatcgttcatccaaaaaagtgtgcatagtaaaaatatttaagagcaaataatatttgattatcaatatgaaaaataaataaatcttgaacttgaatttggacaattcaaatttcgctgaattctgttgaaaatattttttatatagaccgtgtcccattaaatatttaaccaatgtgttatataagaaaatcttatttgtattttttcagtttataatatgtgtgagtgaagcttaattaaattaaagaaagtaaattagtgtttagtatgaaatgatatttaaaattttcgtttaaaaaaataaccattttaccgatgaatattttataattttctttttcatatgcatataagtttcgtttggctgcctacataaaatatacctttcttttccaccttgatatctttcttttgctcattgtgtttgtgactgtgttttgactgctttacagttaaat

SEQ ID NO: 21161 - DNA, 2364 bp, DROSOPHILA
atggcggtgctgctcgcacacatggaacgctggaaggccagcggacaaactggtttcgctcgccgggacgtcaagacggttgcctcacggttcgagtggaatgagcatagggaccctggtcttcctttcgatcgatcggtgtacaaagtcgttaaactgagccccaacttggagccctaccccgccagcgtggagggcctgaacagccccagagcggtggggatggccgcgacctcgtacatgacgccgccgagcggtgatctggacatggccctcggaggcggtggctatcacacctcgtcgccgcgctcggcggctgatgccggtgaaatgaagtacatgcagcaccatcatcatcatcatgccgctgccgcggcagctgcccaccatcagttgccctcgtcgccatcgcccaatggccagggcaatggtggcggacttggattgggttccggttccgggttgggctcatggagtgccctccatccggatccgtggatgcaaacccatcatacgcaccatctgcccgccgccgctgccgttgcctcggccgctgataccgtcaagcaggagatgtcgcatctctcgcagcagacgcgcatccaacagggcatggcctcgccccatgccgcctggcatgccccccatgcgggacactatgcgccaacgggcgggtcaccgttgcagtaccatcatgccatgaacggaatgctccatcatccggcccatgcggttgcagcggcccatcatcagagtgtggcgccactgcatcatacgctgcgcggggaatcgccacagctgcacatacaccatcacatgggcggcggcgatcgggatgccataagcggcggcgaggaggacactcccacgtccgatgatctggaggcctttgccaagcagttcaagcagcgccgaatcaagctgggctttacccaggccgatgtgggcctggcactgggcactctctatggcaatgtgttctcccagacgaccatctgcagattcgaggcactgcagctgagcttcaagaacatgtgcaagctgaagccgctgctgcagaagtggctggaggaggcggactccacaacgggttcacccacgtccattgacaagatcgccgctcaggggcgtaagcgcaagaaacgcaccagcatcgaggtgagcgtgaagggggcactggagcagcacttccacaagcagccgaagccatccgcccaggagataacctcgttggccgactccttgcagctggagaaggaggtggtacgcgtgtggttctgcaatcggcggcagaaggagaagcgcatgacgccgccaaatacgctcggcggcgacatgatggacggcatgccgccgggccatatgcatcatggtggctatcatccgcatcacgatatgcacggcagtccgatgggcacacactcccactcgcacagtccgcccatgctgagcccacagaatatgcaatcctcggcggtagcggcgcatcagttggcggcccactagcaatcagaaatccaggagtcgaactcagctgcagctgcgtccactcctgcatccctcaatagtctaagccagcagcaacagcagcagcagcaacagcagcagcagcaacaccagcaacagcagcaacatcagcagcagcagcacacaccgaatacaccatcctccagtgcgggatcatcggctacgatgaccagccaggtgatgtcgccgcagagtccgctgggcagctcctccgctggcaatcaggctaacaacaataataataataataacaacaacaatagcagcaccaacaataacaataataacaataacaacgaggagcaagttaaacaccaccagcagcaacagcaacaacagcaggcatccagcatagcagccgctgcagcagccgccatgtacatggatcccatgcgctaccagcatccgcaccacccgcatccgcatccgcaccagcatccgcacctgaatcccgcccaccatccgcacctgttccacacgagcgatcagttgcagcactcgcagcagcagaccgtcggcggcaccagcagcaactcccaattgtcaccgggtgccggcagcaacagtggcctgccactccagccgcccagttccgcctcgccggccggatccgcatcctcggtgcttggtggccatctcaatctgaatccgctgcaccagcaccaccactatcagcaccaccatcaccagcagcaccaccaccaccagcagcagcagcagcagctccacgcccgccgactcttcgagttgagtctgcagtttggagcggcggcggcaccgggagcggtacggcactttaacagctttggcggggcgggcggagcgggtggcgaatag

SEQ ID NO: 21162 - protein, 501 aa, DROSOPHILA
MAVLLAHMERWKASGQTGFARRDVKTVASRFEWNEHRDPGLPFDRSVYKVVKLSPNLEPYPASVEGLNSPRAVGMAATSYMTPPSGDLDMALGGGGYHTSSPRSAADAGEMKYMQHHHHHHAAAAAAAHHQLPSSPSPNGQGNGGGLGLGSGSGLGSWSALHPDPWMQTHHTHHLPAAAAVASAADTVKQEMSHLSQQTRIQQGMASPHAAWHAPHAGHYAPTGGSPLQYHHAMNGMLHHPAHAVAAAHHQSVAPLHHTLRGESPQLHIHHHMGGGDRDAISGGEEDTPTSDDLEAFAKQFKQRRIKLGFTQADVGLALGTLYGNVFSQTTICRFEALQLSFKNMCKLKPLLQKWLEEADSTTGSPTSIDKIAAQGRKRKKRTSIEVSVKGALEQHFHKQPKPSAQEITSLADSLQLEKEVVRVWFCNRRQKEKRMTPPNTLGGDMMDGMPPGHMHHGGYHPHHDMHGSPMGTHSHSHSPPMLSPQNMQSSAVAAHQLAAH

SEQ ID NO: 21163 - DNA, 5709 bp, DROSOPHILA
cgcaagcgtgagcattgaatatgccatatgtgtgtgtgtgggtctcgccctttatggctccctagctgctgagccacataacctcggattcaggattcagccgggttcgggttgctgggttcggttagcgactttatttaatacgcagcactagagtaaacgcatttttagatgtttgtatccgcctgagctggagacactcaccatcaccgccgcttgagtatccttgccttgtggcttccgcacctgcccatgctcaccgcctcgcttacgctcacccgccatttctctctgtgtacccgctaaccatggaaccactttcttcctatgacagagtcagccgtggcatatagttccgccccagcattatccactaatctctatcaacagccactgccaacgggccgctcctccggctccaactccaggttaagtctgttggagagcttggtctgcatgactgccgatcccatatcgttgtgcttttggatttgtttgcaggtaaacatgaagacctctcatcttttataatatttgtatatgaaaaccttttttggcaaacattcaattacttttaaacgtgcaattcattcctttaaatatttacatagctcgcaaactctttaagcccgaaaagatttcaagtcctgatggcccttcaggtgccacaactcctccaacagggttgtaatgtgaattgtagtcgttaagcaattttcttgtacttttacaatgccagaggaaaggtatgaggtcatatatggttgccaggagccgctgaaaattgtatctcgatccagatttaacccatgagaattaacaaaattatacgaatctattacagtagcgcagatagaatttactttattcaggactttcatgtattactttttgacatcgatttttgtgcacataaatttcgatatacatgaggattaaatttagagttttgaagattgttgttgtaaggctacacaggtataattgcaaggcgtttcacttttttttttttaaggaatggtgtttaaaagtgtgcacgtgttttaactttgttttcaaagacgactgcctttttcagataagcgtttgtttcgtaagctaattaattgtattccatttcagtcacaatttctcactttggcctgtcgtgtgtgtgtgtgtgtgtgtgtgcttgtgcatgtgtgcgtgtatctgtattccacgagtgtggtagtggtactattccgtctacacttggaaatttaagcactaagtccactcattttacattttacgcaacgtttgcgctgtagagtgtgtgtgtgttgtgtgaggatgaacatggttggattgtagtaacttaactaatcttaactggtaacttagaactaactgaattgtcactggtgttacgttggccaaagcagccgtcgtttgttagctaattttttatcatgcagaggctaattttgatatcagcgattttatcaatttttgcttatttttttttttttgtggaaattttgcaactttcgattttcaatcttgctgaatttgttgcatttcaagtacgtgtcgaacgtttaaaaaatcgttggaaacttaattttgctatactgtgagggccgaaaagaagcgaaacgcgaaccaagttcattctttttataacaccaaacgctggccctgatcgaaatagcattgtcttggccagcgtttcaggcaacaggtggattttccagagcctattccacctgaattgcctgtactaaataacggtatgcgtataaaaacaaggatatcgagggctagagagattgtaagtgtgattatctaaaactaattccctagtgtttgcgttgcgcctacgtcgagcaatcgaaaagcaatccttcaaggatcaggatcgccagttttcgttgctcgcgcattttttcgagctgtttcatcttaaatgcagttatacatttataattttttttgtttagaagaccaggttttcttaaatgatctgatccctctccacgccgaggccccagttttccaatgttgttttgtttggattttttgatttttttttttgggggggtcactatatcgacgcttgagtcggtttgcgtgtgtgtgttttctgtgatgtgtgtgtggtggtggtataatggggtgattttcgattgcccacgctgggtggctataggtggcatttggatggccacccaacgcgatgcacatcccatggtgcgagcggtacttagtagacaatgagcaggttgttttcattgaatccagccgagtgaccagcattgcgtacaatgaaacaggatccgtcgaagtgcatgcgcttctcattacgactgcaaaaaaaaaaagaacaaaaggaatcttcaaatatccgattaactgaattactgcaaaagtatggaatcaattaaacactatcagtgttataatcgaataaatatacgacgagaacaatgcattcttcgagtgcatcattattgcaaataggtgtggatgcagtggccaactcaccggacgaacaggtgcgaggtcttgcccaacgaagccgtgcagtggatgccggtggtggtcagggtggcggatccattgcccggactggtgcgaatcaggcacttgctgtgctggcggctgaccttgaccaggccgtcggccgcctgggtgatgcggaatccattgatgtcatacacctcggtgccgtcctcggcgcaattgtaggtggagttggcgattacgtcgtgggcatcggacacaaaggatgggccgtggcgcgaatcgctggagggtgttgttaattggaaagaggagcttggcgaattgatttgggcaaatttcgtgcttaactcactcatagaacaccgccaaggtgtagtccttggtcaggtcggtgaaggtatcggtggtggtgcgagtgccagctgtgtccaccagatagatgagggcacaggactcgctggtgaagctaacgcccttgtaccacattttggcatagcgactggaagaaaatgattgcagctatagttgcatagattttatacgaaaatctaatgagaagtacaagtttaaattccaaaatactagttgtttgccactcttaaagtaaaggttcgattctacttctaagcttacacaaagttgttggccttcattccgtcgtaggtgacgatctccaccttggagccgctctgcaagatgcgcccattgggatggatgagggcagagttgctgcagttgcgcgataaggcggcggcaaccatgctgcgctgattcagcacacggacagccttgtccagggtcatgtcaatgctggaatcgggaatgatttggaatgatgatcaagggataaatctcctaccacgttcacttaccgaacgccctcgcgcaggcgcaactggatggtgccattggacatggcaatcggtccagatcctggacacggtggtggtgtgttgttctcgaactcaaaagtgcgcgagctgacgcgatccatagcaaaaggtggtggtggcattggcgatgggaactgctgggtgtgatgtgcctgtggctaggtagatatcgcatatttctaaaatacgaaacacggggcaataaatcaaagcacttaccatgcagtaggctccatccacctcatagccatagccagagttgaagcgtcccgttagactcttgccgctgcgcgtaatattgccggcatccatgttccagcccatggtctcgtagccggcaccagattgcggcaggactccgaagcccgagtgggaagatgcgtgcatgcccatattcatgtagctgcggccgcagctgtttgtctggctggagcactccttggccaggacggaggtgctggtgcccacgctggcgctgttgcccatgctgctgctgctgttgccgcgctccaagccgcgcttcactccgccagtcagcgaaaggctgctcatacgtggagccaatgggctgttcatcgatgacacaaagcgcatggtggcttgctagggattggtaagggaaaaggtatcacatggtacatcaaagatcacttgcaaaaaatgggaagaaaagatgacttgcaaaaaatgctaagaaaatatgacttgcaaaaatgacttgcaaaaatcaaagagacgattttttgcatatgccttcaaaatgaaggcaatcctatggagaagtgacaactctactcaccggcgatgggttgttgttggtgaatacggaacgctggcgcacaccatttggagccttggtgggcgagcgcaagatgttattgatcttgtcgttcaactgggcgcgggacaagaagtcctcggcattgaagatgccaacgcggccgctcttgggcgtggccaagggggcggggcccggtagagccagctcctcgacatggggctcatccagggcgccggagtgctggcactgcacctccttggtgctgctggtcttaggtgcaacggtgtcctgggcgtcggtaaccattttgtcaagattcgattgttcaaaatttatgggaaaaccgtatggaatcgaatgggtgatggatgatggtgttgttgttcttggttgaaacggggcctggactttggtatgtggatctaaacgagaacggcacacgcggcgtgctggacagcgaaaatcaaagtactctgctcgacacggaacacaacgactcaatgagaggaatttaattttttactttttatgacttttcaagagcactgctcgctgcgacaattttcgaaagaatgacttgcctcaagtgccgatggaaggatgtgccatcaattctgacactcactggcctaccgggtttttcgatagttgaaagtgtcgtaatatcgagtacacgatactttacttttcccttcgtccctttgaagccctggcacttttagatttcccgtgaaagttcaacgtatatccgattagtgctgcatacttttagacggcaaaaagctgattgaattcaaaataacgcatttaaggacgacactgtagtgcaacccatctcctcgcttttagtggccggaaaacgaagtttcgccttcgtaattgaatcgagaaatagacttgaacacacgcacagcagtgcagcttccagcaatttattgccgctcatttgtatagtttctacgcagctataagctgcagcaaaagacttaggctttaagatttattgggaaactgcattttccgaacgggagaaagtgcaagagaaagtgccgtcattcttatcgatgctggttaaatgctgaacaagtgcgcagagttgcaaagttttgaagcgttggcaggaaatgtcaagagtcagataaaagtgatgtttgcacgtagcacagtttagtactttgctaataaaaagctatccccttctaaattgttgctttaacgtggcttaaatatgttgtcaaagtcaaacaatcacgcaatttaaatgtattatacattcaactgaaacttttaaattgacatattaaataagaactggcatttaaagtttctgcgaaatgtaaactgctcttatagaactttccagtcgaacagctacaaatttttggattatttcttaatgaataaacactaaaatcataatatattttagtaatagctgctcaatcgtttttcttgtcagttattagccattttatttgcctgaatgttgacatattagccacaattttggcaaacccccaaggtcgttttatttccatttttgtg

SEQ ID NO: 21164 - DNA, 3008 bp, DROSOPHILA
tgctcttgaaaagtcataaaaagtaaaaaattaaattcctctcattgagtcgttgtgttccgtgtcgagcagagtactttgattttcgctgtccagcacgccgcgtgtgccgttctcgtttagatccacataccaaagtccaggccccgtttcaaccaagaacaacaacaccatcatccatcacccattcgattccatacggttttcccataaattttgaacaatcgaatcttgacaaaatggttaccgacgcccaggacaccgttgcacctaagaccagcagcaccaaggaggtgcagtgccagcactccggcgccctggatgagccccatgtcgaggagctggctctaccgggccccgcccccttggccacgcccaagagcggccgcgttggcatcttcaatgccgaggacttcttgtcccgcgcccagttgaacgacaagatcaataacatcttgcgctcgcccaccaaggctccaaatggtgtgcgccagcgttccgtattcaccaacaacaacccatcgccgcaagccaccatgcgctttgtgtcatcgatgaacagcccattggctccacgtatgagcagcctttcgctgactggcggagtgaagcgcggcttggagcgcggcaacagcagcagcagcatgggcaacagcgccagcgtgggcaccagcacctccgtcctggccaaggagtgctccagccagacaaacagctgcggccgcagctacatgaatatgggcatgcacgcatcttcccactcgggcttcggagtcctgccgcaatctggtgccggctacgagaccatgggctggaacatggatgccggcaatattacgcgcagcggcaagagtctaacgggacgcttcaactctggctatggctatgaggtggatggagcctactgcatgccacaggcacatcacacccagcagttcccatcgccaatgccaccaccaccttttgctatggatcgcgtcagctcgcgcacttttgagttcgagaacaacacaccaccaccgtgtccaggatctggaccgattgccatgtccaatggcaccatccagttgcgcctgcgcgagggcgttcgcattgacatgaccctggacaaggctgtccgtgtgctgaatcagcgcagcatggttgccgccgccttatcgcgcaactgcagcaactctgccctcatccatcccaatgggcgcatcttgcagagcggctccaaggtggagatcgtcacctacgacggaatgaaggccaacaactttgttcgctatgccaaaatgtggtacaagggcgttagcttcaccagcgagtcctgtgccctcatctatctggtggacacagctggcactcgcaccaccaccgataccttcaccgacctgaccaaggactacaccttggcggtgttctatgacgattcgcgccacggcccatcctttgtgtccgatgcccacgacgtaatcgccaactccacctacaattgcgccgaggacggcaccgaggtgtatgacatcaatggattccgcatcacccaggcggccgacggcctggtcaaggtcagccgccagcacagcaagtgcctgattcgcaccagtccgggcaatggatccgccaccctgaccaccaccggcatccactgcacggcttcgttgggcaagacctcgcacctgttcgtccgtcgtaatgagaagcgcatgcacttcgacggatcctgtttcattgtacgcaatgctggtcactcggctggattcaatgaaaacaacctgctcattgtctactaagtaccgctcgcaccatgggatgtgcatcgcgttgggtggccatccaaatgccacctatagccacccagcgtgggcaatcgaaaatcaccccattataccaccaccacacacacatcacagaaaacacacacacgcaaaccgactcaagcgtcgatatagtgacccccccaaaaaaaaaaatcaaaaaatccaaacaaaacaacattggaaaactggggcctcggcgtggagagggatcagatcatttaagaaaacctggtcttctaaacaaaaaaaattataaatgtataactgcatttaagatgaaacagctcgaaaaaatgcgcgagcaacgaaaactggcgatcctgatccttgaaggattgcttttcgattgctcgacgtaggcgcaacgcaaacactagggaattagttttagataatcacacttacaatctctctagccctcgatatccttgtttttatacgcataccgttatttagtacaggcaattcaggtggaataggctctggaaaatccacctgttgcctgaaacgctggccaagacaatgctatttcgatcagggccagcgtttggtgttataaaaagaatgaacttggttcgcgtttcgcttcttttcggccctcacagtatagcaaaattaagtttccaacgattttttaaacgttcgacacgtacttgaaatgcaacaaattcagcaagattgaaaatcgaaagttgcaaaatttccacaaaaaaaaaaaaataagcaaaaattgataaaatcgctgatatcaaaattagcctctgcatgataaaaaattagctaacaaacgacggctgctttggccaacgtaacaccagtgacaattcagttagttctaagttaccagttaagattagttaagttactacaatccaaccatgttcatcctcacacaacacacacacactctacagcgcaaacgttgcgtaaaatgtaaaatgagtggacttagtgcttaaatttccaagtgtagacggaatagtaccactaccacactcgtggaatacagatacacgcacacatgcacaagcacacacacacacacacacacacgacaggccaaagtgagaaattgtgactgaaatggaatacaattaattagcttacgaaacaaacgcttatctgaaaaaggcagtcgtctttgaaaacaaagttaaaacacgtgcacacttttaaacaccattccttaaaaaaaaaaaa

SEQ ID NO: 21165 - protein, 513 aa, DROSOPHILA
MVTDAQDTVAPKTSSTKEVQCQHSGALDEPHVEELALPGPAPLATPKSGRVGIFNAEDFLSRAQLNDKINNILRSPTKAPNGVRQRSVFTNNNPSPQATMRFVSSMNSPLAPRMSSLSLTGGVKRGLERGNSSSSMGNSASVGTSTSVLAKECSSQTNSCGRSYMNMGMHASSHSGFGVLPQSGAGYETMGWNMDAGNITRSGKSLTGRFNSGYGYEVDGAYCMPQAHHTQQFPSPMPPPPFAMDRVSSRTFEFENNTPPPCPGSGPIAMSNGTIQLRLREGVRIDMTLDKAVRVLNQRSMVAAALSRNCSNSALIHPNGRILQSGSKVEIVTYDGMKANNFVRYAKMWYKGVSFTSESCALIYLVDTAGTRTTTDTFTDLTKDYTLAVFYDDSRHGPSFVSDAHDVIANSTYNCAEDGTEVYDINGFRITQAADGLVKVSRQHSKCLIRTSPGNGSATLTTTGIHCTASLGKTSHLFVRRNEKRMHFDGSCFIVRNAGHSAGFNENNLLIVY

SEQ ID NO: 21166 - DNA, 4621 bp, DROSOPHILA
ttaagattaggtagcgttgaaagagggcagtcaaatctgcttaggtcaggctttaggatgtttacaagaacggctgcgctgccaaagataaacgaatgctgcgcagctgggataccgttatggaaaattactagagtgcattactgatttctttgaaataatggaagtggctggtttggaccacccaacatacggtcactatatataccatatatacatatatacatatatacatatatacatatatacatatatacatatatacatatatacatatatacatatatacatatatacatatatacatatatacatatatacatatatacatatatacatatatacatatatacatatatacatatatacatatatacatatatacatatatacatatatacatatatacatatatacatatatacgtatataccatatatacatatatacatatatacatatatacatatatacatatatacatatatacatatatacatatatacatatatacatatagtaaaattgttgttttatttatgagtcgaactaatgtcccgtcagttgactaaggacaacgccaagaaataaaaaatagtttttaggagaaatagtttcactgactttattctttggatctaggcttaagactaaaaatcaaatgcaaattggattgaggagaagcctcagtatttgaacaatatttgtatttcgggagagcctcgctcttgggttcttaagattaggtagcgttgaaagagggcagtcaaatctgcttaggtcaggctttaggatgtttacaagaacggctgcgctgccaaagataaacgaatgctgcgcagctgggatacgttatggaaaattactagagtgcattactgatttctttgaaataatggaagtggctggtttggaccacccaaatacgtcactatatatattaaaatacatattatagaatcccttcgacttagcagcttgataccgcagtacacaaaagtttgcacattgcccaccgtcattaggctgagcgagtccaagagcctggatgtggaggttggcatgacgatcatgatacccaactaccagttccatcacgataagcaatactttcccgaaccggaggccttcaagccagagcgatttgataatggcgcctatcaggaattgatgcggaaaggcatctttctgccgtttagcgatggtccccgtatctgcatgggtaagtccttaaaatataaatatatatttatgtactttcacttgtgtccttataggtgttccattggccatgctgactctgaaatcggctctggtccacatccttagcaactttcaggtggtgcgtggaagggatcgactgattccgaagggagattctggatttggggtcgtactgcagggagatgttaatctcgaatatcgccgctttttcagatagacttgtattgttatcactatatattgccagctttcactgattaaatattgtgaaattattagagtacggtgatagcaatgtgaatcccatataatttactgcagctaatcaaagccagaacttacctctccaacaaaatcttatctgcaaggtacttgcactgtgccaaacaaattaaacaacatacgtagatgattgtaaaatactgattaaaatttgatgggtcttgttagtagagtatgtttccattccgttccagttttcagggaaacctggtggcgatcagatcgccttcttcggtggctgtcatgtttaccctagtgggtttgtgcttgaccatcgttcatgtggcctttgcggtggtctacttctatctgacctggtaccacaagtactgggataagcgcggagtggtcaccgccgagccactgaccattttgggctcctatccgggcattctgatcaacaagagccgcagtctcattctcgatgttcaggatgtctacaagtgagctttgccattaatcggagattgtttactacaaaagatttgctccaccagtaaatacaaggacaagtacaggacagtcggaaccttcattacgcgacagccgcagctcctggttctggatcccgccctggcccatgagattttggtggacaagttcagtcactttcgggacaccatcaccagcagctttgtgggccacaatccggatgacaagtacgtggcggggtcacccttcttcagcgctggcgacaaatggaagcgactgcgctccgaaaatgttggcggactgacgcccagtcgactgaaaatggcctactccatctgggagcagagtggccggaagctggtcgagtatatcgagcgggcgcggcgagaacagggcgatatcatcgaaaccagagatgtgagaacctagaccgaaactcatttccaccaagctaatataactcttcagcttgcctatcgatttacggccaacgcgatggcggatttcatctggggcatcgatgcgggttcacttagcggcaaggttggtgagatcggggacttccagaagacatccacggattggagtgctcacgccttcagctcgatgatccgcttcaacaagactctggtggccatcttcgtgcgaaagcttttctccatgcgattcttcaccaaagcaacggatgagttcttcctgcgactcacccaggatgcagtgaatctgcggcaaggtggaagtggcgagggtcgcacggactacctatcccatctcattcagctgcagcagcggggtaactccatccacgattcggtgggccatgccctcaccgtgcatctggatggattcgaaacatctggagccgtgctctatcacatgctctactcggttagtaaatttcacaattttcacatattattacatatataatcaattgaaaacaacgctgtatcttatcagctgagcgaacaccacgaagagcaggaaaagttgcgctcggagatactggaagccttagcctccgagggccaaatcagctacgatcagatcaacaacctgccctatctggatcagtgcttcaatggtaggaatatgggaaattatcagtatttcatagcttcgaaattaatatattatatatataatatataataatatataatatataatatatctaatatatattttcagaatcgctccgactgactactcccattggtttctttatgcgcatctgcaccaagcccactcagatcaatttgggggatgataaaaccctggacttggaacccggagtcaccgtgatggttccagcctatcagtaccatcatgacaatgacatctatccggaggccagtgaattcaggccggatcgattcgagaacggagcggcgagtgtccttaccaagcgaggatgcttcctgcccttcggtgatggacctcgtatttgcttaggtaaatccccaaccataatactaatatgtttataataatcttaatcttataacatgcgtatattcaggtatgcgcgtgggccaactgagtgtgaagacggccatcgtgcacatcctctcaaattaccaggtggagcagatgaagaaggtgcccctgggtgcggacagcgggatgggaatcttcctcaatggcgatgtcgaactgaaatataccaagctgcagaaataaaaggaagcgttcgtattcgtagttctgctctagttttttacacttttttggtcatgttgcataagtgcagtgggcagatgttgccttcatatgaggattgctgttggcttttcgctttttatattttggcgcaatagtaatttgtatacgagtgtgccagtgtgtgtgtgtgtgtgtaagtgttgcaagtgtgttggactttgggggcagccgcggcgaaatttaatttagcgcaaaccgaccgcagaccaactgacacgccccctttcgcccgtcgtttctcctgcttagcttaacatcaagcatatttaacaagaaaaaaaactcgttcatcgaattttaaaatgtgtaaattaaaggataaactatgcaatttttaatatttaccaaatgattttaagtaccttcaagatttgtagaataaactcataccgatgagaactgactacatttcaaagattttctctcagtgcgcagctgcgacttcactgcaggcactttcatactgagcgaccgcatgcagtggacggcgtcgaaggacgaaggacaaaggacaacaccgatccccagccacaatgcagccgcgtgtgcacgagtattgtgttgcagcgcgtttcctcgttgttatttactttactttttgcagctttttgttttgcaacatgccacaaaatttcatttgagctttgcaatatggtgcatttaaatgcgctcgccgtcgaaggggaaaaatatttgacacaaagtgaatatgaaattttatgtggcctcataagtcggcaacaaaacgttctatctaccaggccacacaaattgcggattgccctgcgaaactaaggctggatttctgtcaccgcaaatatttggattgcatttgaatttcgatatatttgcgagtggattggggaacgaggatcaaacagtcgtgaaaagttaatgactggcgcagttaacgcgaaaatgaaataaatacgggtggcatggtatcaaggtacttgaa

SEQ ID NO: 21167 - DNA, 1946 bp, DROSOPHILA
tttgcacattgcccaccgtcattaggctgagcgagtccaagagcctggatgtggaggttggcatgacgatcatgatacccaactaccagttccatcacgataagcaatactttcccgaaccggaggccttcaagccagagcgatttgataatggcgcctatcaggaattgatgcggaaaggcatctttctgccgtttagcgatggtccccgtatctgcatgggtgttccattggccatgctgactctgaaatcggctctggtccacatccttagcaactttcaggtggtgcgtggaagggatcgactgattccgaagggagattctggatttggggtcgtactgcagggagatagtatgtttccattccgttccagttttcagggaaacctggtggcgatcagatcgccttcttcggtggctgtcatgtttaccctagtgggtttgtgcttgaccatcgttcatgtggcctttgcggtggtctacttctatctgacctggtaccacaagtactgggataagcgcggagtggtcaccgccgagccactgaccattttgggctcctatccgggcattctgatcaacaagagccgcagtctcattctcgatgttcaggatgtctacaataaatacaaggacaagtacaggacagtcggaaccttcattacgcgacagccgcagctcctggttctggatcccgccctggcccatgagattttggtggacaagttcagtcactttcgggacaccatcaccagcagctttgtgggccacaatccggatgacaagtacgtggcggggtcacccttcttcagcgctggcgacaaatggaagcgactgcgctccgaaaatgttggcggactgacgcccagtcgactgaaaatggcctactccatctgggagcagagtggccggaagctggtcgagtatatcgagcgggcgcggcgagaacagggcgatatcatcgaaaccagagatcttgcctatcgatttacggccaacgcgatggcggatttcatctggggcatcgatgcgggttcacttagcggcaaggttggtgagatcggggacttccagaagacatccacggattggagtgctcacgccttcagctcgatgatccgcttcaacaagactctggtggccatcttcgtgcgaaagcttttctccatgcgattcttcaccaaagcaacggatgagttcttcctgcgactcacccaggatgcagtgaatctgcggcaaggtggaagtggcgagggtcgcacggactacctatcccatctcattcagctgcagcagcggggtaactccatccacgattcggtgggccatgccctcaccgtgcatctggatggattcgaaacatctggagccgtgctctatcacatgctctactcgctgagcgaacaccacgaagagcaggaaaagttgcgctcggagatactggaagccttagcctccgagggccaaatcagctacgatcagatcaacaacctgccctatctggatcagtgcttcaatgaatcgctccgactgactactcccattggtttctttatgcgcatctgcaccaagcccactcagatcaatttgggggatgataaaaccctggacttggaacccggagtcaccgtgatggttccagcctatcagtaccatcatgacaatgacatctatccggaggccagtgaattcaggccggatcgattcgagaacggagcggcgagtgtccttaccaagcgaggatgcttcctgcccttcggtgatggacctcgtatttgcttaggtatgcgcgtgggccaactgagtgtgaagacggccatcgtgcacatcctctcaaattaccaggtggagcagatgaagaaggtgcccctgggtgcggacagcgggatgggaatcttcctcaatggcgatgtcgaactgaaatataccaagctgcagaaataa

SEQ ID NO: 21168 - protein, 506 aa, DROSOPHILA
MFTLVGLCLTIVHVAFAVVYFYLTWYHKYWDKRGVVTAEPLTILGSYPGILINKSRSLILDVQDVYNKYKDKYRTVGTFITRQPQLLVLDPALAHEILVDKFSHFRDTITSSFVGHNPDDKYVAGSPFFSAGDKWKRLRSENVGGLTPSRLKMAYSIWEQSGRKLVEYIERARREQGDIIETRDLAYRFTANAMADFIWGIDAGSLSGKVGEIGDFQKTSTDWSAHAFSSMIRFNKTLVAIFVRKLFSMRFFTKATDEFFLRLTQDAVNLRQGGSGEGRTDYLSHLIQLQQRGNSIHDSVGHALTVHLDGFETSGAVLYHMLYSLSEHHEEQEKLRSEILEALASEGQISYDQINNLPYLDQCFNESLRLTTPIGFFMRICTKPTQINLGDDKTLDLEPGVTVMVPAYQYHHDNDIYPEASEFRPDRFENGAASVLTKRGCFLPFGDGPRICLGMRVGQLSVKTAIVHILSNYQVEQMKKVPLGADSGMGIFLNGDVELKYTKLQK

SEQ ID NO: 21169 - DNA, 4923 bp, DROSOPHILA
gtcaatcagctctcggcggacgtgacctatcaccagaatcagctaaacgacaatatcctaaagctggaggagctgatctttgagaacgagcggctcaacagggagaagttctttcagatcgaggagtttctgcagcagatcaatgaggacatcaaaacaaagctgggcaacagtgactatgtgacgtcaaagcaggccacattggactatgaggtgaagaatgtgaagaacattgtgtgcgaaacggaggaacgttgcgataaattggatcgagcacttcaccagaccatgcagaatatatcggatttggagacccaaatggccatgcagcagcggattgccagtgtccagaatataaggggtacatattgttggttcaatatagtaatttaaatatataatatctggtcgtacaggacacttgatttggcgcatcaaggattactcgaaaaaactggaagagtccaagcagtacgacaccatcctccatagcgccatgttctccaataaagcctttggctatgctctacgggtgagttgaggttggatcttggttggatatgccatttatatatgtataccccattactagctggatatatacttgaatggcaagggcacctggaagggcaggaacatgatcgcctgcttgaacgttctatccggagagtacgatccccttctggcctggccatgccgccttcaggccgagatcatcatccgggatcagtgcacgaatgtggcagatgccgaggattatgtgaagaccatctttgtgcgcaagaagagcgatgattttatccaaagcaaccagtacttccatataccacacaaggtaatcaccagtcgcaactatcttcgcaacgattccatgttcatcgaggttcgagttctaaaataaaacccatgcagcatcgctatcccacccaccaggagcgataagaaaaaaaaaatccaattgcggattgtcacatacataaaacataatttattccattgagagcgaactggaagttaaaaacccgcttacaaacacgagtatgtgtacatatatagtgtataagtgcatacgaatcgattcatcgtttcaatatgcgtatattgtagttttaaatgtcattgcagttttaaatgctttttttcaaattaggcaatagtcacattgaggcactgtcgagacgaagtcggtagttagaaagcatagcttttattgcaacatttccctggtcactttgtcaagatataagcaactctttcattttttggtttttcatttcgagcaaattaacaagcgatttttgagaggaacttccatattatttgtctttacgaacgcatttaaatacaaaggtcttttaataaaatacaacttcaacacttgtcaactgtcggttcccatgttcatttctttgaaagaggtatcaaatgtctgatcccgttcaggtattatttgtgtgcacttatagtctacgttgtggatcataattgtctggcttcgttggcgtgttcttgtatgttgtatgcatttaaatgaacgaatacatagaagagataatacatattcgaataattgatttcacgtcggatttggtttgaataatacatatatatgtatatgcggagattcttaagaggagcgctgttcacccaccagggcataaagggcgtgcttgtagtggcccgaagtatcgccctgcaagtaggattttatatgattatagaatatagatatagatagatatatatatcttaccttgatccagctcttgagggacttgccgtacagacgttcgaacgctaccttaatgtccgtcatatcaatctgaaaaacgttgcaacattttagggttgaatgatattatatatagatgtacttacctcgctgcgcgtgatgatcacacggatcaactgggtgtcattggtgccaattccggccatcgccttgtgcaggcgcgaagcgaagtattcggccttgttggtgacgcacctgtagatggcaatcaggccctccatcacatcgccggagaactccttcttgatcgccttctccagcgagtggccagtcatgccctcgtactcttggaatatctgcggttaggtatgattatgttggagtttcaattgtacacacaagtactcaagtatcaagcagcataccagtttcaattgctgatagttcctctggcagaggatcatgttgaacatgctctcatcggtgccgacgcgcagttcgccggctttcagtagctccctagcatcgttcttggccgccacgggatccacgcgaccactctcatcccgcgccgccgtgcacaaggaggtaagcagccgcttaaagttgcccgacgtctccgactttagttcagactccaaatgggcgccgtacactaatatacacgattggcagaaacaaaatccatattagaacaaagagaaaaggctaagccaaatagattacgacctacatcgtaagtactggtttttgatcgtattgatctccatgttggacagcgtgcagaggatctcgatgaggacctcctcgtcggtgcccaggccagccatggcatcgtttagctcggcgcagtagtagtccacgatgggacgcagcaggccgacgaggagtttctcaaagttgccgctcgtctccgacttgatgtcctcgatgaggtccttgccgaagtgcgtcttgaactggcgctggatctcctggcgctgctcgttggatcgccgacagatgatgttaatcagagcgtcctcatctgttccaaagcccttcatggccttgcgcaagtcgtgagcatccttgacggcatcgaagtttgcggcaggcaccaccgtgggagttccctgaaaagaacagtcaaaacagtcactgaaaacgagctcagatctgatgggcatgatgaacatgtattgttttagacccgccctggaacaaattcgactgaggatggggaagtgcggttagtgtggacgtgagtccccaaatttgatgaccaacctctctgtgagctgggagtgaccgatgcgcgtgcccctgaccattcccatgcccctgtccatgcccatagccctgcccatatccatgcccatattcatgtccttgcccatgtccgtgcccatgtccttgcccatgtccatgtccttgtccatgtccttgtccgtttccgtagccatagcccgcatcatatccggctgtcatggccggtgtgtatccacgatccgcgggatagggactgttcgacaccgatggctgctgataatgattgtgcgctggaggagcgtattgtgccgggtaaggattcgaggtgggatatggtggataggatggggcggcggacgggtacggtgccgacattggtggataaggagctggagctccgcctggatattgctgatgctgctgaggatgcatttgggacgatggctgtgagtgtgggtgtggctgggagggtggtgggtatggcgagttttgctgcatcggtggcacccaaccagctccaaagggcgcccgtggcggctcgtggtggttagtggaggtaggggggtgcgatggcattccagaaccctataaaagtcagaaaatgtacaattcaagttgactccatggcgctgaattaaacacagagctcacaagaatgacatctatctcttagaaaaatgaatcagactaaacgaaagaactcacccgaataaattattatagttttatacccaaaaaaatatgttataccaaacttatttataaaatatattgtgaatatgttatgatatttaagaaccaaggcacttattaatgctgatacttttataactaaaatctacaggatgtgcattcaaaacttacgaagggatacattttgagggaggttctatggagattctgtggataatttccggtgattgagattcagtactggaaaagagcaaaataggaattatgcgtttcgttaaattgaaaatattcacacacatgcacaagtacaatgtacatatagttttaatgtttaatcagctgatctaacatcatgttaaagattggtgctcaaatagaaggtacaagcgactttgaaccgaaacattagattacactacgcaacaaaacgtgctaatgtacaaatcaaactttaagttataaaataggtctaacttgtatttgagtatacatacattggaaaccaatcaaattggagtggggattgcgctattagataagaacactattacagggtatgccttataatttaagcaattaagagtaatatgaatttgcgtcatatatgggataaaggcatccggttttgcttagagagggaacttcccaaaaaaataaatcaactgatatggatatatgaaatatgcaaaaacattaaaataaaataattaatttcggcgatatagtaaactgtcccaagagaccttataatggttccactgaaatgtcgccaatgtagactttcgccacatgtacacatgtatgctacacccatttgtggcccacaaggtacttcatatctacatatatatatatatatatacatatatatacatatatataaacgttgtgttttcccttttaccttatattatatatgcgcaatatagctgcgggtcatgcgtgttacttgtaatttataattttttgcttcagacagagggacgcctcctgacttaatgggtatggaaacaaatgtgaggcctgaatataatatattaaactatttgcacaaaggctttgggtttgttttccaattgtttcgtcatttgcaaagcctttcttgaaaacttttcaattgataaacataaacaactgcatgtacggtctgttctgtcccactctttatacatttttaaccaaaaaattaagttaaattcgttttggaaaagacttcaatggcacctcgcagcgcaaataaccagaac

SEQ ID NO: 21170 - DNA, 2227 bp, DROSOPHILA
tttccagtactgaatctcaatcaccggaaattatccacagaatctccatagaacctccctcaaaatgtatcccttcggttctggaatgccatcgcacccccctacctccactaaccaccacgagccgccacgggcgccctttggagctggttgggtgccaccgatgcagcaaaactcgccatacccaccaccctcccagccacacccacactcacagccatcgtcccaaatgcatcctcagcagcatcagcaatatccaggcggagctccagctccttatccaccaatgtcggcaccgtacccgtccgccgccccatcctatccaccatatcccacctcgaatccttacccggcacaatacgctcctccagcgcacaatcattatcagcagccatcggtgtcgaacagtccctatcccgcggatcgtggatacacaccggccatgacagccggatatgatgcgggctatggctacggaaacggacaaggacatggacaaggacatggacatgggcaaggacatgggcacggacatgggcaaggacatgaatatgggcatggatatgggcagggctatgggcatggacaggggcatgggaatggtcaggggcacgcgcatcggtcactcccagctcacagagagggaactcccacggtggtgcctgccgcaaacttcgatgccgtcaaggatgctcacgacttgcgcaaggccatgaagggctttggaacagatgaggacgctctgattaacatcatctgtcggcgatccaacgagcagcgccaggagatccagcgccagttcaagacgcacttcggcaaggacctcatcgaggacatcaagtcggagacgagcggcaactttgagaaactcctcgtcggcctgctgcgtcccatcgtggactactactgcgccgagctaaacgatgccatggctggcctgggcaccgacgaggaggtcctcatcgagatcctctgcacgctgtccaacatggagatcaatacgatcaaaaaccagtacttacgattgtacggcgcccatttggagtctgaactaaagtcggagacgtcgggcaactttaagcggctgcttacctccttgtgcacggcggcgcgggatgagagtggtcgcgtggatcccgtggcggccaagaacgatgctagggagctactgaaagccggcgaactgcgcgtcggcaccgatgagagcatgttcaacatgatcctctgccagaggaactatcagcaattgaaactgatattccaagagtacgagggcatgactggccactcgctggagaaggcgatcaagaaggagttctccggcgatgtgatggagggcctgattgccatctacaggtgcgtcaccaacaaggccgaatacttcgcttcgcgcctgcacaaggcgatggccggaattggcaccaatgacacccagttgatccgtgtgatcatcacgcgcagcgagattgatatgacggacattaaggtagcgttcgaacgtctgtacggcaagtccctcaagagctggatcaagggcgatacttcgggccactacaagcacgccctttatgccctggtgggtgaacagcgctcctcttaagaatctccgcatatacatatatatgtattattcaaaccaaatccgacgtgaaatcaattattcgaatatgtattatctcttctatgtattcgttcatttaaatgcatacaacatacaagaacacgccaacgaagccagacaattatgatccacaacgtagactataagtgcacacaaataatacctgaacgggatcagacatttgatacctctttcaaagaaatgaacatgggaaccgacagttgacaagtgttgaagttgtattttattaaaagacctttgtatttaaatgcgttcgtaaagacaaataatatggaagttcctctcaaaaatcgcttgttaatttgctcgaaatgaaaaaccaaaaaatgaaagagttgcttatatcttgacaaagtgaccagggaaatgttgcaataaaagctatgctttctaactaccgacttcgtctcgacagtgcctcaatgtgactattgcctaatttgaaaaaaagcatttaaaactgcaatgacatttaaaactacaatatacgcatattgaaacgatgaatcgattcgtatgcacttatacactatatatgtacacatactcgtgtttgtaagcgggtttttaacttccagttcgctc

SEQ ID NO: 21171 - protein, 511 aa, DROSOPHILA
MYPFGSGMPSHPPTSTNHHEPPRAPFGAGWVPPMQQNSPYPPPSQPHPHSQPSSQMHPQQHQQYPGGAPAPYPPMSAPYPSAAPSYPPYPTSNPYPAQYAPPAHNHYQQPSVSNSPYPADRGYTPAMTAGYDAGYGYGNGQGHGQGHGHGQGHGHGHGQGHEYGHGYGQGYGHGQGHGNGQGHAHRSLPAHREGTPTVVPAANFDAVKDAHDLRKAMKGFGTDEDALINIICRRSNEQRQEIQRQFKTHFGKDLIEDIKSETSGNFEKLLVGLLRPIVDYYCAELNDAMAGLGTDEEVLIEILCTLSNMEINTIKNQYLRLYGAHLESELKSETSGNFKRLLTSLCTAARDESGRVDPVAAKNDARELLKAGELRVGTDESMFNMILCQRNYQQLKLIFQEYEGMTGHSLEKAIKKEFSGDVMEGLIAIYRCVTNKAEYFASRLHKAMAGIGTNDTQLIRVIITRSEIDMTDIKVAFERLYGKSLKSWIKGDTSGHYKHALYALVGEQRSS

SEQ ID NO: 21172 - DNA, 5053 bp, DROSOPHILA
tacatccaagcaatattgcattttcccaaccaacctcaatctctacatcataggtggcaactcagattatatcaggggactaagccaagccaagctttatcgataagctctaagccctacacacacgcacaagtacttatagatatagaaacgaaccaacgattttcaactacttttgacattatgaatttgaacgatacgcgaacgaacgatttacatacagatatatgcatggccatgcgattctaattgggatctaatgggatgggctggggtggcgtgttgcatcccctcctcgtctgtaacttctcaagcctccgatctgcggggtttggagcgcggtttgaaaaatagttggagctatatttatatatcgcttagtttgtatatataatgtgtaaatatgcgagctgcgattgcgatgcgtgtatattctatattgtatatacttataagttgcattcaaaatatgaatatttccgtttcatttgttgctatttaggcttttttggtgacttcgtcaatatactttcggttagctgtgtcctgaaggcggtaaataaaggttgctctgtacacgagtggattgggctctgcattatatacactgtagctttacgtttagatttactcgacctattatcgtagggtattaataatattttgctgttttgctgtttgtacgacttgcgcggctccgaatctcctacattgcagttcgggttgctccttctcttctctagttgtaaaaatacgcagatcgaattccggggatctgctagggatcgtcccaccatctctagactaggatactgttcattgcttttatataattcacattccatgtttgctaactttgctatcactttgagttttccctttgtatgctttgtgtgtgtgtgtgtgtgtgtgtgttgtggggtgtgagggtttccctaggaaaaggttataggttattttacattttctaggtgtcggtttgtgtgtggattcctaattgctacgtgccctcgttccccgccctcttcgcctcctcggtgtcggctccttggagaagggccctctgctcatcgttggcttctgcttctccctcctcctcacgatcctcctggccagtagccactgcagcttggctcggaggagctgtcgggggatcctcgccagctcgatggctcacgggcgatgtgaaggtcgtctccgagtctgtgtggcaagatgggctagattaatcacttgattatacagacatatcagcacaacggatgacacaggatgagtagtaagagtcctaacccattttatgagaaagcagtttatacatattcgtgatcggtgatctaacttttacaaaataaatattactttgatttaaaacttatgttcattaaagattttccgaccataaaatgggttagttcttatcgcagtgctaaacaggaagcggcatatgggtgattttgggtgaggtgtgtaagtgtgaagtgcgtgagctcaagttctaaagctgttcatatcgatctggcgctcggatgtggataatcccagctgggtgctaaacgagcctggacaatcgaactggtgagtttggtgcggcacggaagcgatcgatgcggatcgatcaccaatggtaagcactatagatcggatcggtaatactaacaggtcgcccgcccgaagatctccgctctccggcgagatttaatgtgtcagtgtctgtgggttcatgggatcatgcggtgttcatgcggatgtgggtagcgatgggtggagttcgggagttcagaaggcggcatcgaagacggtgactgacagccagccagcaagcgggggaaacgggagagataaaaagacagttgtagatgatttctggtttcgtcatggccgaaagaaaccccaggatgcacttacaggatgagatagaaagaaaaagagggggaaagagacaaagaagaaggaagccagccgacagtgatggaaagtataccccatataatatatatagagttatcttaattataggactaattctattagttaaaatatcatggcgtatccttcatcactgccagctggccacctagttcaaccaccacctacccagactgctgtccctggtctgctggccatccgccgatcctgcggatgcggatgtagaaggagttcctcgcgagagcagcggcttcacctggcgcagcgcctgctcctcgggatagcgtggggtctggaacttcgtgggcttcgattgcaaggtcgctggtcctgagcgctggtgcattagggtgcggtgcctgagtggtggtggggatatagacttagctaaaactgaatgaggtaatttattcggtgagtaatcgctgccggattcgccctgtaaaacaataaagttaatactcgaactaaatacatattactatataggataacgaaccataacggtgccgttgtcggagacgccggagccggacatgttgtccgccaggagacgctcgctctccggatcggacaggacgcgcgagatatcagacttgtttttcaggatcgacttggagcgccggtggtgctccagattgggcgaggcgtcaatcgagtctatcgatgaggaatgcttgctctcgaacttggctgtgggtcgagttttgattagtttgatagatcattaactttcggaataaatgaaagccacccacctttggcgcccacattctgtatgccaaacaaatgctggttgatcagtttggtggcagtggctaagctcttgcccggcatgaataccgagcgcttcttcttgggtccttgaccgcttaatccgccggatccgctggccgccgggctaccggagcctccggccagttctccttccctccgaccgcccgtctcgtcgtccagcttggtgtcctcgaagcgggcgcgaggtcgcatgccccccaggacactgcttccaaggactccggtcgctccacttggtcgcatggcggtgaagctctgctggaaccgcgtcttccgatgctttggcactgagttctcgttcaagctgactcgacttccccgctcctggacatcaaagctctggtagacgtcgttcaggggacttagaccgccagctcctacgcctccggcggccaagttcctaagggccgtatcgcccgaggcgctcttcttcacctgggcacgcggtccacccgatgaattggtgcttggcaggcccacaataaagcctgtggagctgctgatgccctggtgctgctccctttcgagtggatttatgtacaggttatccatgtcaatgtccagggcgcaggcctcgtcattaaagtcggccgtgaggtctccttgggacaaaaagggatgcgtctggcaactggcataggtgtccgagctatccacgctggccaggtcggcattattgttattgctgccgttgtagttgccaccgaaaaggagcgtcccattgccaccaccgcccactgtggtggtgttgaagttgttgttgtagttatggttaaagttggacgaactgcagatggtggccccgtatctgagggacacatccaggggcagggcgatggtggtggacgtggtggtgccataggacgacgatgtggacgaggactgtgagatggcgggcaagaggacggcggcgcaggacgttgggggtaatggtggtggcgggggcagggccagaagcggtccgtggagcggcggtagaggggctggtagtggagagaggagcccataggctcctgcttgacgacctgctgccgccagtcgcatctccagacagatcggcttgtggaagtcggaggtgggcagcgagatcacgccctccgcgtcggtgaattccttgaagtcctgcaacgagtgggtgttcgggatgggaacacagtttcagatacagtcgccaaagcaaactacaggcccaagatataacagatatggtagaatcggtcaaattagttgagttcaataaacccatacaacatttaagtgaatccttactaaagctggaccatatctgttttatctgggaccataatttcatacattatatgcgtgttttgggatgttttctggctgcttattagtgtcggatttagttcggtgtacctgttgtctggagttagctttttattgtgtgcgatttgttttcttattatttcgcttgaataacaaaaattaacatgcaactaggaggcgccaagtaaaacttaaacgtgcagcgctatttattgttaacatttagtcatatttaataaatgaaaacgaaggcagtgcgagttctcaactcgttattggaggcagagaaagtgattacctattttatagatatatctagtatagaatataaagaaatcttatataagtataataaatcatttcaaatccaaacgtatattcaatttgaatagttttcagaatttatgcaatttatgactttcttttaatgtttcaaagatcggattggatccccaagttgagcaaacgcacgaagttcaatctttcagtactcagacgtgcgaacctctctcttacttaccaaaccgctgaagttgccttcgaagtggggttccatactcgaacgttaaataaagttaagtactcttatcgagatatcgaaaccaaaaaggaaaagttctaggcgagcaatacggaaacaatcagaagagatagtggagtgccagaaagtcgagtgcgaatagataaacttgatcaacagaaattgatttgttggttttgtaattttatttgcataatttgttcattcggtttgtggttttctttgttttgttttggatgagtgataacagaaaataaacgactaataatgaagagagctataacattggtagttccagtaactaaacaattgtatatttggtatttatagttatgtatgcatatattcgttgttttgttggttttctggtatttggcgtttgcaagttgcagctactataattaaggcttaggccattttgctaggatataaatatttaggtattaggctagttgtaattacgtgcttagtgtaaatgaataaaagaatcgatttaaa

SEQ ID NO: 21173 - DNA, 1792 bp, DROSOPHILA
cacgcatataatgtatgaaattatggtcccagataaaacaatgcgactggcggcagcaggtcgtcaagcaggagcctatgggctcctctctccactaccagcccctctaccgccgctccacggaccgcttctggccctgcccccgccaccaccattacccccaacgtcctgcgccgccgtcctcttgcccgccatctcacagtcctcgtccacatcgtcgtcctatggcaccaccacgtccaccaccatcgccctgcccctggatgtgtccctcagatacggggccaccatctgcagttcgtccaactttaaccataactacaacaacaacttcaacaccaccacagtgggcggtggtggcaatgggacgctccttttcggtggcaactacaacggcagcaataacaataatgccgacctggccagcgtggatagctcggacacctatgccagttgccagacgcatccctttttgtcccaaggagacctcacggccgactttaatgacgaggcctgcgccctggacattgacatggataacctgtacataaatccactcgaaagggagcagcaccagggcatcagcagctccacaggctttattgtgggcctgccaagcaccaattcatcgggtggaccgcgtgcccaggtgaagaagagcgcctcgggcgatacggcccttaggaacttggccgccggaggcgtaggagctggcggtctaagtcccctgaacgacgtctaccagagctttgatgtccaggagcggggaagtcgagtcagcttgaacgagaactcagtgccaaagcatcggaagacgcggttccagcagagcttcaccgccatgcgaccaagtggagcgaccggagtccttggaagcagtgtcctggggggcatgcgacctcgcgcccgcttcgaggacaccaagctggacgacgagacgggcggtcggagggaaggagaactggccggaggctccggtagcccggcggccagcggatccggcggattaagcggtcaaggacccaagaagaagcgctcggtattcatgccgggcaagagcttagccactgccaccaaactgatcaaccagcatttgtttggcatacagaatgtgggcgccaaagccaagttcgagagcaagcattcctcatcgatagactcgattgacgcctcgcccaatctggagcaccaccggcgctccaagtcgatcctgaaaaacaagtctgatatctcgcgcgtcctgtccgatccggagagcgagcgtctcctggcggacaacatgtccggctccggcgtctccgacaacggcaccgttatgggcgaatccggcagcgattactcaccgaataaattacctcattcagttttagctaagtctatatccccaccaccactcaggcaccgcaccctaatgcaccagcgctcaggaccagcgaccttgcaatcgaagcccacgaagttccagaccccacgctatcccgaggagcaggcgctgcgccaggtgaagccgctgctctcgcgaggaactccttctacatccgcatccgcaggatcggcggatggccagcagaccagggacagcagtctggactcggagacgaccttcacatcgcccgtgagccatcgagctggcgaggatcccccgacagctcctccgagccaagctgcagtggctactggccaggaggatcgtgaggaggagggagaagcagaagccaacgatgagcagagggcccttctccaaggagccgacaccgaggaggcgaagagggcggggaacgagggcacgtag

SEQ ID NO: 21174 - protein, 593 aa, DROSOPHILA
MYEIMVPDKTMRLAAAGRQAGAYGLLSPLPAPLPPLHGPLLALPPPPPLPPTSCAAVLLPAISQSSSTSSSYGTTTSTTIALPLDVSLRYGATICSSSNFNHNYNNNFNTTTVGGGGNGTLLFGGNYNGSNNNNADLASVDSSDTYASCQTHPFLSQGDLTADFNDEACALDIDMDNLYINPLEREQHQGISSSTGFIVGLPSTNSSGGPRAQVKKSASGDTALRNLAAGGVGAGGLSPLNDVYQSFDVQERGSRVSLNENSVPKHRKTRFQQSFTAMRPSGATGVLGSSVLGGMRPRARFEDTKLDDETGGRREGELAGGSGSPAASGSGGLSGQGPKKKRSVFMPGKSLATATKLINQHLFGIQNVGAKAKFESKHSSSIDSIDASPNLEHHRRSKSILKNKSDISRVLSDPESERLLADNMSGSGVSDNGTVMGESGSDYSPNKLPHSVLAKSISPPPLRHRTLMHQRSGPATLQSKPTKFQTPRYPEEQALRQVKPLLSRGTPSTSASAGSADGQQTRDSSLDSETTFTSPVSHRAGEDPPTAPPSQAAVATGQEDREEEGEAEANDEQRALLQGADTEEAKRAGNEGT

SEQ ID NO: 21175 - DNA, 6269 bp, DROSOPHILA
gaaaacaccaaaatgttagggacagattaaattaacttcactaaagagatagattgagctatgcgaatattatgtacaaatttatttaagggaagtaggaattaaaagttaaaattgatttttaataatttaaaacttatagaattttctttaatttaaagcggaatccccctattatgttactggtatgtgtcgcaggcttgctgctatgtcacgcactgctttttgtaatgctaacagatactgttaattcaaaagtgaaaatcgaacgcgactgaaaaattgtacacttttaagccggaaaataattgaattgttctagaatgtatttatacgaataaatatattcattccaacattcgaaaaagcaagtaaaaacctgcaagcttattgagttaataaaaatcaattgccgtgttggctaaacaattagcctaactaatttaccaactagctgctttattaattatgttttgatgtaagcgcctctgattagttaatacattactttcactaaatcagaaatcagttcaaccgtgaaaatgccaatggagttgggcaaatttacacttttttgcaaacaaacagaaaaaccaaatactgaaataaatttcgtaacataaacactaattgattggagccaaacacgtgtgataaatttaaattaaacgcatggttaattagagcgtttaaaaatgtttgcttagagcccttagatattagcccactaaatcactcgttcgcaatacttttcccaacacaacacccccgccaacaacgcgaacttcgactactttcgttctcgtttgacaccaattggtattagagcccaccattggacaccaccatgtgccccagtgtgggtgcttacatatgtatgccactggctcaatcagttaccaatagaaagatcgccggctgcgatacctgctacacttaaatagcacccgctctcgttgctcggaacccagttgacaaacggcattagaagtacgagtatatgggatatgaagtcgactgtttggctacctttgttgagtaagttaatcaatccaacacacaagccaaaaagcaaatctattacatggtgtctacctaaaaaacagccctaatttggaggagtgccagtgccaacccgatattggggcttttcgatcccgcctgccaagttgttaggggagaatgtcccaataaaaacatatccttctggctgtactcgaagtacgtagtttatagttaaatactcaacagatattataactgttttcaacagttccacccgggaaaaccccattctgctggatccccttgaccttaatccgtggaacttccaaccgccacgtcccctaaagatactcatccatggctacacaggtgaccgtgactttgctcccaactcctacatccgtcccgtgctcctcgatcacgaagatgtctacgtgatctccatcgactatggaccacttgtgcgatatccctgctacatccaggcagttcagaatcttcccctagtgagtcgatgcctggcgcagttaatcaacaacctggtcgatcgagctattgtggcaaatgaccagatccatctgataggcttcagtttgggtggtcaggtggcggggcagacggccaactatgtgaagagaaagatgaagaggatcactggtctagatcctgcgaagcccctctttatattgggaccagattcaagaagattggacaaaggagatgccgattttgtggacgtcatccacacggatgttttcggtcggggatatctgcgcgctgctggtcatgtggatttctacccaaactttggagccaaacaacctggctgcatggaggagaacatgcaagatccaagtagctgcaatcacgagagggctcctcgcttttacgccgagtccatcaataccactgtgggtttctgggcacggcagtgttccggttggttgctccaactccttacactttgtcccacaacaggagctcaagctctactgggctatcacgtctcggatgagttgaggggctcgtacttcctccagactgcaagtaaatcaccctatgccctcggaaaaatgcaggatgtggacaatagacagaccctggccaagttccatttgaatttcgatcacaacgaaatcgacgatgactacgaaccacagttgttggaggcgttcctcgagctggaggcggtgaaagtggtggtcaaaatggatgaaagcgaattggataagcggttgaactggatttatagggaggaagatgagcctttatccagaaatttaattaaatagttgataatatatgactgcattaaaaattatacatttaaataaataaataggataaaattcgcattgttttgaaaacataatgaatcggagcaggatttgtacctaactggaaaaataatattacttcaccatatacgtttcgaatactcgaataacattttaataaatttattttaaaaatcacctacaatgttgttcctatttcaaaatccattatgtttcacgtaattagtttcaaaaacttccttaaaaatcatcatgtttatgttctcttcactactgctccacatattttcattgccagtttcacaaacacacaaccccacccgcagcgaccttgacccgctgaatctcacccacccttgacagccttgactttttatcagcagccagtattgttagtctttgtcaatgcgccctcatgttttatgccattttcaatgttgggccgtgcaaattaaatagaattggcgttagaatccgagcttagagcaatttagactctagtcatgagcatatacagcacgctgatccttcttttgacaatagtctccggtttctgcaaaggagaaaatcatacgcgtggctggctgccagagttctgtgtcgtcggcgagcaaaagtgtcccaactcgcgagtttcgttttggctttacaccaagtgataaaactaataattaaaatagtaaacataatctggaataagtattaaatatttttcagccaaacacgcgacgatcccatacaattagatcctttgaatccgcaaaaggatgtcttccagccgcgtctgccactcaagatactcatccatggatttataggcaacaggaacttgacacccaatttggaagttagagatgtgctgctccaaactcagcctataaatgtgatatcggtggactatgggacattggttcgatggccgtgctattatccttgggctgtgaataatgcaccaattgtttctgagtgtctggcccagatgataaataatctaatctcagctggcatcagcagacgtgaagatattcacttgataggcttcagtttgggagcacaagtggctggaatggtggccaactatgtgagccaacctctggccaggattactggactggatcctgcgggtcctggctttatgatgcagccctccttgcagcaaaaactggatgccagtgatgccgactttgtggacatcatacacaccgatccgttcttcttctcgatgctgccgccaatgggtcatgcagacttttaccccaatctcgaccagcttaatcagcggggatgcagttacatcagcaactggagattttacaactgcaatcattatcgggcagccgtatactacggcgaatcaataatctcggagaggggtttttgggcccagcaatgcggtggatggttcgatttcttctcgcagcggtgcagccactactccaatatgcccaatacgcaaatgggttactttgtctcagaagagtatgctattaccaaatagtttttaatatttttttatgagataaccttttgcattttcagtgcgtctggctcgtactttctcaccacccatgaggttgctccttttgccaaaggacctctggttgaagtcgaatttgacgtttcggaacttcgaaattttacggaaatagaattaagatgaaatataagagaattgagagaattgttatgtatacttttgtacagaactcgatatacttcgatgatattgaacaaagtaggttgattatgaaacatcaaacctttgtacctagttgaaacggataaatgttcagtataaatttcgatctctttcgatactgacctttcctattgagtacttttcaacaatgtttgtacaagtttttatcaaaaacaaaaatgaatatcgtcgagctgccttgatacgcgtgaaagaagactacaaaatttttgatctaaaagtagtgttggagaagcacaccaaaattccagtggaacatcaaaacattagatttttcgatgctgttctcaaagacgaatacctcttgtgcaaggtagcgaagaaatgtaaagctgacctcttcgcttttaataatgaagaagtctttagtcgtatccagtttttggataatgtagaacaccgctgccagtcaatgctgaagcttaacgaccacaagatgaacatggagttgcccaatgaagttcggccgcagatcgtcggtatggccggtgggtactcaagagagagtgggagttcggtgacaagtagcagtgggctgtctagtaagagaagctgctttatatcaacctgctatcctaaagctgaacgcaaggcctgtgtatccgctgacacatgtcatgttaaatgctgcgatggggaagataatcgaccaccgtacgctaggataatgcccgaagatcgccgatttggtgtagttatcaccaatgaggagtgtccctgcgactgtgacttcaattgcattttagagttcatggcagaggcattccatactgcgcaggacgtcgcctccctgagctttagtcagtgtactccggtagctgaattcgactgctctttgctgctcgttgccgaggacagtgactccagtgattggcttctccgggtagcccgacccatgtgtccaccatacagatgcacgtcattcatcaaacactttgatctggtgcggtccatatttgttattccaatgatcgtggaacgaaggctctgcaatgtctttcaaatatttgaaaaccaaaactgcggcattgacaccggaaaatggtgcgtgatggaaatggctcctttggatccttgctcagattcatatgcatcgaaggtaatcttcccggattccaccaactatgagatcgtggcttacatcgacaacgaatccaaggaatacattgagaatcactgcagcaagataaagtatataacgtggcacctgcctgtggatttcccccaaggcttgtcttgtacataagcacataggataatcgtataatatgtattctatttataagctacaaatatatataaatactaaaataccaaaacaacgtcgaaagcttttcacgcaaagcgagcttttgcgcaccagtaccagtacgaacttttgggcagccccaaaaacgaaagacttcgaacacgaactcggcaagtcagtggctcgccggagcgcaatcgaatcacacgtgtactcgaacatcgggcggtgaaagccaagatcgattggtggccaatctctttggaataccgcgcgtgcccgcagttgtaaaacacaaaactgaatcaatttctgcgcagaggcagccggaattatgcctcgccagctttgccgtcgtcttgctgtgcattgaaatccaaatcgagtccaatgaccagctctcgagctggtgcccaagcaagagtttcgcactttgagacagttgagtcgccggtcaacgagcaggccttgacccaaagcccagaagagttcagagattccgccaaatacaacccagttatataatagcacttgcaactgcaattgaaattaaaagtagcgtgaatttgcaaaacataaaaggcgaaaaactaaaatatgtggttacagtgcgcgaggaaaccaatacgtgcagacttttggctgcagctgctctgcgtgagttttacactctttcacctggaattcgccggttcgtatatgatgtgctaaaagaaaaaaccaaaaagacacagatttaagctaaacttttactttcgccctggctggcactattttctccccaatatctttctttcggccctgtcattgtgtctgctgtttctgtttctgttgacacttcaaattggcgtagctttaaatttcatttttaactagttgcacaatatttaccagcattttcttctcccgtttgcgaccttgcctcatatcttggtcaacaacaatttaaatatcttgacagacctatcttcgagtaccaaatactttacggggctca

SEQ ID NO: 21176 - DNA, 2448 bp, DROSOPHILA
atgggatatgaagtcgactgtttggctacctttgttgattccacccgggaaaaccccattctgctggatccccttgaccttaatccgtggaacttccaaccgccacgtcccctaaagatactcatccatggctacacaggtgaccgtgactttgctcccaactcctacatccgtcccgtgctcctcgatcacgaagatgtctacgtgatctccatcgactatggaccacttgtgcgatatccctgctacatccaggcagttcagaatcttcccctagtgagtcgatgcctggcgcagttaatcaacaacctggtcgatcgagctattgtggcaaatgaccagatccatctgataggcttcagtttgggtggtcaggtggcggggcagacggccaactatgtgaagagaaagatgaagaggatcactggtctagatcctgcgaagcccctctttatattgggaccagattcaagaagattggacaaaggagatgccgattttgtggacgtcatccacacggatgttttcggtcggggatatctgcgcgctgctggtcatgtggatttctacccaaactttggagccaaacaacctggctgcatggaggagaacatgcaagatccaagtagctgcaatcacgagagggctcctcgcttttacgccgagtccatcaataccactgtgggtttctgggcacggcagtgttccggttggttgctccaactccttacactttgtcccacaacaggagctcaagctctactgggctatcacgtctcggatgagttgaggggctcgtacttcctccagactgcaagtaaatcaccctatgccctcggaaaaatgcaggatgtggacaatagacagaccctggccaagttccatttgaatttcgatcacaacgaaatcgacgatgactacgaaccacagttgttggaggcgttcctcgagctggaggcggtgaaagtggtggtcaaaatggatgaaagcgaattggataagcgccaaacacgcgacgatcccatacaattagatcctttgaatccgcaaaaggatgtcttccagccgcgtctgccactcaagatactcatccatggatttataggcaacaggaacttgacacccaatttggaagttagagatgtgctgctccaaactcagcctataaatgtgatatcggtggactatgggacattgtgtctggcccagatgataaataatctaatctcagctggcatcagcagacgtgaagatattcacttgataggcttcagtttgggagcacaagtggctggaatggtggccaactatgtgagccaacctctggccaggattactggactggatcctgcgggtcctggctttatgatgcagccctccttgcagcaaaaactggatgccagtgatgccgactttgtggacatcatacacaccgatccgttcttcttctcgatgctgccgccaatgggtcatgcagacttttaccccaatctcgaccagcttaatcagcggggatgcagttacatcagcaactggagattttacaactgcaatcattatcgggcagccgtatactacggcgaatcaataatctcggagaggggtttttgggcccagcaatgcggtggatggttcgatttcttctcgcagcggtgcagccactactccaatatgcccaatacgcaaatggaacaccgctgccagtcaatgctgaagcttaacgaccacaagatgaacatggagttgcccaatgaagttcggccgcagatcgtcggtatggccgctgaacgcaaggcctgtgtatccgctgacacatgtcatgttaaatgctgcgatggggaagataatcgaccaccgtacgctaggataatgcccgaagatcgccgatttggtgtagttatcaccaatgaggagtgtccctgcgactgtgacttcaattgcattttagagttcatggcagaggcattccatactgcgcaggacgtcgcctccctgagctttagtcagtgtactccggtagctgaattcgactgctctttgctgctcgttgccgaggacagtgactccagtgattggcttctccgggtagcccgacccatgtgtccaccatacagatgcacgtcattcatcaaacactttgatctggtgcggtccatatttgttattccaatgatcgtggaacgaaggctctgcaatgtctttcaaatatttgaaaaccaaaactgcggcattgacaccggaaaatggtgcgtgatggaaatggctcctttggatccttgctcagattcatatgcatcgaaggtaatcttcccggattccaccaactatgagatcgtggcttacatcgacaacgaatccaaggaatacattgagaatcactgcagcaagataaagtatataacgtggcacctgcctgtggatttcccccaaggcttgtcttgtacataa

SEQ ID NO: 21177 - protein, 815 aa, DROSOPHILA
MGYEVDCLATFVDSTRENPILLDPLDLNPWNFQPPRPLKILIHGYTGDRDFAPNSYIRPVLLDHEDVYVISIDYGPLVRYPCYIQAVQNLPLVSRCLAQLINNLVDRAIVANDQIHLIGFSLGGQVAGQTANYVKRKMKRITGLDPAKPLFILGPDSRRLDKGDADFVDVIHTDVFGRGYLRAAGHVDFYPNFGAKQPGCMEENMQDPSSCNHERAPRFYAESINTTVGFWARQCSGWLLQLLTLCPTTGAQALLGYHVSDELRGSYFLQTASKSPYALGKMQDVDNRQTLAKFHLNFDHNEIDDDYEPQLLEAFLELEAVKVVVKMDESELDKRQTRDDPIQLDPLNPQKDVFQPRLPLKILIHGFIGNRNLTPNLEVRDVLLQTQPINVISVDYGTLCLAQMINNLISAGISRREDIHLIGFSLGAQVAGMVANYVSQPLARITGLDPAGPGFMMQPSLQQKLDASDADFVDIIHTDPFFFSMLPPMGHADFYPNLDQLNQRGCSYISNWRFYNCNHYRAAVYYGESIISERGFWAQQCGGWFDFFSQRCSHYSNMPNTQMEHRCQSMLKLNDHKMNMELPNEVRPQIVGMAAERKACVSADTCHVKCCDGEDNRPPYARIMPEDRRFGVVITNEECPCDCDFNCILEFMAEAFHTAQDVASLSFSQCTPVAEFDCSLLLVAEDSDSSDWLLRVARPMCPPYRCTSFIKHFDLVRSIFVIPMIVERRLCNVFQIFENQNCGIDTGKWCVMEMAPLDPCSDSYASKVIFPDSTNYEIVAYIDNESKEYIENHCSKIKYITWHLPVDFPQGLSCT

SEQ ID NO: 21178 - DNA, 3993 bp, DROSOPHILA
ctaggacggtatatcctgcgtttttacacgaaaatgcacacacactcagtttttctctgtttttcacaccgttgcacttgtgtcgatggtaatgatggactttttcaactgatgatggttcccgactaactgagctgatccttgagggactgcgactggaacacgaccgtctgctcgcacggttcgccgtcaactggatcgcctcgagcttccttagagccatcgttcccgaaaagccgagtccgcagaaccgagcggggaaattccgtcgtgagttatgcatttcccatctacgatgacagaatttccctggctctcttcagccagcgcttttgctctctttcttgttttgggcaatttggtggcgttcagttttccgatttttcctttgtccaggtggtgggttcgcatttcgccggtttgtttacgtttttgtgtgttggcccgctttctttcaagccggctttctttgctggccaacatatgactgctcctttcggggtggctctcctacgaaacgaacttaattgattgagaagctttactttggttagagggtgcggttttggtaagtcaaaatattcccaaacacgctaacaagggttggtaatcagtttctttgtcgagggaggatttactacattgggctgtccaaataatatattaaatctaatgaattgaagtactgcactgtttctaataacgattttattgaaaattgttcatttttgttattaggttattttttgaatttacaggaacagtgcccccaaaaatcgaaaagctcttaaatacacggtacccatgaccagccataataatgatgacaaatatggcaaaggctccaactccttgtttgtccttaccatgaccccttcctttacctttgcccttttaaccacagaaactgttcgccgcctgaatgtgccaggcaaaccgcttttggtcgcaacttcgtctggtttcggcttatttacaacaatttttcgttacgtttcgtttcaggcctggccaaaagccacaagcaccaaaggcagctggccacggggacgaggagagtggcacaatagacaaagtgtatcaattataatacgggcacaaggcgaaggatccccagccgggggccaaaggaaggggatccggggtccagtaaccaggagccgaaaagcaggataccagagttgcagctaacacaaagagaaaaggaactaaaggtattacctttctttgtttttatataaaatggtgcagtgtactttccacttttataatagtgtaaacaatcttatataaattattttgtcaaaaaatttttagatctcatttagttagcagggttacgaagacttgaaataaacattaactgagtgaatgacttctaaacaatgtgaattctctattttgatatccttttttgcgactgtagaggcaaccacacttgcagagccatgttggctacgacaagtacaaccacaattacctcggatccgggcatcctctgttttcatcactgcaacgtgaaagttttctgcttcactttgccgcacacttgtccccattgcaatgccccactggacgcggatgtggatgcgcatggggatgtcgatggggatgcggatccgagtgcgcaactagacagggccgggccacgcctcctcctcctgcccttccgcctgccatatccttttgtgcgggccacgcagcatccgtgcgccattgtcctgcgtccctccgccggcgatttcctcaagtaagtatggtgcaacccttctaaaaacccattcgctgcagctggtgacattcaagtccaccagcaaatcaacgaaatgtttttattagtttcgatgtgcatttgaatcgggagtggtgcactatcgaaatcatttatacaccacttttgtataaagtaatgatgaaatgaggcttcagtattcaaaggccatgttctatagcttatccgaaattttaaaacaattcagatattaatagccaagccatcgaatcagactatttcaagcggcttgtcaatgtttttgtggcagccagaaccatctctaaaattcggaccgaacaaatttgtgcaaatgtctgtgggcaatattttttggttttggctccgcttggagtatcttttatggctggaatatatttttgatgcgctgtatttccgcagcgattacagcaacgccaccgatttgcatatcgcagtgaccacatccggcggcgacatcgtggagttcgatcgctttggccttcgccgccatcggcgggatgataatcctccggagtggcggcagtcgctgatggtgggcgatgtgccggagccgtggcacgacttttgggacgaggtcctgcagcaggtgagtgcagaatccgaaactaaagggtgcctcgatttgtagctggtaaaaaatggtttatctcagtttctgtttgaaatgtatgtatacaaatggagtgaatgagaatagaatatggccagttgccagactgtattctgcactttgacatatccattcaccctgttgagaatcaatgcaaatccctaaccactcatctatcctttggtccatttgcattcacagatctgcgcccaatcggtgcgctggtccatcgccagttatgcggaggagagccacaactgctacgccttcgtcctggccttcctgcaggccctcggccacgcccacctgagcgaggccgcccgcagcaagaccgccttctgtgagcagtgcattgttccaaggacgacgacagcgggcaagtacatctcgctgtatcgcaaaatccgcaggagcggcatctacgtccatcgccagcagcctaaaaaccgcagtaagccagcatccgcaactcctccaagttcctacccctcagactcgtgcgatggccttggcagcagcaaaaaggtctcaaaaaaaggatactccagcagcagtattacaggacttgccaaccgcccgcggcccacgctctgcaccatcgaagagtaattaatcgattagatagaaattgtgtttgcaactttgcaaagactttagcgtagttaaatttaataaattcagaacaaaaaattgtacgttacatttgtattaaaaaggtaaattgtgggtacaaaggcgccaacgtccttagtgtgaagttcatgtacatctttggaatgattttagcatatatatacccctatatacaatatatatacatctattgcattgggggtgcgacattctccctgaacaagttgttgtagttgccagggggattgtagttgcacacaacatagatggtactgccactgaagaatgtgtttagtcaaagacttaataattaagtttagatcttacctcttcgcaaaacccacgcctagctcggtggagctcttccagaccacctgagtgaaatggccggtgttaccttgaaacgacggagaattccaattgtactgtcgaatctcttcgtaccaggatctgacggcatcggcacctttcagatttcccccggaggccatgtaaatgttctcaccatatccactgttctgtcgatgttccatgcgatttctggacagcaaatactataatagcgatttgctggagcttcaattagttgatgatctggagaatactcacattggcccattccgtggccaatcgattcagtttgggactcaaagtcaagggttgagcaccatgcttggcccgatataaattgtgggcttgaagaacttcttgctcaaactgaaatttgcaattttaataaacaaaaagaaggatatatgaaacttgttttatttgatgtaaggagctaccggataaattcctctgcttcccgccttacttgttgagcgctcattatgccgcttaaaattaacgtttttactcaagttaatatttaaattttgaactactttcgctggcacttgtcttcggaaactgttctcgtttggggatcggcgacacttttttatatcgattttcttatcagcttgccgaagtt

SEQ ID NO: 21179 - DNA, 1133 bp, DROSOPHILA
ttcaggcctggccaaaagccacaagcaccaaaggcagctggccacggggacgaggagagtggcacaatagacaaagtgtatcaattataatacgggcacaaggcgaaggatccccagccgggggccaaaggaaggggatccggggtccagtaaccaggagccgaaaagcaggataccagagttgcagctaacacaaagagaaaaggaactaaagaggcaaccacacttgcagagccatgttggctacgacaagtacaaccacaattacctcggatccgggcatcctctgttttcatcactgcaacgtgaaagttttctgcttcactttgccgcacacttgtccccattgcaatgccccactggacgcggatgtggatgcgcatggggatgtcgatggggatgcggatccgagtgcgcaactagacagggccgggccacgcctcctcctcctgcccttccgcctgccatatccttttgtgcgggccacgcagcatccgtgcgccattgtcctgcgtccctccgccggcgatttcctcaacgattacagcaacgccaccgatttgcatatcgcagtgaccacatccggcggcgacatcgtggagttcgatcgctttggccttcgccgccatcggcgggatgataatcctccggagtggcggcagtcgctgatggtgggcgatgtgccggagccgtggcacgacttttgggacgaggtcctgcagcagatctgcgcccaatcggtgcgctggtccatcgccagttatgcggaggagagccacaactgctacgccttcgtcctggccttcctgcaggccctcggccacgcccacctgagcgaggccgcccgcagcaagaccgccttctgtgagcagtgcattgttccaaggacgacgacagcgggcaagtacatctcgctgtatcgcaaaatccgcaggagcggcatctacgtccatcgccagcagcctaaaaaccgcagtaagccagcatccgcaactcctccaagttcctacccctcagactcgtgcgatggccttggcagcagcaaaaaggtctcaaaaaaaggatactccagcagcagtattacaggacttgccaaccgcccgcggcccacgctctgcaccatcgaagagtaa

SEQ ID NO: 21180 - protein, 298 aa, DROSOPHILA
MLATTSTTTITSDPGILCFHHCNVKVFCFTLPHTCPHCNAPLDADVDAHGDVDGDADPSAQLDRAGPRLLLLPFRLPYPFVRATQHPCAIVLRPSAGDFLNDYSNATDLHIAVTTSGGDIVEFDRFGLRRHRRDDNPPEWRQSLMVGDVPEPWHDFWDEVLQQICAQSVRWSIASYAEESHNCYAFVLAFLQALGHAHLSEAARSKTAFCEQCIVPRTTTAGKYISLYRKIRRSGIYVHRQQPKNRSKPASATPPSSYPSDSCDGLGSSKKVSKKGYSSSSITGLANRPRPTLCTIEE

SEQ ID NO: 21181 - DNA, 3873 bp, DROSOPHILA
gcccaaactgttgcgaaaaagtgttcaatatctgtggctatttaaagtaattttgccctagcctttaatataataaatttagcaattttatttggcaagtgcggagtttcaatatttcactcccccataatgcctggcgaaaggaaaaggaaacacaaactggataacagccttcccgcaatgcataaagcatcgttgtccttgggcaaatataaaacataatgcgaaaaataaatgcttgaaaaagcgagtaaacgggatataagcagctaaagaatattcatgtgcctcaataaaccgaaaagaaaagatgtcctttttgcgccaggcactaaagcgaggaaaaatgataaaactgcgagaagaaaataaagaaaaccaaacaaaggaagcgcaaacagcaaacgtgcattaaaagtattgaaagtctgggagtccccgccgaaactaacaattaaagaagcgattcgctggtagcaaggcatttaaagcggcttttatatttattgtgatatagaatgccaacaaaaagacaatcgccgcagttctcttttccgatccgctggatgcccggccaaataaataaaattgattagaagcggcaatggcagcaggcggcatcgatgcttcttatctgccggcaatttcattattttaatgcgccacacgaccatcaaaacttatgggcggagcaatctgactgacagcaatggacgcaggacaacagacattggacattccagtattgattgaccggactccgcatcctgtcaacagtttcagtcaaacaaaacagtgcgaaaaataaagaagttcaattttgttcttgccttataacaggagtaaatacttcatattttaaaaatttattatacaattatttttacacccagttcattgccatacattttatttaactgttgccctgaaaattaatccatctcaaaacaatacgcattttcgtcactgcacacacgacgattttattcaactttgtgccctatttctggttgacgttctgcagcagcaggaagtactgtccacttgtccggaccatctgcgaatcaatcaagtggaactggctgtaggaggggacccttgggggtggacctgcaggacctgcaggacctgcaggacccctgctctgctctgctccgctactcaccgccatcagtgtgggcaaggacatttgcatgaaccaggacacgtccagcctgaatccccggttcgtgcgcatcagcatcatgcggatgaggtggcggaactccctggactctccgtaccatcgcacctggtaaaaggcgttggcaatctcctcgctctgcaaaggggtattagtcacgcaattagacatcaatcagagcgcggattcccccgttacgtcacccacagcagtcgcaaatcgctggccattgtagcagtacacaactatctgatagccggctgccaccaggtacatggtcatccggatcatggtgatgctgctgttgttgccctgcgaacaaagacgttaaacggtgaatttctcattctgttaagttcctttggggataccctcggatcaagggctcaccaatccgacgctcatttggaacaaggccaggccccagttgaaaaggctaagcaggaactgcgtgaaagtgatgtgccgaaagcagttgttaacctcggttgcaaagctgtaaaaagagttaaatgaaatgtttcatttttaatttcgtcacttacttcgccactcgttggtactgataaatacagcatcgcaagtattcaaccctgcgatctggaggaaccaactcagatgtggcttgttccaccatttggttaagtgacctcataagtcccacgctatgaaggcacaggacaataaagactccatcaaagctaacggcacctgagaaaaaagtatttatggttgatatctgaaaaaggaaacctcatccatatggactcacacatgccgcagatatacagagaacaggtttccaggtacatctgtatatgatagtagggaaactctaatcccttgtgctcccaggcgggatacagagatggcagagcttagtatggcaaataaattattattttacatttataaaaagtatttgttagtggaattattgatttatttacgtaacattatgtcgtaggatcctttcggtttagtgaaatagcgatagaggttgattacgaaggagttgataaagtagtttgtagtaatacaaatacagctgtacaaatagataagaatttgccgacgagtgctggcccagtaccgattcatcgtggactcaacctgctggcgaatctctttgataacaggtagatctgaaagaaatgtatctttagtggattaatgcgcacaacaggagctcacctgacatcctttcaaagagctcacacttttggagtaattcatggcagcgcgcctttcgtagcaattcgtatatctgtctatgggcaaacagaaagtaccacatctttgctatcgatgttaggaactgcagggcagttccagcggtctgaaagattaataattaatactcgcataataataataagattttaggtatagttttgacgcacctctccaatgcgtggaatatcatgaatgtacctggctaacatttgccagtgcccataaagcgatgccaagctactcacgctaaggacaattgtccagctaaaggcgttagaatgtgtatctattattaagatatacccaaccttagaattacccacattctgagcacctgtccgcatcgggaaggatccaacaggttgaagcccaccgtataggagagtcggatcatctccctgatgctgcgatagttgcgcctcttcagttcggccgcctcttccggtgagtacatgtcgcctaatcgcggcctaattgtgttaatcgcccatttatagggacaatggagggggcgtggctcatcggtttggtttaattagatagttcagtgccagaggcaggaaaccacgcccaattacgtgggcaaagtttcactaaataattgaaatactttgcactggcaggctgggaagggtgagtgatgtgattctcgacttgtcctgtggttaattagtctgaccagtaactagatccacgtcaagttcgttcgttattgtatcctgtgaaagcttaaaggacttttgggttctaagctcttcatttcgcttggtaagagaggtttcccactaaaagctgcgaggttgcaagctttaagctgcaaaatatttcttctttgcaaacgcccaggttgtggaaaagactaaatatgcttatttaaaatatttacatagaagttttgattttttataatctcttgagtgatacctagcaggtactttcagctatcgcatccctagtcaccgaaagtgataagagggacgccccagattagcaaatatctcaatgtattgttttgaatccttaaagataagaacacattctttagagtacttatatcccaaaggttatagaggctgatagccatccgcatttcttctcttagatattaatttcccctatttatattccttcttcaattgttaaaatacgtcagttgaacttaaatcgcgtagttggaaacatcttcgagcagaaatggttgacttaaatattttaaatttgaatgaagactgtcttcaacacattcttaagtatctaagcatcaaagatcttgtaaatttagcggataccctgcccaggtttcgacagattttgttggacagaccgccaacctcgtacccagtacatcatggaaacgatcccgatggtgtgaaaccagtattgtattactcaacagttgccatcaagctgttgaggatcgtcaagaataacgtaaaaactttgggagttatcca

SEQ ID NO: 21182 - DNA, 1371 bp, DROSOPHILA
atgtactcaccggaagaggcggccgaactgaagaggcgcaactatcgcagcatcagggagatgatccgactctcctatacggtgggcttcaacctgttggatccttcccgatgcggacaggtgctcagaatctggacaattgtccttagcgtgagtagcttggcatcgctttatgggcactggcaaatgttagccaggtacattcatgatattccacgcattggagagaccgctggaactgccctgcagttcctaacatcgatagcaaagatgtggtactttctgtttgcccatagacagatatacgaattgctacgaaaggcgcgctgccatgaattactccaaaagtgtgagctctttgaaaggatgtcagatctacctgttatcaaagagattcgccagcaggttgagtccacgatgaatcggtactgggccagcactcgtcggcaaattcttatctatttgtacagctgtatttgtattactacaaactactttatcaactccttcgtaatcaacctctatcgctatttcactaaaccgaaaggatcctacgacataatgttacctctgccatctctgtatcccgcctgggagcacaagggattagagtttccctactatcatatacagatgtacctggaaacctgttctctgtatatctgcggcatgtgtgccgttagctttgatggagtctttattgtcctgtgccttcatagcgtgggacttatgaggtcacttaaccaaatggtggaacaagccacatctgagttggttcctccagatcgcagggttgaatacttgcgatgctgtatttatcagtaccaacgagtggcgaactttgcaaccgaggttaacaactgctttcggcacatcactttcacgcagttcctgcttagccttttcaactggggcctggccttgttccaaatgagcgtcggattgggcaacaacagcagcatcaccatgatccggatgaccatgtacctggtggcagccggctatcagatagttgtgtactgctacaatggccagcgatttgcgactgctagcgaggagattgccaacgccttttaccaggtgcgatggtacggagagtccagggagttccgccacctcatccgcatgatgctgatgcgcacgaaccggggattcaggctggacgtgtcctggttcatgcaaatgtccttgcccacactgatggcggtgagtagcggagcagagcagagcaggggtcctgcaggtcctgcaggtcctgcaggtccacccccaagggtcccctcctacagccagttccacttgattgattcgcagatggtccggacaagtggacagtacttcctgctgctgcagaacgtcaaccagaaatag

SEQ ID NO: 21183 - protein, 456 aa, DROSOPHILA
MYSPEEAAELKRRNYRSIREMIRLSYTVGFNLLDPSRCGQVLRIWTIVLSVSSLASLYGHWQMLARYIHDIPRIGETAGTALQFLTSIAKMWYFLFAHRQIYELLRKARCHELLQKCELFERMSDLPVIKEIRQQVESTMNRYWASTRRQILIYLYSCICITTNYFINSFVINLYRYFTKPKGSYDIMLPLPSLYPAWEHKGLEFPYYHIQMYLETCSLYICGMCAVSFDGVFIVLCLHSVGLMRSLNQMVEQATSELVPPDRRVEYLRCCIYQYQRVANFATEVNNCFRHITFTQFLLSLFNWGLALFQMSVGLGNNSSITMIRMTMYLVAAGYQIVVYCYNGQRFATASEEIANAFYQVRWYGESREFRHLIRMMLMRTNRGFRLDVSWFMQMSLPTLMAVSSGAEQSRGPAGPAGPAGPPPRVPSYSQFHLIDSQMVRTSGQYFLLLQNVNQK

SEQ ID NO: 21184 - DNA, 6699 bp, DROSOPHILA
gcaactgtttgttttatgcatgagtgggaaagtttatttttcagttatgcatgcccagtgaactctgacctacctcacacccacctccacctccaccaacgccattcggggccctcgaatggcatttggtcaactggcatggtgactccttccactgcagagcaaatattgacaaagtgcttgtttcaagtaaacaaattgaaataaataaatgacgaaacactttttatgccggcactttcgcacacattaacacactcccacttcggcacacacatatttattgaattcattaagcaattaattaaaattatattcaattagcataaaaggcatggccataaaaaccaacaaatatttgcggcctattcacagtttaatctgcaatttttaatgtttctaacgcctttcataatatcacatttttttcgagccattctcttttgaattatttgagtagcagcgagttcatgacttctcatatatttaaccattaaagtttataaaatcgaatgtggaaattgttaaacaaagaaagttatatctgctacagatatttatcccctttaaattgcctcaattgtgtccaataaaacccaaaattaagatgccgaattaaagggtacacaatttaaaaccactgtccataggacatgggctaattaatggagagctctgccattctccaatcacccgtttaaatcgcgggtacgcggctgagtcctgcgaaatcctttcgaatggacaataaatattgcacaattcacgctcgatggctgaaagaggcttaacaatgcagcaaggcgataaaaattaacggcacttaatagcaacattgaaatcattaagtgatttatgttcagccacgggcagagcttcaatataaacgtcagcgcccctttggtaccccgaaggacactcgtccttttgggcaataatacgcgttcgcatcgatattggtatttattctcgttcctttatttacatgagcatcttagaatacgtaaacgcactttataatacagcaacatacacatatagtagacaaaaactgagttttcacatcgtctcttctcaacccttttaccaatttcgattgagcccatcgcttgtcgagcacaataatttcaaaaattaaaacaaaatcttcagctaaggcaacacgctaacaaattccaaccaagtagaagccaaataataattataaatttgagtaggtacgtggaatccccccgcagtgtgcatgtgtgagtccgggggcgtttggcggttggggggggggggggggggtagcgtgtctagttggcagtcaattagcacgggcgccacataaatttcaatatcgaatacgtattcgcttttcggttttgtgtttaatcaagataaacgagctcgttttcagaatttccctttttgggcgtggaagtgacgctttcaccttgcagacacacatacacatttgggctatatatatacatgctcctgctgctgctcaggattcctttcatatcccgaccaatcccgcactgaaaatcaacgcggcaaatcgttgagcacgagcgtggacgtgtagctgggcgcctggatgtgtgccgtctttgtcgtcgtcagcatggtggtggtcgtcatggtggtcttgccgttgacatctgcatgcaccacatcctgcccgcccttcggcggcgtgtccaccccctctacatagccaaccgtcgtgacctgaacactcgtctttgttagccggtgggtgcgcagcttgggcaaccgcgagctcagatccgttcccgtggactcatcgtcgctgtagtcgctggtcaaggcgcttcctgttcgcccggagctgtcgtacgagtattgagtgtgataggtgctgctgggctctccgctgcctcctctcgtgttgttcccttccctgagggccacctccgtctcgccccgattgttgttcgactgattgctgcttctctgctgctggagcgagctggtggaagcggcggttatgtcctcctccgagatgtcatcgaaggccggcggcggcgtcgacatgcccgacatcgtcatgatcggctgacgaactgcatttgttggtgtactcaatggcggtaagcgcgatgccggcgagcgcagctgcgtggtcgaggttttgcgcttggagggggaatgtttcagtggaaatgtgggcgtcttcttgaacacctgtttgcccatggcgtcctggaagcgcttggcgtagaaggagggtcggcacacggacactgtgtctccgttgtacagaatgcttttgaatgtgtgctccagcttcttttccaggcgatacgactgcaaaatgtcgatgatgccgatgtacaagatcaaccgctcgtcgttttcagaacgagccggaatgccgccggcgggtacatcctcgtcctcctcgagcggcacatccatatcagccgtaatggactccagtgcagtggaatgggccaccaaacgctgacgattcatactgcgcgttcgattcagggcagctccagccgaagttcccggtatggaggcgtatgaggccaccgcttggagctgattctgatccgcttccggagcatcgtcgtccggatttaaggaaggtggtccctgagcggcgctttccttgcgctgcagcttagctcgcgcatttaggattcgttcttcgcgtttctccttggcggccaggtccaggttgtggattcccaccaacagcgagtagtccataatctgaaaactctccagcaccatacagtcccgcttaatggtgctcatcagtgcattgtacttgtccgtctccaggaatatgccattcggatggtgctcagcaaagtcgaggtccttgaacgtgggactcgccttttgtcgctctgccttggaggccttccgtcggaaggaagatcccttaaggtcgtacttgcagtgcatcttaatgtctgaaggcaacaggttgttcatggccaccaaccgcacgttcttcgagttgtagtggaagcaatatagtccgaagaacttaggcagcagcgttcgaggattctgcgataggttcatgtaataaccgggcaaaagtttttgcaggaactcgcattccttcttctgcaccgtcttgataatgaactcgtcgtcggtcgtcaggtaaaatatggaaccagaggcacccggattggaaagctccctcaggggagacgcacacatggacatgaggaagtcatcgggtgcgattccgaacagatctcggaagtagcgaaaggcgatgggtgcgtagaccttgaagcggaagtcgttgtagtgatgggcaggtgttatggaggaaccatctggcggaaacgaaatcgtttccatttcccagaagtcattcattagcagatcccgcttgggcttactggccaggctgcccaccgtatgctggatgcccagctgaatggagcccatgatttgcttggattggatcttcttgtaggtcacctcaccgccctccgccactcgccggtggcccagcttcttctcgtgcttcccgcccgtggtggagggattccgggatatactggcatccagcgtggagcttgcgcttctgagtttcgaggccggcgtttgggtggcggctatgttgttcagttcctgctgcagcaacgatgtggtctcctggcctccgtgcgccatagcggcatccctgaacaactgccgagatgttcccggctgcaggctcatgggtggtggggtgctgggcgtggcctcctggtcgggacttgcggtctgagccgggggaatcttgaccggcgtgagcaggctcttgtgctcttgctccagctccagctggttttccagcggttcattctcatcatccggctgatcctttagcctatcctgtttgccaaccggctccagttccagttccacgcgggtgtccatttccctctggggatttccgctctctgcggaggagaaaaccacttattgcagtgccgctcaaacagtacaaaaggcattcaattgcagctcgattaatgggcgtatgtatgtgggtgtgtttatgtgagtgtgtttgtgagtgtggagtggatgagtaagtgggcttgagtaggtgagtaatcgattaagccagaggcaacaattgtcacgttcgcacacacatatctctcagtaacactttagtacaactctcaatgtggtaactcgagactttggagcacctgttgcttatcttttgtttacccaaatgaagagcggctacagctaaaacaacaacaacaatcaccagccagaaggcaaaagtaattagcccatggtcaattaaaagctgcggactctaaaactgtaagttcttggcaataaagataaaatcacaattgcgtgaaaccgtatgcaatcgctcgaaattgcaaaatgcacctgaaaactggtaagtagacagccgaaccaaaatttcgattgtttgcatatgggaattccaaataaccggcagacacgttcaaatgcataaataaacgtacaactgcactgggaaaaattgtgttgtctcaattttgaatacaattatcttagtgaatttttaatgtgcaatttgtcaaagttctgatatccatgttcaagctttaatttctaccagagtgtatgaaaatttaataatattatccgtggctaatctatttcttttccaaacacttctctatccaaaaaaacaaatattttctctatctgcacgaacaaatgggaaacgtttgctgaaaaacacaaacaattaaggccgaaatccacaaaattattataggaaagtcattattttgtgtgtggcttgttgtattttgaaaaatggaaaatgaaaccaaaacatggccacgatgggcgtggcagggggcgcatcataagtgggaggccattcagctggctcgtgtgtgtttattttcgtaaacttttagattgtcgctcggcggatatgtcggcggcatctcctatatatctttcctcgtgtctgttttcctttttttttttaatatttatcgcacgcatgacacgtcaaatagaacaaaaacaacaataattgtacgttaacaacggaaagttttgccaaattcagtgaatgaaactaaactaactgaaatgtgcgaggctagttgctttattagcaataacgttggatcttatttaaatggaagaagtccctctaaagttaataacttgccacttgaccctcgtttttgtggtcgttgttgttgtgttgctgttgctgtggctgcttttgccttgggaccatttgttgtgaattatgagcttgcaattatagcgttttgccgtttttatttgtaatttaattagcgtacttacacagaaatgctcgagggaatagtttgctagaggtcaaaaaaaccgaaagatatccagcgaaaagagataattatttgccctcggctgttctctactcctctccgtctccctctctttctttcaatcggcacctctctttcgctcgctttgtgtattcgttgatcggctcaaggcgcgtttatctgtagcgctttctctgtcgctccgccgccgtcgctgttgttgtttgtggcgtacttcctccttttgcttccccttttatccagctctttcgatttccactttccgcttgataaattgctttcataatttacaacaatatctcaacgaatttgaattctccgtgcacacctggtttattgtgtgtggtgtgtgcgtgtgtgtttgtgactgaggatgacgtcgtcgtgcggcaatcttggatattcctcatcgaagtgccgcattttgcattttcccacacccacttcaatcggcgatcgtcgtccgccaaaagttaacccgatttttcgagagccttccgctgcaatgtatccactccgcgaactttaaaaccaggcgaaaatcaaatatttctcggcaagagaaaactgttgatgagtcgttcgcgcagaagatttttacgcgtgttatcgtttatcgcttgcgctggcgttagttaattttgtgctgcgcggtatattttgcggtattatttcattacattgttttttttttttaccttctgctagtttccaagtttcccaccacggagagagtctttgctgatcagcaacaaagcgcagtgttgtaaagtgccacgtacacttgttataaaaaatttttaattctgctataaagtcagttacaatgcaaactacttgtgttaaaataagtgaaaattgttcggattagtagtttaaaactatttaagaaaaacatacaataaaaacagtttttattactatttgcctaagcttcgttacatttcaagcagcttgatttaggatttaagatcgaaaagcgggccgtgcgattcatactatatttggaagagaaatgtgtggatatctagactcaaataataatttcaattttttcacaggaattgctttgcggccgaacaacaccaatctaattagggaacacctacaaagacgacttcccagccgacggcgcaattctaattggattagccagcgaagccggtgaagaaggcatttcaggaccctctgcccttgaccactgaatttttctgtggttcgtttgtctcattaccacctccccctgccacggcacgccgtttaaattgattgaaaaacagcccctcaatcgatatttatatctacatgggccagtcatgagtaattctgctcattagtaggcaaaggcaaa

SEQ ID NO: 21185 - DNA, 3309 bp, DROSOPHILA
acacaccacacacaataaaccaggtgtgcacggagaattcaaattcgttgagatattgttgtaaattatgaaagcaatttatcaagcggaaagtggaaatcgaaagagctggataaaaggggaagcaaaaggaggaagtacgccacaaacaacaacagcgacggcggcggagcgacagagaaagcgctacagataaacgcgccttgagccgatcaacgaatacacaaagcgagcgaaagagaggtgccgattgaaagaaagagagggagacggagaggagtagagaacagccgagggcaaataattatctcttttcgctggatatctttcggtttttttgacctctagcaaactattccctcgagcatttctgtagagcggaaatccccagagggaaatggacacccgcgtggaactggaactggagccggttggcaaacaggataggctaaaggatcagccggatgatgagaatgaaccgctggaaaaccagctggagctggagcaagagcacaagagcctgctcacgccggtcaagattcccccggctcagaccgcaagtcccgaccaggaggccacgcccagcaccccaccacccatgagcctgcagccgggaacatctcggcagttgttcagggatgccgctatggcgcacggaggccaggagaccacatcgttgctgcagcaggaactgaacaacatagccgccacccaaacgccggcctcgaaactcagaagcgcaagctccacgctggatgccagtatatcccggaatccctccaccacgggcgggaagcacgagaagaagctgggccaccggcgagtggcggagggcggtgaggtgacctacaagaagatccaatccaagcaaatcatgggctccattcagctgggcatccagcatacggtgggcagcctggccagtaagcccaagcgggatctgctaatgaatgacttctgggaaatggaaacgatttcgtttccgccagatggttcctccataacacctgcccatcactacaacgacttccgcttcaaggtctacgcacccatcgcctttcgctacttccgagatctgttcggaatcgcacccgatgacttcctcatgtccatgtgtgcgtctcccctgagggagctttccaatccgggtgcctctggttccatattttacctgacgaccgacgacgagttcattatcaagacggtgcagaagaaggaatgcgagttcctgcaaaaacttttgcccggttattacatgaacctatcgcagaatcctcgaacgctgctgcctaagttcttcggactatattgcttccactacaactcgaagaacgtgcggttggtggccatgaacaacctgttgccttcagacattaagatgcactgcaagtacgaccttaagggatcttccttccgacggaaggcctccaaggcagagcgacaaaaggcgagtcccacgttcaaggacctcgactttgctgagcaccatccgaatggcatattcctggagacggacaagtacaatgcactgatgagcaccattaagcgggactgtatggtgctggagagttttcagattatggactactcgctgttggtgggaatccacaacctggacctggccgccaaggagaaacgcgaagaacgaatcctaaatgcgcgagctaagctgcagcgcaaggaaagcgccgctcagggaccaccttccttaaatccggacgacgatgctccggaagcggatcagaatcagctccaagcggtggcctcatacgcctccataccgggaacttcggctggagctgccctgaatcgaacgcgcagtatgaatcgtcagcgtttggtggcccattccactgcactggagtccattacggctgatatggatgtgccgctcgaggaggacgaggatgtacccgccggcggcattccggctcgttctgaaaacgacgagcggttgatcttgtacatcggcatcatcgacattttgcagtcgtatcgcctggaaaagaagctggagcacacattcaaaagcattctgtacaacggagacacagtgtccgtgtgccgaccctccttctacgccaagcgcttccaggacgccatgggcaaacaggtgttcaagaagacgcccacatttccactgaaacattccccctccaagcgcaaaacctcgaccacgcagctgcgctcgccggcatcgcgcttaccgccattgagtacaccaacaaatgcagttcgtcagccgatcatgacgatgtcgggcatgtcgacgccgccgccggccttcgatgacatctcggaggaggacataaccgccgcttccaccagctcgctccagcagcagagaagcagcaatcagtcgaacaacaatcggggcgagacggaggtggccctcagggaagggaacaacacgagaggaggcagcggagagcccagcagcacctatcacactcaatactcgtacgacagctccgggcgaacaggaagcgccttgaccagcgactacagcgacgatgagtccacgggaacggatctgagctcgcggttgcccaagctgcgcacccaccggctaacaaagacgagtgttcaggtcacgacggttggctatgtagagggggtggacacgccgccgaagggcgggcaggatgtggtgcatgcagatgtcaacggcaagaccaccatgacgaccaccaccatgctgacgacgacaaagacggcacacatccaggcgcccagctacacgtccacgctcgtgctcaacgatttgccgcgttgattttcagtgcgggattggtcgggatatgaaaggaatcctgagcagcagcaggagcatgtatatatatagcccaaatgtgtatgtgtgtctgcaaggtgaaagcgtcacttccacgcccaaaaagggaaattctgaaaacgagctcgtttatcttgattaaacacaaaaccgaaaagcgaatacgtattcgatattgaaatttatgtggcgcccgtgctaattgactgccaactagacacgctaccccccccccccccccccaaccgccaaacgcccccggactcacacatgcacactgcggggggattccacgtacctactcaaatttataattattatttggcttctacttggttggaatttgttagcgtgttgccttagctgaagattttgttttaatttttgaaattattgtgctcgacaagcgatgggctcaatcgaaattggtaaaagggttgagaagagacgatgtgaaaactcagtttttgtctactatatgtgtatgttgctgtattataaagtgcgtttacgta

SEQ ID NO: 21186 - protein, 792 aa, DROSOPHILA
MDTRVELELEPVGKQDRLKDQPDDENEPLENQLELEQEHKSLLTPVKIPPAQTASPDQEATPSTPPPMSLQPGTSRQLFRDAAMAHGGQETTSLLQQELNNIAATQTPASKLRSASSTLDASISRNPSTTGGKHEKKLGHRRVAEGGEVTYKKIQSKQIMGSIQLGIQHTVGSLASKPKRDLLMNDFWEMETISFPPDGSSITPAHHYNDFRFKVYAPIAFRYFRDLFGIAPDDFLMSMCASPLRELSNPGASGSIFYLTTDDEFIIKTVQKKECEFLQKLLPGYYMNLSQNPRTLLPKFFGLYCFHYNSKNVRLVAMNNLLPSDIKMHCKYDLKGSSFRRKASKAERQKASPTFKDLDFAEHHPNGIFLETDKYNALMSTIKRDCMVLESFQIMDYSLLVGIHNLDLAAKEKREERILNARAKLQRKESAAQGPPSLNPDDDAPEADQNQLQAVASYASIPGTSAGAALNRTRSMNRQRLVAHSTALESITADMDVPLEEDEDVPAGGIPARSENDERLILYIGIIDILQSYRLEKKLEHTFKSILYNGDTVSVCRPSFYAKRFQDAMGKQVFKKTPTFPLKHSPSKRKTSTTQLRSPASRLPPLSTPTNAVRQPIMTMSGMSTPPPAFDDISEEDITAASTSSLQQQRSSNQSNNNRGETEVALREGNNTRGGSGEPSSTYHTQYSYDSSGRTGSALTSDYSDDESTGTDLSSRLPKLRTHRLTKTSVQVTTVGYVEGVDTPPKGGQDVVHADVNGKTTMTTTTMLTTTKTAHIQAPSYTSTLVLNDLPR

SEQ ID NO: 21187 - DNA, 6839 bp, DROSOPHILA
ttatttaatttaatggattaccaatttctacacaaatgtttgttaggctaataaaatagtttaatattcaaccacaagcttttaggtaatggcttcacctataaattctcacgttgtatcaatgattatttagtgccaaaaatgtgtttacggaaatgttaaataggcgtacattaagcaaattactattagttttcgtacactgcttagttgtatataggacactaatggccaatggctgaataaatgttcgtactcaaggaaataaaattgtacaataaattatttaattactcaaataagaggagcgttggtattgcctacttttattatttatttcgtagaaccatatttaaatatttcgccgccaggcatttaagtagatactttggccatcaaatttgattggttttcttcattattaaaaagccgaaagtggtctctattcctgtcaacagccagtgacgaagttatggcccctcacgagcgaactctgacccctgataataaataagtgtgccgtagtttttgctgatccatcgccggctccagtcagtccggacctctgtgccaaaaatagcaaaacgatattaatttttgtttgctttgttttggtttctgtttctgtggttctgtgttactttggccaccgaagccgcaagcaggcaggaaatgagaattgaatacaataaaaatcattcaatagtatcactcggccccattgttgtgccgaattaataatggataacaaaggcagtggaaagcggaagcccaaagacgaaaagccgaagcacacactgatcccacacacacacccaatagtcgtaataaaaaggcaagagtgtggaggagacaagtggattatgaggacaggatggggtcgatcctgctacccgaatccgatccatccctggtttaattaactctcaacgtgatttcccctgttctcgcagcgctgagaaatggccagaagtagtagtggtagtagtggtagaatgggctattcaattccggtggtcaggggctcgtaatttgaagttatgtgcggtctgatgtaaccaacaagcaaacaagcttcctcgaggtcctgcgagaaatttccatttaagccagcgcaggcagaacgaactgagttttcccttctcagtcgtaaatcataaacaaaaggcagcatttcggataacaaaaggctgaagaaaaagtttagaaatttagctttaaaaatgtttgcagttcgaaaagaaattcatgaaagggtgggagagctctgaaattgttccccttctgttcagatgcaaaacaaacttccacgagaaaattcataaacaaggggcattaattcccaagcaaagagtcgaaagaaaaagttcggagtcagctttaaaaaagttatagtttaacaagacagttttatgcaagtacggcgcttttaatgcttcttcttttgaaagctgaactcttagttaaacaaattaacttttaaaaacaagttgggattttcatgaatttcaatagtttcataataagataagtaaagaatatccctaaataatagaagataaatctttccaacaaatgaagccgaattaccttttgtcactgagcaactcgcagtccaatcgcatcagcagcacagagtatgacaggtcataggtggcaggatgcggaacgagatttaaggtggtagtgtcgtggaatgggcttccttgccagtgtccttgaatcagacactcgaactcaaccacaggcaacgggaacggccataacttccagctgcgaggtgaccccaaacgggtgaaaggtggtggagatggtgacctcgtggagtgactgcaccttcacctgtcacacgggcgaggaagcgaaaacgagcctgggtacacgcgtacccagctgggaaaatggaaaaggggctccgagattgccaactaaccaactttcgtggcattggtcacagcagcagtagcaaaggcaaccacagaagtacaagtaacatggcactagcgctacaaaacttcactgagagaaattattaaaacaaagtataaaaaacaattgagatcaaaacaaatcttcttttctactgttagatttgcaataataatagcacaaaaaaaaaatgaatcaggtttatttaaatattcattgcccaaaaactccccatttcgtttccgaaattgcgatttccctcaagtgtagcgactgtgaaaacagcgaaaacagcgctcgtttagcagagttgtatcctgtttccaattttcattcagtatcccacttccacgcgcacttcgtgtgcacccttcacccaccacccgctacacacctcccatcgcctatagcccaccaaccacccacccaccaacttacatcccaaagtaggtcgtggcgtctgtccttgccgtggagcgaaggcaggcacaaaggcgagcacgacgaacaaggagctgcaaaaggacgaaaaacttcacctaacctcattacgagtttccctacgcacacacacacacacacattcaaagcacgcacacatagcagtgatgacgtcattggttgagctgtatgccttcgcctgctcattcgtttgtaaaggctgcgcacgaggtgggtggcctttggtgggtgggtggtgcaaatgtcagaggttagcccggcaatggaactacctgtaagctaattatgcatttcagaataataaataaataaataaacagttattttaaaatacccgtacagtgccaatataatgctcatgaagttattcacgggcggatcaaaggatctaagcaaatgaatggagcaatttccctttttgggctggaaaggacctgcgcattgagcagagagagagagagagagttattggagtcgtcggctttagatgtcctggaataaccaaaaggacaacaacaaattgcagtaaacagtagaaaaagtagccaaatgctaggagatgggcgggattactgggcggtataatatgttggcaaaagggggcggggtaaaagggtatcatgcgtagcggcaactgagacattggaattattattacattttacgtgcttttattgcgcttcagctacgctttccatttgcgccctaaatttcgcttaagtttttgtcgagatatacatatatgtatgtatatatgtataatttctataatttttcaactttttgtacgattctgccaggtgagatggaaattgcgctaggctactggccaaagtggatgacaaaatcttcactaatcccatttgaatttcattcgtctgccaaatggatttcattttaatttcgcattaagcaaagacaaatccctgcagcggctttctgctacccaatttaaatgcgttcgcagctgatttgcatgcaaataagccagattttccaatcccgcctcatccgaaggactcatgtccttcacatgctaggtggaactgccagatttggcaaacaaatatgcgggaatgacacggttaatcgcttcgtcgctcaaataacatagataattaacatatccatgggttatgcgggcatatttgagtttgccaatggggtttctatctgactgatccgggccaattgagtctccgttcggctagaacaaattgtagttggtgtttgctattggcaaagttcttaaccacacgtattctaagccgattggttaaacaactttaatttaaacgagagttcgaaaaagaggtgacccacttcgaaaacaattttaagaagcagtaagaaaatatgaaatatagattatatcactctttggcctttccatccacctgcccgcctcgcagaggatctagagccaggtcgataaccaggtcctttccgtcgtccggcggccccttgccagaccataccttctggatgctgtcaatgtagtcgccaaaatccgtggctgtgaagcggtgctggtatgggaagtcaatggtgcgtaggtggaacgggcaattgacgtgatagacccaccaacgtggtaagaccacttctatgtggtggctttcgcaggtggacaaaaactcgttgatatcatcgcactgggtgcgcacactgataaagtatatagcgtgctccagcaattccatcatctccgggtccgtattgaatgccaacatcccgggttccttgctaaagaggtcaaacttctccggatggttgaaagactcgcgcaggctaaacaaaaaagtcattggcatatggtgaaagcggacgcacttcatcagacgctgaaagtgctcccggcgcttacggccgcgagagtgccccagccaacgtatcacggcaaagaacacctccatctccgaattaacaccgatcgagtcctggcgcagtaacatttccagaacgtccactttcagacgcacgaagtgtgggctacccaccagcgccaggaagtatttcctcaaccggaacagcatagcttcgcagagcgcgccgagcgccggcatccgccttgcgcccaggtagaccaggaaggcaaccttctcccgcacagactcatcggacaggatctgccagatttccttctccagcagggttaccttcaagtggcacgcgacttggagagcgggcaccagttcgtcgaattcaggcagtttgttggtgcgcatccattcgtagacgaccttgaagccgccggaaggcacctctctctccttgaacttgaaccgggttatccgccagtcgcgtataccaaaccacaccgagaagcacctgagcaggcagggaatgcatttgaatttgttctctccgatctgaacgagggcgagggcgccatagttgctcttaagaatattggtcatcaattgcggccccgatatcttgggcggcaaattgggtatttcagctatgaagggtttactcttgacgtaggagaaaacagaaagcagcgggaccttgtagttactgtccttgaacgttttccagtcgctgtactcctcatccgtgaacgtcttccacaagagttcggcccgctgttgctgtagtattttgtccatcttaaccgtgggtaggtcgccatcggtagtggtacttttgtcggtagatgtgcccttggtcttttccttctcggatttattttgctgcaacagatcctcttcgatcgttgagcttatcgacttattattgtcttgcggtattgattccccttcacgaacaagtgttttcgtggaagaaaagctagtggttgaaacaccatgtttaggctccatagtaatactgatctggaactggtaataaggcacctaaaatagaagctaaatgttataagaagcaaggtctactgatgctaaagccagtggacactattctcagcttggaagtgttgtgcatttgtacacatttccagacctttaatcaaattgtggatattttcattttcggtgagcaaataaagttgtatttttaaattctcctattggctgcggttgggtaaaaatatgtgaattgacttccgtttgtgcgattcaatttggcagttcctcgtattaagaagccgccactttgaccgcgtggtgaggaagccgtttcggcttctgcctttaagtcgtttggtattatttttattgttatgaatttcaatttcagtgtctcaaggacgttgcacgaaattaaagaccccaaatatgcgcaacactttcgcgccacttgcgcacgtatacccgccatattaaagtgtatgtgcaccgtccttgttgtgtgtgcgtactcgtgtgtgtgtgtgagtaagtgatacgcggcgtatacgtgatatgtgttccaagcattccctgctcacttcccggactcttccgacttcagggtttttcaatttcctgttgctttcgtgcattaagccccttggtaaggcatgagcccgaaaactaatctgcaaaaggtacatttcatatttgtgaattaatactcttgattttctctgaatggaaactgctttaaagatgaatctgtgaagtgagcttgcgctgctttgaggtcgtcagtgtccttggcattatatacaatttgtacttggctttatgtattcgctgttggtttcccccttttttttttttttttctttggcttgcagtttccccggcggcggcgagatttcccctcttttcctcgttgcgtgttctggtttttccagatcagtgcctcgcagcttgagccatattttcctctggcataattgcaagaagagaaatcctctaagtggcaggatatggcaggaggagcaaaggatgtcgccgtctgaaagcaatttctttggctttcagctggccaaatgccaggggccatatttcagacttaaattgtttaggttttgaatttcccgatgatctggtcacactttgccaatgacaagtgtgacttattaatttaagttattatcataaattgtgtatttattttgttgttcttcttgccagctgacacacaactattagtatttaaggatataacaggaagctagaaaaatgttcctgtacctaagaaattagctcaactttcagctggccaattgccagagcttaaattttcgactgagtggccagtcaaaactgccaataactcgaagaaaactagcctgcgtttctatcaattctggaaatattttgtaaacattaatgatctgtattccatgacgtcacctgcatgagaattgaagaaaaccgaacgaagacgtacagactgtttcgtatctgtgcatctgatggataaacaaattggctgcgtgcgctcatcgatttttatgagttcaaagatttactttctgccgcattccagcacagaaatccctgcaccgaaaatccaatgtgcattcggatgccagaagccggggaaacaaa

SEQ ID NO: 21188 - DNA, 1968 bp, DROSOPHILA
atgcacgaaagcaacaggaaattgaaaaaccctgaagtcggaagagtccgggaagtgccttattaccagttccagatcagtattactatggagcctaaacatggtgtttcaaccactagcttttcttccacgaaaacacttgttcgtgaaggggaatcaataccgcaagacaataataagtcgataagctcaacgatcgaagaggatctgttgcagcaaaataaatccgagaaggaaaagaccaagggcacatctaccgacaaaagtaccactaccgatggcgacctacccacggttaagatggacaaaatactacagcaacagcgggccgaactcttgtggaagacgttcacggatgaggagtacagcgactggaaaacgttcaaggacagtaactacaaggtcccgctgctttctgttttctcctacgtcaagagtaaacccttcatagctgaaatacccaatttgccgcccaagatatcggggccgcaattgatgaccaatattcttaagagcaactatggcgccctcgccctcgttcagatcggagagaacaaattcaaatgcattccctgcctgctcaggtgcttctcggtgtggtttggtatacgcgactggcggataacccggttcaagttcaaggagagagaggtgccttccggcggcttcaaggtcgtctacgaatggatgcgcaccaacaaactgcctgaattcgacgaactggtgcccgctctccaagtcgcgtgccacttgaaggtaaccctgctggagaaggaaatctggcagatcctgtccgatgagtctgtgcgggagaaggttgccttcctggtctacctgggcgcaaggcggatgccggcgctcggcgcgctctgcgaagctatgctgttccggttgaggaaatacttcctggcgctggtgggtagcccacacttcgtgcgtctgaaagtggacgttctggaaatgttactgcgccaggactcgatcggtgttaattcggagatggaggtgttctttgccgtgatacgttggctggggcactctcgcggccgtaagcgccgggagcactttcagcgtctgatgaagtgcgtccgctttcaccatatgccaatgacttttttgtttagcctgcgcgagtctttcaaccatccggagaagtttgacctctttagcaaggaacccgggatgttggcattcaatacggacccggagatgatggaattgctggagcacgctatatactttatcagtgtgcgcacccagtgcgatgatatcaacgagtttttgtccacctgcgaaagccaccacatagaagtggtcttaccacgttggtgggtctatcacgtcaattgcccgttccacctacgcaccattgacttcccataccagcaccgcttcacagccacggattttggcgactacattgacagcatccagaaggtatggtctggcaaggggccgccggacgacggaaaggacctggttatcgacctggctctagatcctctgcgaggcgggcagctccttgttcgtcgtgctcgcctttgtgcctgccttcgctccacggcaaggacagacgccacgacctactttgggatctggaagttatggccgttcccgttgcctgtggttgagttcgagtgtctgattcaaggacactggcaaggaagcccattccacgacactaccaccttaaatctcgttccgcatcctgccacctatgacctgtcatactctgtgctgctgatgcgattggactgcgagttgctcagtgacaaaagccttttgttatccgaaatgctgccttttgtttatgatttacgactgagaagggaaaactcagttcgttctgcctgcgctggcttaaatggaaatttctcgcaggacctcgaggaagcttgtttgcttgttggttacatcagaccgcacataacttcaaattacgagcccctgaccaccggaattgaatag

SEQ ID NO: 21189 - protein, 655 aa, DROSOPHILA
MHESNRKLKNPEVGRVREVPYYQFQISITMEPKHGVSTTSFSSTKTLVREGESIPQDNNKSISSTIEEDLLQQNKSEKEKTKGTSTDKSTTTDGDLPTVKMDKILQQQRAELLWKTFTDEEYSDWKTFKDSNYKVPLLSVFSYVKSKPFIAEIPNLPPKISGPQLMTNILKSNYGALALVQIGENKFKCIPCLLRCFSVWFGIRDWRITRFKFKEREVPSGGFKVVYEWMRTNKLPEFDELVPALQVACHLKVTLLEKEIWQILSDESVREKVAFLVYLGARRMPALGALCEAMLFRLRKYFLALVGSPHFVRLKVDVLEMLLRQDSIGVNSEMEVFFAVIRWLGHSRGRKRREHFQRLMKCVRFHHMPMTFLFSLRESFNHPEKFDLFSKEPGMLAFNTDPEMMELLEHAIYFISVRTQCDDINEFLSTCESHHIEVVLPRWWVYHVNCPFHLRTIDFPYQHRFTATDFGDYIDSIQKVWSGKGPPDDGKDLVIDLALDPLRGGQLLVRRARLCACLRSTARTDATTYFGIWKLWPFPLPVVEFECLIQGHWQGSPFHDTTTLNLVPHPATYDLSYSVLLMRLDCELLSDKSLLLSEMLPFVYDLRLRRENSVRSACAGLNGNFSQDLEEACLLVGYIRPHITSNYEPLTTGIE

SEQ ID NO: 21190 - DNA, 10043 bp, DROSOPHILA
tcaatacatccattccatatcctctgacaagccacgccgccgtatcctcgaaggcctccagtcctcatccgtaacctcatcatccctcgatccccaacaatccatgcatgactgacccccttttttgaaccgcgtttcgtgcgcgtgacacctgatgttattttacgattattgtttctggatttatggaacgcaattgcatttgcagcacggcaggtgttgttgctggattgctgccggttttgctgctcttgccgctgcggaaattcccatttcgccattgcacaattaaaagttgcgaatcctttggggctgcgttggcaaagcggccaaaggaataactatattaattaaaaaccacaaaatccgatttgcactatgcccagggcttaataaaattgtttgttgaaaatctacctgtgtcattatgtgttttgtaccggaaatgaaatgtgtgcagtgtgcaggactcgcattcgaaagaatgcagcttactcggatttatgcaattttgctgcactgccaagagttgaatgacccctttaaatttaaactttaatgaattctttttaattattgcagatttatggagatttatgagcttatgagcttaatggtgaatttatacatatttatttaaacttatttagaccaaataaaatagtgcctctcgtttaacttgaaaaagcatcgcgtggaatatttgtttatttgatatccattagatcgctcacagggtaagactaatgctactatgcaaactcaaagggattgtgtgggcataaatccaattttgcatgcctcactcgatgtttttgattttaaattacatttttaagaactacattgtgtgtttgtgtaacaacatgagagatattgagtgtttcatgtgtgggtgttgtgtgtgttttcgtatcatttatagttatcagatatgaatttgccaaaatcgccgctgagagtatggtctcgtccttcgtccttcgtccgctggacacatttaattggcggctatcgtgcagacacagcaactgggaaaccagaacgtgtccgtgtacagattctgcccgttgccctggagcgcaattaagcgtttttgcacaaacttctgctcgcatctcgagttgtagccgttgggcaattcgcacaggttcgagcaggtgttcgagctggaaaataaacggaatcggaataagtgccgatgcgaatgcgaaataccaaatgctaaaaatcaacaattgcccagaatttagttgtgggccgctggccgtaaataaggagcgccggctgcggctccttcgaaggaggaagtgctcagatcttcagtcgcaggcggaccagagttgaaagtttaacgaactcgttaaaacgggaatcgtacgtaattgataaggagtcgcagtcgcagcctgagcggaagcagaaacggtacaatccctgcactggaaataaatatcatcgagcactggaacttctattaaaataaatattgtattcctatactttacaaaaaaaaggtttcataactctgaaaatcgcaacttctgctgtttcgaattaattttaaaatatatatatattgcattgaatttctctgtgtgtagctctgctcccagctgttcttcggcaaagatttatgcgcgcctgcgtaggtactccatttggttaaacaaattgcgccaagtaccgggctcagtgctaacaacaagtggcattggaaacggggaagggattcggcatccagaaagggactcgattcgagactgagcagcgggacgaacgggcaacaattagggcagcgttgacccaacccaaagaaccagaaaccacctcaccccaatttctggtcctgctatttgtttgcgctttttccgaatgtgtgcggaaaggttttcgagtagcgtacgcatccaaaaaaaatatataaaaaggggaacgaccaagcagaggggaataaaacacaggggacaaggacatggcctaatggcagtctgtgccctgcttcggtatttctcactcatttttcggggtgtgataattcgtttaaccgcaattatgacagcgtataaacggccttagttcgacctgcactaaccacgtgcccggtgcgaaaggtgcgacagggacggatgcagatgcaggaaagagatggccggcaagggacttcccctagtctcaacaaaaacaaatatatatatatataatagagggggaaaccactgcgccccgctgcgaattattaactttggaatggggttgacatgacacctagtagccactgattacaagtgctgaaaacgttaaggggtgaaccttcggatcaggaggaataaatccgagtaatcagtgaggaaggctacttcaagaacggctggctgcataagtcacaaacattaatccgtaatgcaaacaaataacatttgatttgttatttaaaaggttaacgaaatactactgcattactttcaatacagagaaataaggcaactaagttcgctgattgacgtaaaacgtttcgggaccaatagagacaatatttttagggttaaacatttcagtgcaggaattacaaaaatttgaatttaattgtattatattatacaaataaaaattcaaagagacctatatcatgtattcaaaccatgcacgttcaagcagtgcacaatacgattagccgagacataaccccatgtaaaatttatgtaaaacagatttaaaatagaatatttcaaagtttaagtcgtataataacaataatgctattacgaattttcgtcgaattaggttccccgtactagtacttacgcgcaaagctccgccttgaccatttggcgagcggtgttctgctcgttgaccacaaacatccagtttccgcggctattcagtgccgcctgcggggtgatgaactgcgatgtcgtctggcagagggtggagcgccccggactttggcgctttgtcctcgaacgcttcttcagcggattgggggcttccacgcccacgatatccaagagatccatgttgagcgagacatcgcgcttgctttgtgggtgatcctctgccgggttgtcctgttcctcggcctcctctgtctgctcgttcaccggctccaccacctccgcttgaacctcgtcgggttgcctctgcttccgactgagatccctgaccaagcgcttcagccagagcgtggcattgtagggagtcgacttgtcactctgattgatgtacaagtgaccgccagaagatgaggtgcctccgccctgggagttataccggtgacccgagcgatgacctccaccggaggaggtgtacagaagataccttaaagtgacaaatgatttagatttatacaaacatatgtacaacaactctttaaaacatcaagtcaccatttttaatttgaaattcataggatttgtgttgagagtaatacaattttaattaggttcttaaaatccattcatggattcattttcaaaaaatactactttcaaggtcaagattatttttttttgttgtggtacaaacaaatggaatctgaatgaaaaccttgaacaacaggcgagtttaagttgctggttaatctttatcgagtacttacgtgggtgcttccgtagagggattgctgacaaagagcgggtttccacccccagacggtctctggggattacctccgaagggtgtctgataactatatccattaaagtcctgggcagcgggatcccggggcgggaagatggacttgggatcgtagaagacgggagtatcgtgccacgccacagccgcaaaatcttcccaggtttcgtccaccaacagagtggcggcctcatagccccactttcgaacgaggctctttatgagatacctataaaatatatattaaaatagtattatggtaaataaaacattaaagtttatcttaaatatatatataacacaatttaactttagcttatatttttgtattgggtctgaatgaaattgttttctgtgtgttcataacaagaggaaaatgaccttatttttaaaattttttttttcctgcgtgcagtgggaaacaatgagtgatgcaagcggcgatggttaacaggctgggaaagcatcgccacttgtcggagccacaaattatgcaagtcacagagcggctgactgacaagtgccagaaaattgctatggaaatggtaattgcggcgttgcccaagccaaatcaaatatgagtatcataattaatatgcggccgccgggcaggccaaaataacaaaaaaaaaaaaaattggtaggcgcagacatcgtaaataataaattggcaatggctcggttttatatttatttaacttttcttatcaacaggcatcgcatgtgcgtcacgtgccacaaaaacaggcagtaaaaggtgagggctaaggggcgaaaaagaccccacctctatatctatatagtaaaaacccgcttggggctttcccatatctttaatttttttttggaaattatgcaagacacagaaattccaatgcaagcattgtaataaaaatgcctatttaattgccgcgtcggcgccgagggcttatcaagccattcgcattatcattaccaactaacgcacattttatttaaatccgaaccgaagaaatggtctaaaaatagacaaacaaacatggccaaccagtcgtgtgaaggcggatgataaacaaacagataacactacagcttttgagagccatcttcgagcacgaaagacaaaagatgcacttatagggttatgtgttgaataatcgatgctctttcattggagttcctttagcaatattcaaaaccatggcaggaacttaagaatttttacattacattcttaagatcttacagccatgatcaaactggaatttatattcgaaaatcaacttaataatgcttttggcttatgaagaagagtgtatatatcttggattccgaacaagacaatatcttcaagccttatcagatatataacacaaaaatttgaaaaacatcaatataagctagatgttttattcattggaaataaaacacgttgttctgcgaagaaatctgaagcacacccaaaatacccaggctcacgcgccaaaacgccggtctaagcaacttatgatgccccgcagacacgattattcattggaggcattcataaatattcgagaagcacgcggccagtcgtcggatagtcgccaaagctataccagatactacatacatttgtgctagtaggagccaaacaaaaagtgtcttgaactgtcaattcaagtttattgggtcaaggcatttcgcccagctggctgagagcagaagcacccaaacagcatcagttcgagtatctgagtttccgagtatctcagcatctgagtatctgagagcttgtcgcggaagcagccacaaaagatactcactcgatgctcctatgctaatgcgatgccagcgaacaagtttcgatttctatagcgaattaaattggagcccaaattgtctcgtggccaaacatttgtttgaaatgcatttaaatgaatcgaatattgattagagccaccccttttgttttatccattttgatatttttgctcatatgcttacggtacattatcggtacattaatttgaactttgattagagcgatatgtatggtagttttgggtgtctctatcgattctatttaagttttcaatatcacataattatgatcagttatggaatcttatggaacctttagggcttaatgtgataaaagaattctacaattttccaatgggggactattatgggtactctactcacgtggggtagttatcggcgtgctcgcagtacgtctttcctggacgggcacaggtgggcgtttgtccaggtggcgccgggaggaactggcaaggcggggctccataaaggccacatggcgggggcgagctgtgggcggctactgtataagctaatatctggagaaaggagattttgaagtataataaggagtactgggagaaggaatactcaccacataggtaagaagaacttgtttacaactaaaggggggcggacgtttaatactttttgtcattgtcaattcattcgccgtcgatttgcatttgcatttgactcgattgcgattcagccagtgtcttcaacgtgaattcggaaacctgaagcgaaagagaaactgccatgagttatttggtcaaatattagtcgcaaaaaaatggcaaatacacgaccatttctcgcaccatttccattgggacacgaaacagacaataagtgatggtttttccgcagcggaaatgcttcaaagtgcttatttgttgcccacagttcacttgggcttattgttaagttaaacaatcaacaactaaaacaataacacaaacacgaactacaccaccgacagcctcttgagcaaacaacagccaaacaactcgaacaactcccgtaaatagcgaaaataaattgccaaaagtgaaagtgacgaacaagctccagacaacaagattaagtatacgcagattaagtatacgccgcgaagataatggactggacacgccccatgcattgtgggggcgttctcaattggcgacccgagctgtcagctaatgacaatacttataaactctaatgatttattaggactctaaaacggaatttcaatatgccggtatttaaatcggatgttttatagacaatttaagtttagatcaatgcaagatattttgcatatttaaagtgatatattaccaactgttggagagaatatatatataataatacaagcagtttttattgcggaaactatgagataactttgactagatttcgatagttagcaatgcttttatatgaacaagaagctcaaagaaaaattcccaacatgtttcccgtatgaaatcaacttttaaaatctgggaaaattaaaaatcccgtaattaaatgttaattaacagctgacataactaacgaaagtgagctaaaaattaacaaaaaatgttatacaaatattttaattattataatgtaacaatgctaacaagtgatcaaatctaaagctgtcacagtcaatggtaaaaaccggatttcgtgtcaagttttgctatagtttcaatataatgtgtaccacaattatttatagaacaaaaagcaataacaattgcctttaacactcagacatggggtgcctgtaaaaacagcgagcattcaagaatcaattggaatttataccgatacaaaaacacctgccacaagctgcgataggatttccgggatcacaggctcttttgcacgagccaagcaaaacaaatcagtcaacaaacaagagccaatgacaaagtgtccgtcaaggtacacaggaaataattatattaataatattaaaaatgaaaaaataaagaaaacaattataataaatgaacattcacggcatattaaagtatcaaacagaagtttgaaacacaaaatgttgtttagtagttgagctgggctttaaatgcttatacaattttatatatacatataataacacatatttctctgagattaaaatagcttaggtattttgaaaccacgtttccaaccatgttttctgctgtgcatcgaagccagatttagtgtctgcgatctgctaatggagtcttgcacatggctacacccacgtattgctggtatttccccgatgccaaagttgcgccaggcgatcacctcataaatcacagagcagccaaaagaagttggacatgggttttggcattgtttcccttggcaactttagtggcagcgtgttttatggtgtgttttgggccatttgcacatcattaggccgacgggccaaaagttaatgaaattgttaaagatctttgaccaagctttagcggctaatccattggctgcggcatcattttcgaaattgagtgctcaaaatcgctgggccccattcaatttatttgaatgatttggccgcaaaatcatctatctatatttaattaattatatcccgcctgagtaatgatcgattgtcagatctttatctttgtctcgcccagacattctcacttattcacccgattggcacttttttaaggggataaaatattttgttggcatctaattgaagcattagcaggctaaaaaaaagagctgaatgaaacgaaatgctgctaattaattataaagctatttaataataatgattgcttattaagtttttattacgcgagtgtttgacacaggaaagttttaagctctctagtttatttaattggtaaacttgtatactttccacaatatctatccttacttctatccattaaataaactatcaaagagacagacttctgcttcgggcattttttccaaagcctctgaattattttccttcacaaagaggttgggttatttgaagctaatttagggactaaaacaatggattcgattggaggcagacaaatagctgagcttcattataattttttaaacatatattttatgcctgcatttagctaagaaattaagcacgacttttcaaggttttttctccccacttgattatattttgtttgtatttacccaaagtgttgtctgcattttttgtggattttgttttgtgatcgctttgatttaatttgtgtttgctggtttcctaacattttggttacaagtgtatacaaaaagaaggaaaacaatcaagcgttataataaatcagagctgcgatgacgaaccaatgaaatttattaacttatggcgggaattaaagtattcaatttaataattactcacctagtgtgcggcttgtagatttgtttgggtttttgcttcacagtatttggcaaatgtttttgatcactatgtgcacttttgtcgagcttagctatgctctttgtatttcagtgaaatattttctctttttttgccaccgaacactcacttgaaaattctactaattaaaaaacttaacacgtaccgaagagcgcggatatttcggtttttggactttaggttttcgatttcgatttcgttttcgtcttttccgtttcacgcgtttgccaatgctcacggcggcagctcgtagccaactgagcggtcttagccaagttaacagcggcccagagccgcaaactcgggaaaagaggcagagaaaagcagagcttgggtcagagcagagctatatagcaaaagatatagccggctctgatctcccaggctaatctctcaatttagcccgctcaactttgaactttttggcccgtgattcatgtcgttggccacatagtataatgtgatatgtggtgcggttttctttttcttttttggcccgattcaagaccggaagtccagtggttcgggccattcgatatgacgtgggccttatttattgaccacttttattgtttattttacattgtcgccaatatgcgaactgcaataaagtgaatttatttaaattgttaatttttctgctcgccaattgttgttcgtcgttgccgccggttttggcccatagatacggcgcattgttcgggcgatgaatttggatttttatggccaatgaaggtcagttaacagcttttatctgtcgcagatttgtgactgctgccgttgatttgatttggcgctgcctccggcacagacattgaatgttggcaagaaaaggcttttaatggccaagaccacgcacaattgtaggagttacctccgattttgtctctcgtcgaaggcatttaaatcaattttgcgcgttgccaaagctggaattatgggtaatatttcagcacaggtatattgggaattatttttttttttttcattcctaataaatatttacaatactttttaaccaagaagaaagcgctgagcagtaatttctctgtcaatttattttaaagtattgaatatgcaatatgtgtgtacataattagaaaaaaacaaataaatttaatttttaaaaaggttgaaagagatgtataccgtaaaatagttttaaactatcaaaggcctaaattatttttatggttcaaagtataagccaaatagaccgaaatatatc

SEQ ID NO: 21191 - DNA, 1513 bp, DROSOPHILA
gcaaacgcgtgaaacggaaaagacgaaaacgaaatcgaaatcgaaaacctaaagtccaaaaaccgaaatatccgcgctcttcggtacgtgttaagttttttaattagtagaattttcaagtgagtgttcggtggcaaaaaaagagaaaatatttcactgaaatacaaagagcatagctaagctcgacaaaagtgcacatagtgatcaaaaacatttgccaaatactgtgaagcaaaaacccaaacaaatctacaagccgcacactaggtttccgaattcacgttgaagacactggctgaatcgcaatcgagtcaaatgcaaatgcaaatcgacggcgaatgaattgacaatgacaaaaagtattaaacgtccgcccccctttagttgtaaacaagttcttcttacctatgtgatattagcttatacagtagccgcccacagctcgcccccgccatgtggcctttatggagccccgccttgccagttcctcccggcgccacctggacaaacgcccacctgtgcccgtccaggaaagacgtactgcgagcacgccgataactaccccacgtatctcataaagagcctcgttcgaaagtggggctatgaggccgccactctgttggtggacgaaacctgggaagattttgcggctgtggcgtggcacgatactcccgtcttctacgatcccaagtccatcttcccgccccgggatcccgctgcccaggactttaatggatatagttatcagacacccttcggaggtaatccccagagaccgtctgggggtggaaacccgctctttgtcagcaatccctctacggaagcacccacgtatcttctgtacacctcctccggtggaggtcatcgctcgggtcaccggtataactcccagggcggaggcacctcatcttctggcggtcacttgtacatcaatcagagtgacaagtcgactccctacaatgccacgctctggctgaagcgcttggtcagggatctcagtcggaagcagaggcaacccgacgaggttcaagcggaggtggtggagccggtgaacgagcagacagaggaggccgaggaacaggacaacccggcagaggatcacccacaaagcaagcgcgatgtctcgctcaacatggatctcttggatatcgtgggcgtggaagcccccaatccgctgaagaagcgttcgaggacaaagcgccaaagtccggggcgctccaccctctgccagacgacatcgcagttcatcaccccgcaggcggcactgaatagccgcggaaactggatgtttgtggtcaacgagcagaacaccgctcgccaaatggtcaaggcggagctttgcgcctcgaacacctgctcgaacctgtgcgaattgcccaacggctacaactcgagatgcgagcagaagtttgtgcaaaaacgcttaattgcgctccagggcaacgggcagaatctgtacacggacacgttctggtttcccagttgctgtgtctgcacgatagccgccaattaa

SEQ ID NO: 21192 - protein, 387 aa, DROSOPHILA
MTKSIKRPPPFSCKQVLLTYVILAYTVAAHSSPPPCGLYGAPPCQFLPAPPGQTPTCARPGKTYCEHADNYPTYLIKSLVRKWGYEAATLLVDETWEDFAAVAWHDTPVFYDPKSIFPPRDPAAQDFNGYSYQTPFGGNPQRPSGGGNPLFVSNPSTEAPTYLLYTSSGGGHRSGHRYNSQGGGTSSSGGHLYINQSDKSTPYNATLWLKRLVRDLSRKQRQPDEVQAEVVEPVNEQTEEAEEQDNPAEDHPQSKRDVSLNMDLLDIVGVEAPNPLKKRSRTKRQSPGRSTLCQTTSQFITPQAALNSRGNWMFVVNEQNTARQMVKAELCASNTCSNLCELPNGYNSRCEQKFVQKRLIALQGNGQNLYTDTFWFPSCCVCTIAAN

SEQ ID NO: 21193 - DNA, 4569 bp, DROSOPHILA
ggggaaattggaacaagaccttgggtaaccggcatacgaatgaaattctaattttatgaggcccagccaattataaagtatgtgggaaaagtttaagggtaatcctaaaactggacaccagtttaccaaggaaagaaattctagttaaatcgagtaccatagactttacgaccgtaggtaggattataaaaagtcatgttagtaccttcaaatttagtatcgtaatatgactttttacgagagtcgtttgtaataaagtaaagtcgttcttaaagaagtcgtatttcttttaataagatacgtactccgctcattcaactttaaaattgatatgtgtggaaaattaagatgtacacatatccttggcaacagatcacttgaaaatccttagtggtccttgggccattgaacttgttctcaagcccgcacttcacctcgaatccacccaatccaaacttcaaactgacgacatgcagcgcaatttgagatcccagattcgggaacctttcacgcacacatgtgcaacctgatttccaaacgcttaaaggacacgctgtgcctgtgccagcggcatcttaagtgatttcgaaaaggagctgggaagcggtaaaagtatctggaggatgcgcggatgtcggatctcagatactcagatacaagaattcttgagtgcacgtcgtacgcaggcacttgggcacacacacactccactcattgtaggttactagttaaatctgaaatcgaggcagctggagaaagagacggctgccgcaggggccgacaaaaagagacgggacgaggcacttggccaaggaacatctgttgcgctgacataaatcctgagtgactgaccgctggtgcgaaagaccgcgaatctcgaatgcgaatgttcatgtggatgcgacttggccgccggcgctcgtttgaggaccaaaaccagtttgcaccgattcccagctgcccgtttgggtacagtggttcaaaaggtaatctatctgattcaaatcttgtccacctaacaacaatttgaagtccgaagataaagctcttatttcaattaaaaagaatggcaggatagtaggatagcaggagaaacatttcattattaaatttgattatctacattacatttcgtacagaaaagaagttaaaagtgatttaatgcccgtaaaaccactgtgcccgccaatttcattgagtaacttttgcgctgcccgtgaatgaatctgtgggatactccccaccgctttcgtacttcgattcggtgggacaggatctgagaatggaaaaccagtgagcagacttaccttcttctcggtgagcttctcgcagcggcgctgcttgcagatctggtggctcttgtcgtttcggcagggggcgcactccccacagttgtccttgcgctggcatcccacgcattcgccgcaccgcttgcgcttcttcttggactggaaaagagagcaggaagaggagttgttgtcgttggagtggttgtggttgtggttctggtggttatggttgtgagtggtgggtgtgattgtgattgtgggtggtggcagtgtcattggcgggtggttcagtgtgggtggcggaagatggtggcgacgaccgtagtcctgttaatcgcagcggttgccagttcgccccgtttcgcaagtttatcggtggggttgtcgaagatatccgatatttatcgatcaaaaactattcacttcttttgcttctcgtttgtaatgcaaatggatcgtacaatcgatatataccttcggcttcaacatccccacccttcgatcacctacctgcttgtcgcatccactggcattggcatcgttgctatcccccatgcccagggcactcaacggactcttgaagttggccgtgctggagacggcgtccacttggccaggattgctggggtctacgtccatgccgctggcctcgctctcggcactggactccagcgaattgggccgctgtttccggcgctctttcttccgcgcttctagccgagctatcggcgactgcagcaacttctcgaccttgaccggagtggtggtggtgggtgtgggctgggtggtggtggtgtgcggcgtgtggctgccactcccaccgccagccgcctgcggatagctgttgttgctgttgttgccatcatacgaggtgggcgtgtgcatgcccattggtatgggatgcggctggccgtgctgcagcggatggtggatcagtccggcgccaccgctgttgctgagatcaaagtcctccttcttgagcagcatctcgaagtcgctgccgcccgagatcggctccttcttgacactcaacggggtgaatcccggatatagtggcagctccgcgtagggcgtgggataaccgctggctcctcgatgatggtggtgcggattgagggcgtggtggtgcgcgaaggcgttcggcggcggtggtgccggaaaactgcccgctgatggcggtgtgatgctggtctgcagactcgagagttgggtcaaaggtgagcccacactcatcatgcccggcgagctgaccgaaatgctggccggcgacatggccaccgtttgcagggaactcatggcggtgggtcccacgggtcctgctactgaattgggtcctacggagccaggaggtatggaacctgttgcagctgctactgcagctgccgatcctggtggcactcctgctcctatgggcacaggcattggtgttccatccggtagtaattgctcattgaagccatggaactggctctgaaacgacggcagcttggagaacggctcgaagccgctcttcagctgcagatggggttgcgtttgggggggttgtggcccattgtccttggactccatttcccagggacgcgtgtagctgccgttcgagttggaattggagttcgaattcgagttggcgttgccggctgagttgttcggttgctggttacccggatttcctactgcggcggaggcggcggaaatggcattggcattggcatcgccgtgccgctggccactgttgcctccacttgcagcattagcatggttgctgctgctgttgttgctgctgcccaaaggcgctggaaccgtggtattgctgccgtcggggttgctgttgttgccgttgttgccgttgttgccgttgttgctgctgttgccgttggtgttgccggtggcggccgctggctgttgctgttgctgctgctgctgttgatgttgctgctgctgcctggcatagtagtcccagtgctgctgctgctgctgctgctgttgctgctgctgctgctgatgttgctgctgggcgtgatgctgctgctgttgctgttgctgcagatgttgctgctgcggatagtgctgctggtagtgatgatgcggatgcgaatgcgaatgcggatggtggtacggcgtggtatagtgctggctgaggctgctcagctggttgagatgggtgttgtgcaggctggacacggtggcctccacagatgtggctgctgctgcagttgctcccaagttgctgctgtcgacggtagcacctgtgctgctctgggctaaaattgaagacgccatttaagcacaaacactggcatggctatgcagttgtattgaaaaactgcggggctttgtactgatttttcgaagattcgtttttagtttttgtacacttatcggttcacttttcgtttgttcgtctgctttttgaggtagagttcttcgtaaaaatgtttctgattcgactggtttgtttgttggctagtgtaaaacactatgattatatccgtataatagatttgtatactataatataagttgaagctactccaagatttgtatttcgtttattttgaactcactggttttgcgtgtttgaatgcaaagttgaatatttacttgttatggtgttcttctttgtaaagtgctttattaaattgttgtttaaaaattgtttaagatttgtggttggttgttttgtactttattcttttgtttgtttgtaaaacggcagctaggcaaaaatttgtattttgatatttgatttaatttgtagcagacttggtttggttttggtttttcctttaaaaaatctttgtaaatttgtaatttgtaaaatttgtatttcgtatgcgttgttgttgttgttttatttacgttattaattacttgctgtttgtggttgataatatttgacgcttgcttgttgtaaattgattaagtttttgtactctggtttatgcttcgtttctcaattgaatttgcttgtaatatgtcgtcggatataaaaataatttaagtatttacatctagtaaattgtacttatgcgtaggcttaaaaatctttgtcttccgtttgtttgtttgtttgggttctggacttaacgattaattaaacattagcgcgttacttgttattgactttaatagtaataatatttatatttcatataagttgtgtgtttagcctaattcattttacgccttttgttcgtttgcttttcaattttgattttgggccgaaaggtttctttttgtttttgtaagttgcttaaagagcttccaaagtattttgtgt

SEQ ID NO: 21194 - DNA, 2094 bp, DROSOPHILA
atggcgtcttcaattttagcccagagcagcacaggtgctaccgtcgacagcagcaacttgggagcaactgcagcagcagccacatctgtggaggccaccgtgtccagcctgcacaacacccatctcaaccagctgagcagcctcagccagcactataccacgccgtaccaccatccgcattcgcattcgcatccgcatcatcactaccagcagcactatccgcagcagcaacatctgcagcaacagcaacagcagcagcatcacgcccagcagcaacatcagcagcagcagcagcaacagcagcagcagcagcagcagcactgggactactatgccaggcagcagcagcaacatcaacagcagcagcagcaacagcaacagccagcggccgccaccggcaacaccaacggcaacagcagcaacaacggcaacaacggcaacaacggcaacaacagcaaccccgacggcagcaataccacggttccagcgcctttgggcagcagcaacaacagcagcagcaaccatgctaatgctgcaagtggaggcaacagtggccagcggcacggcgatgccaatgccaatgccatttccgccgcctccgccgcagtaggaaatccgggtaaccagcaaccgaacaactcagccggcaacgccaactcgaattcgaactccaattccaactcgaacggcagctacacgcgtccctgggaaatggagtccaaggacaatgggccacaacccccccaaacgcaaccccatctgcagctgaagagcggcttcgagccgttctccaagctgccgtcgtttcagagccagttccatggcttcaatgagcaattactaccggatggaacaccaatgcctgtgcccataggagcaggagtgccaccaggatcggcagctgcagtagcagctgcaacaggttccatacctcctggctccgtaggacccaattcagtagcaggacccgtgggacccaccgccatgagttccctgcaaacggtggccatgtcgccggccagcatttcggtcagctcgccgggcatgatgagtgtgggctcacctttgacccaactctcgagtctgcagaccagcatcacaccgccatcagcgggcagttttccggcaccaccgccgccgaacgccttcgcgcaccaccacgccctcaatccgcaccaccatcatcgaggagccagcggttatcccacgccctacgcggagctgccactatatccgggattcaccccgttgagtgtcaagaaggagccgatctcgggcggcagcgacttcgagatgctgctcaagaaggaggactttgatctcagcaacagcggtggcgccggactgatccaccatccgctgcagcacggccagccgcatcccataccaatgggcatgcacacgcccacctcgtatgatggcaacaacagcaacaacagctatccgcaggcggctggcggtgggagtggcagccacacgccgcacaccaccaccacccagcccacacccaccaccaccactccggtcaaggtcgagaagttgctgcagtcgccgatagctcggctagaagcgcggaagaaagagcgccggaaacagcggcccaattcgctggagtccagtgccgagagcgaggccagcggcatggacgtagaccccagcaatcctggccaagtggacgccgtctccagcacggccaacttcaagagtccgttgagtgccctgggcatgggggatagcaacgatgccaatgccagtggatgcgacaagcaggactacggtcgtcgccaccatcttccgccacccacactgaaccacccgccaatgacactgccaccacccacaatcacaatcacacccaccactcacaaccataaccaccagaaccacaaccacaaccactccaacgacaacaactcctcttcctgctctcttttccagtccaagaagaagcgcaagcggtgcggcgaatgcgtgggatgccagcgcaaggacaactgtggggagtgcgccccctgccgaaacgacaagagccaccagatctgcaagcagcgccgctgcgagaagctcaccgagaagaaggtggacaagatttga

SEQ ID NO: 21195 - protein, 697 aa, DROSOPHILA
MASSILAQSSTGATVDSSNLGATAAAATSVEATVSSLHNTHLNQLSSLSQHYTTPYHHPHSHSHPHHHYQQHYPQQQHLQQQQQQQHHAQQQHQQQQQQQQQQQQQHWDYYARQQQQHQQQQQQQQQPAAATGNTNGNSSNNGNNGNNGNNSNPDGSNTTVPAPLGSSNNSSSNHANAASGGNSGQRHGDANANAISAASAAVGNPGNQQPNNSAGNANSNSNSNSNSNGSYTRPWEMESKDNGPQPPQTQPHLQLKSGFEPFSKLPSFQSQFHGFNEQLLPDGTPMPVPIGAGVPPGSAAAVAAATGSIPPGSVGPNSVAGPVGPTAMSSLQTVAMSPASISVSSPGMMSVGSPLTQLSSLQTSITPPSAGSFPAPPPPNAFAHHHALNPHHHHRGASGYPTPYAELPLYPGFTPLSVKKEPISGGSDFEMLLKKEDFDLSNSGGAGLIHHPLQHGQPHPIPMGMHTPTSYDGNNSNNSYPQAAGGGSGSHTPHTTTTQPTPTTTTPVKVEKLLQSPIARLEARKKERRKQRPNSLESSAESEASGMDVDPSNPGQVDAVSSTANFKSPLSALGMGDSNDANASGCDKQDYGRRHHLPPPTLNHPPMTLPPPTITITPTTHNHNHQNHNHNHSNDNNSSSCSLFQSKKKRKRCGECVGCQRKDNCGECAPCRNDKSHQICKQRRCEKLTEKKVDKI

SEQ ID NO: 21196 - DNA, 8272 bp, DROSOPHILA
aattgctggcccaaatgcatatatgtatgtatgcatgtaaccctcgagcgatttttgcatagtaaatatattttataggcaatcatttgcattccgaatatcaatttttgccatcaattttgggcctctgctaactgacatttattttttggccgccttatgagaccgtaactcgtaattgttgattgcactttttactgtcaacgtttggcacacaacatttttcgccgggaatgaggacttccatcaacaacttaataaaggaaaagccttgttagcggattttttcttctttttggcccattgattggttatattttggcagctgatcgatagttgttgtgcattggtaatgagtttatcatgcaatggcacaaagtttgccagtaaatggccatcatatgtggatggcaataagtgtttgatgtatcttctatattttttaaaaaacttgatttcttttatttattggctttgttatttattttttaagtagtaaacaattaaaattaagctatacagttgacaaataatttacatgaaatcaaaggaacacaaaatagcggagatagttgatggccaactattagttactgattttcccgctcccgcgacttttcccgctccctctccctttccctctccctctccctctctctttcccgcagataaagctgctgctgctgctgaatgaagtgctgctgctgctggtggtgctgctgctgcagatgctgctggtgctgctgcagcaactggtgctgctgctgcggactgagggtggccgcctcaccggcattctgctgcatgaactgctgctggtgctgggccaactgctgctggaactgctcccgcagccgttggtgctcctccgcatccatttcactgccgtagtcgtccatgtcgatcacctcgtcctcgtcgtcctcctcgatctcgtcctcgtcctccggatcctctgcatcctcgtagctgtgctgcgacccatcgtgcttggcatcgtcctccccatcgccgccgcctccgccgccggaggagctgcccttgttgctcttggtgtcgctgccatcgccgccctcctgctgcattcgcttgtgcttggtgcgtcggttctggaaccaaaccttaacctagtggacacacaaaattaagagatttctttaatgttatatacgatttgtcttgttatttaatagataagcaattattttatttaactgctcaatttaaatttaaagcaaccattttgtgaccaacgcttcgagtctctccattctaacccctgtttagtataaatattttcctaagcgcactttcaggaagcaattgagcacggggtagccctcttggggaaggttctttaacccttccataatgctcttggtgttcgtacactctttttttttttggcaagccgtaaataagtttaacgagtcctttaattctatttacggcctgcctcccagttatgcccccgagggtgcacagtccagtgccccgtgccactgcgcgactcttaacctctgcaatgcccttactggaagcgctaataactcagtaactccggcacttcttgggctaacgaccagacgacatgcaatcacttagcccctaaccgaaggggttgaactgggggtgcttattgaatttgatgcgcattaagggcggccgccacccgttgtggcccatctcacctgcgtttcggtcaggctgagtccctgggccaactgcttccgctccgcccccaccacgtagtggttcccctcgaaggcgtgctccagcttgagtagctgcgtcggcgagaaggcggtgcgcacccgctttggcttgcggaatggctggaacaggaaatctgcaagagatcgacaatcagagtgttaatggctgctgcttggaaactaacgtagacatatactaaaaatatttaataaaatgttaaaatgccttattagagaatgtgaatataatgtatgaaactacttattttacatactcttaaaggattgaagtacttaggttaacttacataaattgatttaccatcgaatatattgatttcataaaacattgtatatacatatgtatataccccatctaaggagccgaggaagcggcatccttcgctggctgctctgccaattagatgacgttgtgcctcaaattgttgattatgaattccgcgaatgccgcgggcaaagatgccgcacacagtggccactcacatgttgcacacgctcattacaaaacaataaacaaatttccagacatggaccgcaaaaacacagcgaaagaacacaaagggcttctggttcgtgccgctttcggcgctgtgttttttttttttttttgtagccatgtcccagaatcgctgataaggccaaaacaattgggcctggccaagaggagctggcttacttcggcctggacgccaagccgaacactttagcgctcctaaaagccgccaacgacgcctctttggagaaccgaggacccattgttcttcctttcagccggcacaacgtgatattttgacgtttatcacgatttctggaagaccatatcccccatacccataaccattcccagtcccaatccccaccttgaagccaagtccagcttggcttttgcgcctgcgagttaacaaattttcaattgagccacaatttgaatattaatatgaggcagcaggctactgtgcgagattcaactgagatttctggtggggcacaggaatgtgctgggcaaaatggataatggatagtggagcattaagaagctaggagtaagcatatttcagctctatggatttttcccggtataaaccaaaattagtattgattgttatggttttatttacaataaatatatatttagtgaagaaaacacggcagttttattattagaaaatacattaattaatgccctatatatcatacatttgataatgtatatctgttgacatttcctgaaaaacagctaaccataatccggtggttaaccaattttctgatcgttctgactgcccccaaaactgtcatcttaaaactctaggtcattcaaagctgctaagttgatctccctagccaaacatggaacgtaaaccagccgtctgttgtgatataatttagtgaacaagcctaagctgaaggatcttttcgctgccgcaaggtgtgccaattacaaaatcaatattgttatagccaaattgaatcgatttcggaggcaggaagtccgttcataaaatacgacacaagctatacaacagaagctaagccattgcaaaaataaacagctaatagagaaaggatacaaggagaaagggtgcgcagccattagatacaagatacaaccccagaaatgtatcttgtgtcttgttagcaccgccgggctggaaaaaataataataacaatgaaaagggaagagggaatgatatggactgggaatgggaatgggaatgggaacttgtcaattcgacacttcataaatgcagcctcgcaccattgatggccatgtatccacgtatctgacagatgcaactgactcggcggactgactgcgtgcctggtttttgctatgaacttgacaaacgattgccaggaggtagcatccagagtgatctagttcggcttcttcttttttttttatatagcccacgatcgcttgacatttgttacatttgacagctaacaatgtagctgcaagatacaagatacacgactgtatcttagaagaggctgtataattgataatgccgccgctcacaatggccacttaattattttttctagctctgcagcagctctcaatgaagtgtgtgtgtagtttttcccactttttcctttttttcctccagctttgtggacacaaaggaaaccgccgtgcgaaaatacgcgcaattgacaattaattgatgtgtccgctctgctggccaagttgttgttttttatggtttttgtttttttttttttgcagtggctcacacccttgtcagctgtcattttttgtatatatagagattcgagtgtaccttattttttagcccatgatggaagtgccggatcgtttcgtttcgatttcgtttgttcgactgtcctggcctttttgtgcgccctattatttatcacttatgtgcaattgtgtttgctttcttttttaccgagttagggcttaatttttatgctctcatgattttttcattaatttattgcattcctcgcatgtcccgcgtacgaggacattgactcggaatcgataattgaaatcaaatgaatgacagacggggatgatgtgttgtgatgatcgatttgacgggaatggccatttgcagtcgggatgtatgaatggaattttgtgggtttgttgggataatgggtttgaacaatgtactactgaaatgtgcaattttataaatgggcgaagtaaaaggtaaaacactacttaaaaacttgattttacagttttatgctgtggagtataaatacatacatacttctttttgaaaaatgatttacataagataccaataaaatagagcagtgatactaaggaatacaacttaaatattctaatgcgtaaattcgatttctaacgatacatatttatgaggtatactaattgttagctgctaactcgtaagcctttagaatgggaatcccgaagcagcttgtccaattacagtgccctctatttaagccctccataataaggatctcagccttgttaatttaacccgttttcccagaacttcaacggctgcattagagggcaacacccagaaattgcagcacgtgcaagctgaattgagttactgacgtatcatcaccgtcgctatcgcgatgatccccattatcttactccagatcgggaaaaaatggaagaaaaacaaacccatgtaacctggtattactcacacgagttacaaaacaaacggagatgaaaaacatttacaattaatgaaatcgttatgcgaaacattgacatttcacgttcataaatcaagcgaaaattacaggcggcgcggagaaaagtgagaaaaaagagaaggagcggcgggaaatgggaaaacaagtagaaagggagaaaataatgaaacggagtacaacataattaaggcgtaacggggatacatgtacacttaagcaggtgaaaggcgtgtgagtgtgccgaaaattattattatatttaaccggccgaaaaaaaacatggataccaacatggcctggaaattcaaatggtaatcatgagagcagcggaatggtagaaaaaagtggttaaaccgtaataaatgacaatgtttttgagatgcgctttgcggtggctcttcgcttctatctgccagttttttttttttaccattcctctcggttctttgcttggttgccccaaaacctcaattaaaaacgcattaacatttcaatggttgcacttttcgtacgttacacatacgccgcatgggcccgccgcatgagtaactggcgccgtctgttggccattaatggtaatttcgagtgaagagaaaaagtataaatagagcaaataaatgctaaacacacactcacacacttggctggccatttaggtacgctgcttgacctaacgatgtgtgtaatgttgtttaaacaatttaattaaaatgtaatttgtttggaaatagttatcaaaatgggttcggttccctccacattccccccttcctgttcgctcccattctccgtcccgctccctctgatgatgatgagcccgatacacgtctaattaacttgtaataaatgtttgccatttgcttatttaactttaattatatggagctgcgcggcaacaacagcgataactgaataattgcttgattggggtcctctctactataatggtgctgggcttcgaatatgacttaaggtgtggtttctttttctctgtcgctcgcaacactcagcggccatttgaaacggctataatgaatgcggaaaactcgttatagcgaaaaataaccaacaaaaggggtggttgctatctccagaagaagaaaccgaccgtaaactatcataatattctaatgttcaaatatgaaaaatatatatgtaacaactatctttctaataatccgtaaaagagagatgtactcttattatcagaatagggtaaatattaaattaaatgatatgtattattgttatataaactgttattaattttgcagtaaatttattacaaataattgttagcttagatgattatgcataaaaattatatttttcaatttatagaaataatttttagcggttttatatacatatgaaagtaccgcttgctaaaccggttagcttctctgaactctgaacttattgaaaatattgtaataaacaatagatatatttaaaacagtgtgattacttactgcctgggaatcgtggaaaaatgcgtccgtgtcggctgagcaaccatggatacaacggatagctatcccggatcagatgcggcgcactcccgaacggatggtgtccgtggggcggaggatgcccgggatgcggtccgccgggaaagattccaagtggaatttggccgggcggcagatgcggatgtggaccatgtggcggtccagttggcacgggcggaagttgctgttgttgctgctgctgttgctgctggtgatgatgagccagtgcagcagccatttggaactgggcggcaaggaacggcggtggctgcgacggcgggtggggcggacccgccatgcgcaccgccatggcgttcggtgaggtgcggttcccaattaaagctagatttggcgccggcagaggcaacggacggatgagggttggaggatttcccgttcccgacgatggatccccggactttgcagtattcccggccgctgccggattgcctcctgcattggggggcgatggcgaccggctaaccggtgatctctgaggactgcgcgatcgatccagcgaatcccttctgcggcagtagatatagcccctgggcgtccggcgcccactgttgttcgtgttcgttggcgaagcgggactttcgctgcgcggcggcggcgaagatatcacactgacccttagtggagccgatctcgtcgaggattcgcccacaatcgagtcgatgctgaaggccagcttgggcttgctgctcgcggaggcggaaacggtactgctggcggaaacggaagtcgaggatgcggccaccgaggagctgctgctcacaaaaggactcgtcggcgccatgggcagcatgttgaacgtttgccggccgcaggtgaccatttggtaggggtttcgttgattggaaaaacaaatgaatcactttccctcctcttaaacttcccgattcgaagtctctgcaagtcgaagtagattataagaacacttgtaggccttaaattccattttttccattccatatttgacttttttgaaaaaaaaaattttgtattttcgaacgggataaatcagtaaataaaagaataatgctcaactaaaagttttaggaataaaataaaacggtaaaaatcctactaaaatcaaagggaatggaaattgaaatggaattgaactgaatagaaacggaaacggaaaaagggttgtactgatcgaagctcccaataaatgggttggtgctatggaaacatgatcgcgtacatcggttaatggttactagatatcagataagcacacacgcactgtttttccgatcagatagctatagctatatagctacgtagcgttgtatctgcgatgctccagcggttggcatccgtcggcgtgacattgataaactgtaactgtaactggagcggcggcaacgcggcgattggagcgtgaccgtaccgcttcgctggacgattgacggcggcgattgatggttggcgattgactattggcgattgacggtggcggtggcggtatcagttaacggttaacggttatgccggctacccggtaacgaaacgattgcggtggccgcgctgcgatgatgatgagcactgtcaacgccattagcattatggagcgtctaaaggcgtctaattgttggctccacttcgccgctcgcaacctctgtctctctctcgctttctctctttctgtcctgatttttggcgggggcgtcggcgaatcgctgcgtggctctcacgctgagcgttttagctcgagtgtcgcgttggaaaaagccgcaaaaagtttgtggggccagttcgagtgtgcttcttcttcctttgcttgtacttccagcgcagcaatactgctggcgtctcgctcgcacacg

SEQ ID NO: 21197 - DNA, 1166 bp, DROSOPHILA
atggtcacctgcggccggcaaacgttcaacatgctgcccatggcgccgacgagtccttttgtgagcagcagctcctcggtggccgcatcctcgacttccgtttccgccagcagtaccgtttccgcctccgcgagcagcaagcccaagctggccttcagcatcgactcgattgtgggcgaatcctcgacgagatcggctccactaagggtcagtgtgatatcttcgccgccgccgcgcagcgaaagtcccgcttcgccaacgaacacgaacaacagtgggcgccggacgcccaggggctatatctactgccgcagaagggattcgctggatcgatcgcgcagtcctcagagatcaccggttagccggtcgccatcgccccccaatgcaggaggcaatccggcagcggccgggaatactgcaaagtccggggatccatcgtcgggaacgggaaatcctccaaccctcatccgtccgttgcctctgccggcgccaaatctagctttaattgggaaccgcacctcaccgaacgccatggcggtgcgcatggcgggtccgccccacccgccgtcgcagccaccgccgttccttgccgcccagttccaaatggctgctgcactggctcatcatcaccagcagcaacagcagcagcaacaacagcaacttccgcccgtgccaactggaccgccacatggtccacatccgcatctgccgcccggccaaattccacttggaatctttcccggcggaccgcatcccgggcatcctccgccccacggacaccatccgttcgggagtgcgccgcatctgatccgggatagctatccgttgtatccatggttgctcagccgacacggacgcatttttccacgattcccaggcagtattcctgttccagccattccgcaagccaaagcgggtgcgcaccgccttctcgccgacgcagctactcaagctggagcacgccttcgaggggaaccactacgtggtgggggcggagcggaagcagttggcccagggactcagcctgaccgaaacgcaggttaaggtttggttccagaaccgacgcaccaagcacaagcgaatgcagcaggagggcggcgatggcagcgacaccaagagcaacaagggcagctcctccggcggcggaggcggcggcgatggggagg

SEQ ID NO: 21198 - protein, 334 aa, DROSOPHILA
MAPTSPFVSSSSSVAASSTSVSASSTVSASASSKPKLAFSIDSIVGESSTRSAPLRVSVISSPPPRSESPASPTNTNNSGRRTPRGYIYCRRRDSLDRSRSPQRSPVSRSPSPPNAGGNPAAAGNTAKSGDPSSGTGNPPTLIRPLPLPAPNLALIGNRTSPNAMAVRMAGPPHPPSQPPPFLAAQFQMAAALAHHHQQQQQQQQQQLPPVPTGPPHGPHPHLPPGQIPLGIFPGGPHPGHPPPHGHHPFGSAPHLIRDSYPLYPWLLSRHGRIFPRFPGSIPVPAIPQAKAGAHRLLADAATQAGARLRGEPLRGGGGAEAVGPGTQPDRNAG

SEQ ID NO: 21199 - DNA, 8268 bp, DROSOPHILA
atcaatttgatatggcaagaatgcatatacaattaggagcaccccgccacttttgatatgcaggtgctcttgcggacaaaccaacatatccaagttaattggatgatgatcattattctattgttatatacatgaaactagtaagaatgccacattgtctaattatatctaccaattcctttctcaagtttttttttttgcttcttaaacacgaaatttgtaaacgtgtgcgagtgcaacgagtgcaaatcgcattttttatatcttcaactattattcacaatatatgctggggtatatgcattttatactggttgcgaaggtgtaataacgatagtacttactatttcctttatgtttaattagatattttctaagcgaattgttcaaaagcaaaaaatgtaattctttccacgccagtggtggacagtcgtaaatttgttgttatcgattgcttgcgttagaaaagttaataccaaagtgggaactagttccatgagctaatttagaaactaaaaattaaattattacaaataaataatataaaacatttactctgctataaaaagataaatataaaaattgaaaataaatgcttaattccacagatgatgtgtagcgctccagtgaaccagttccaattcgggaacagccctgctggcttattatcagcagaaggattcggtcacactggctactacggagaaataagtaatcatatttttaaaaataaccattactggctgataaaagacagcgggcagacacaaatccataacctgaatcgacgatgtggcgttgaagtgaaaacaccgcaaggttcaccgtgcaattcactcaataaccatatcaaccccacacatctggcgcagactgtatgtataaacagatgcacatacggggggatgtgcatgtgtgtgcccactaccacataccgcatttccataaaccgagagtttggcaataacgacgaatctctcgctttcccgaccacattaaagaattcggttatatagcccgccgatcgacggcccgtaactctggcgtcggcagagagtgggcgtgcaagtaggtttctcgtggcagtaaggtgtggttccacaacaccataaagcagacggagtgaaagaaaaaaacaaaaaaaaaacacacacaacttggtggtgggaaagtctctcttctcttccacctgtgaaggaagattttcaggaagtccgccagttagctagctattgtgtcatgcaatcgatatccgccgtaacatatgcttctggtatctcaggttgaaacctctatacggaatcgcccactgtgcggtaactgtggaccatgaacaccgcgggagccaccagtcaaccgccgcccactaaaaatgagagtgagttatgccacttggccccactaccaccacatcataaaactaaatgaaatctatttccccgccagttaactccgaggagtatctcatccacgtgcatatgccgaacaagagcttcaaggctgttcggtttaatgtcaaggagaccgttttccatgtgatccggcgcactgtcgaggatctgggcacggatggacggacgcccagcattcagcgatatgcctgccgcatgcttaacatgatcaccaaggaggtgatttggctggctagaagcacttcaatgcagaaggttctctcgcacatcctgacgcccggctgctccaacgttgactgtcccaacaaccagtcggagttggatgaggttctattggagcacggaagaaggatcaccgataatagggtgtggcgagtggagctcagagtgcgctacgtgccaaataatattcaagagctcttcgaggaggacaaggccacatgcttctattatttcaatcaggtgaaagaggactttatccaagccaatgtcacagccatcgacactgaagtggcggtgcaactgtgctgtctgggcattcgtcattatttcaagaacatcaccgtgaaagcacctgacaaaaagcagcacattgactacattgaaaaggaaatcggatttaaaagttttcttccacaatctgtgatagccacatcaaagccaaagaatcttaagaaactgatccaagtcggttacaaaaaggtctacaattacaacgacattgagtacttgacgcggtgggcattcctaaagtttaaagtcacgtgacccgtttatatttcgtttcttgttacaggttctttgatcttctgaagaatatttatttaacgaacttcgagcagttctcggtaaccctgagctcggcgtggaatatttctggaattctacacgtcggccctcacattggtaattatttcccaggtgggcaaaaaataccttgataaacataattttgtaattccaggaatctcgtaccagactcatcctcaggccagcttgaagaacgtggctcagtttaaagatgtggtctctattaaaacgtgcactttaccaaaggaaaaactgtccaagtctggggagaataccacagaaccagagcttcagaattttaattgcaactgccagaagattaaaacccaaataaaaatatccgcttccaacaatgtggaagatttggttataacgtgcaatggtattaatgtgagtttgcagtttacaattatgcctattgcctattttaacgcttatttcaattgtctacagaccgctgagagtattgctgacctaattgacggttactgccggctgttatcaaaagacctagagttcacgatttggcatcgagagacaaacgcgtcgaacgaagatagcgcaaaagcattgcccaatgatgcgacgctggggtccaataaatcaacttcaagtcagggaaaaccgatgctgaccgatgattatgccgagattggtttattggagggcgagggcgactactctacgcccaccgttcgaaattatgagttggacagagccctcataacgccgagcgccaaaattggtgtgggacagtttggtgatgtgtatgtaggcacgtatacgcttccgaaactgggcaagggcaagaacttagcaggaaatggaaaaaatagtaatagtgaccaaagaaatgccgattcaaggccagatgttatacaagtggcgataaagacatgtaaagctaacgacgatcctgaaaaaaccgaaaattttcttgccgaagcttgtaagttgtacacctacgtgtaatttggttgcactttcttaagattcaaatttgactttcagatattatgcaaaaattcgatcatccccatattatacgcttaatcggcatttgcagcgtaatgcccatttggatagttatggaattggccaaactgggtgaattgcgtgcgtacttaaagacaaacagcgaaaggtaatactgaagcataaataattaatttaattttaataacctaattgttttgattagattaagccacggtactttactgaagtattgctatcagctatcgactgctcttagttatttggaatccaaaaagtttgttcaccgagatatagcggcgcgtaatgtactagtcagctcaccaacgtgtgttaaggtaatatttaatacacatttgcgtttgacttagatttactaagttgattttaatcttgcagttggctgattttggattatcacgttgggtttccgatcagtcgtattatcactcaacacccacagttgccctacccattaaatggatgtcccccgagtcaataaactttagaagatttaccactgctagtgatgtttggatgtttggtaagtaaaatatgtggctagctatctaacattgctaatcttgtaattatattaggtgtctgcatttgggaaatactcatgctcggtgtaaagcctttccaaggcgtcaagaacagcgatgttatattgaagctcgaaaacggagagcgtctgccattgcctcccaactgcccacctaggttatattcgttaatgtcccaatgctgggcgtacgagccacttaaacgaccgaatttcaagcggatcaaggaaactctgcagtaagctatcctaaaatctaaacagtacttgattaaacagtatatttttgttatttcttagtgaaattctgattgaagacagcattaattcatcggagacactgaagcgggagcaacgaaaagtggcttccatgtcctggattggcagtgatgacatcgacattccgccatcgaaaccttcaagggtgatgcacgatcctggtaattaattctatttaagtaaatatttatataagtattctaatgttttaattatttgcagacatcactggcttaatgcctgaaacaacggggctacctcagacctatattattgcacaaaatcccgcggtgctggccaaactgatgatggagaaccaaaaacgaggcataaatccagcggcgtacaccacaccagcttcggtatttaatactctagccgtaggattagatgacagcaatccgaatgtttcgcttaagactactaagctaccagcagcagatttgttaaaacttgaccccatcgcagaatccgaaaggcttaggtcccaattttcagctaatagcagcgctagtcaactggctaacccccttactgcttcagttaacccccatgaatccctcaattcacaccaggcaggaatgtttacgggtagtttgccttcaaagagcagcttcgtcgtttgcccaccccaaacagaggaacacatgcaagccgaaaacatttctaacccgtctgtgtccaaggtgtccggatatagcctatatgggagcttggagaggcaccaaccaccaccagcaaaagccatgcactccaaaggtggcagcctggaacgccaccagtcattgatgtcagcacaaaatcttgttttctacaatacaaagccgccaccaaactgcacgaataccgcagagcgatcgaggagcatggagcggaacacatacttccatgcctatcgccaacagatgaaaacctctattgaatgcgaagctctacccgaggagatttacgattttgggggcatcggactcaagacctgtgtgtccgctaggcagcaacccaagtttagcccaatggttaatgtgcgcccagctgaactgggccaagtacaaaacacagattgcatgggattacagcagaatattccaatggactcctttggagttatatccccacacaacttggacgaaagtctaagacatcagagagaaatggagcgacagtggatgacttcgggaccacagagcatcacagttaacccaaacatttccatttccgaaggagctgcttgcttggccacattgcaagctgaagcaatgggaaatcaggtttgggcctattggacacgttggcagccaagcttagcatatcctttttatttcccttcgttttttacttttatgctaaagagcattatatatttatttatatttagtaacatttttaagttagcttggatttatttaagttttagttaacttaaaatcttgaaatccttgagccgcgagtaacaaatcctttttatttccagggcattcacaatgttttgggcgaaaaactacgacaacagcaaaaggatagcaacagcgacagcgaatggttaattcaagaagaattgctagtgagtagcaaataaaaactattaagaatgtaggtttcatatcatacaattttcagcggcagagatcctgctcaatacctcaaggatcgctcaatgatcatcaggctcaaatgtttaagcttgacttcatgtcagctggtccttccagtttgccggactgctcgaactccagttctcgacctatgacaccaaatgccaatctttcttcactgaagtcgaaccactcatcggcggatcatttgtccagcttgacatctgcagaagaacagatgggttcaaatgcacgaaacctgggcagtgcagttccaagtcgaccacctaaccgcgcagatgacgaagtttattgcgccaccacactggtggtcaaatcaataatggcgctgtcacaaggtgtggagaaagcgaataccgagggttacttggaattggttaagaacgtgggcgtcaagttgagaaacttgctaacatcggtggacaaaatatctataatatttccagcacaggccctcaagtaagcgagctcgttgtttataaagctgatcaatttaacgttatttgtttatagggaagtgcaaatggcacatcaggtactttcaaaagacatgcacgaattggtctcagcgatgcgattggctcaacaatatagtgacacaacgctggattgtgaatatcgcaagtgagtgctaaccgacgaaactaatttcgatatttaagaatactaattctgatttcttttaaaggagtatgctgtctgctgcccacgttttggctatggacgccaaaaacctgtttgatgttgtcgattcgatacgtcaacgttatcagcatctattcccgccatccgccacaaaagaaacaagttgttcgtcaagtttcgagtcgacttctggatctattgtcgcagagccagttaatgaccttggtggttatatcaagactagcacttctggagatttgcttcaaaacacaggaatatatgataatgatttgcatcatagcttcaactcgcaattgcagttgcaaaacccaaaagccagcatcgacttaagcggcggtggtagtctacagcgagggatgagccttggcttggacacaaccaggtcgacaaacgaaccgttgcgaattgttgaggagaccctgggcagcccgggtgaacatatgtactgcaatacgtccgccttgcacggccacgcgtaattctaaagcttgtgtttttttctatgcgaagatagatattaacttaacgatctaactactgtaaatacttaatatatatcagaatatgtatatcccacgaactattcagcggataattcgcttatttacgtacggaatatacatagctttgaacatacttactcactaaaaagtttgacgagaccccaactcggccggccgcattctcacatcgtcatgtagtcaaaataatttaagaaacaaagacacgtttttgattgaagatggctagtaatagtaatttatagataatctactcgatctaatacaactaaaaattaaattcatcatcaattcgggtgtgttttaagacatttatattgtgatttatagtttaccattataggctttactcgaagctaattattttggtgcaaggttcaatcacaaaaaataaaaagattaactaaacaaaaagcgttgtttctttttttcagttattcgttgaatccaaagaaggaacattttttaatcgtccccataaataaacatcttagaaaatacggggtatggaattctttaataagttaacatcggctcacgttacaaatgcaaatgtaataaatctttttattgggtcaacaagtcattaaattcggtaacaacacccatcgacatacaaacaatgacgtgattatattggatgaaatctttttcggaagtgaagtttgttttgtactatataaagaaaaatattggatatagccattaagagattccatgtaaatatttgttcgagttgatttgctagcttagatttatatcctttacgaatatattgtgcgctctatccactcctccaacgtaaaggtggctgtttcgttcttctcggtgtcgcgctccttgaatatatctacaagaaaagtttaccatagaattttcacttttataaattagaaccacattcacattaccaatatatgtcttgattttaacagcgcacatgataaaatcatcgaaggctattttgccatcacgagaaccatatcgatggcccaaaacatttagaacacgattgtttagatgatagccagcagagttaagagcttcgcgaagctggaatccggataccctgcccgtattctcaacatcatagaccttaaatatggccttccatttggcaatttccgagagcaaagtctcgaactcctcgaatcccagctttccagacttatcagcatccaacatggcaaccatggagcggcaaacatccttggaaaagccatgagtctcatccacaattgctgtaaaaatttctttgtattctagtcttttttaaaagcgtatatatatcatcttaccatttgctgttacaggacctccatccgccggattgtcccctatcagcctcttgttcgactgatcattcattcccaactgctcctcgaatggcgtacccttcaaaaacg

SEQ ID NO: 21200 - DNA, 4380 bp, DROSOPHILA
gaattcggttatatagcccgccgatcgacggcccgtaactctggcgtcggcagagagtgggcgtgcaagtaggtttctcgtggcagtaaggtgtggttccacaacaccataaagcagacggagtgaaagaaaaaaacaaaaaaaaaacacacacaacttggtggtgggaaagtctctcttctcttccacctgtgaaggaagattttcaggaagtccgccagttagctagctattgtgtcatgcaatcgatatccgccgtaacatatgcttctggtatctcaggttgaaacctctatacggaatcgcccactgtgcggtaactgtggaccatgaacaccgcgggagccaccagtcaaccgccgcccactaaaaatgagattaactccgaggagtatctcatccacgtgcatatgccgaacaagagcttcaaggctgttcggtttaatgtcaaggagaccgttttccatgtgatccggcgcactgtcgaggatctgggcacggatggacggacgcccagcattcagcgatatgcctgccgcatgcttaacatgatcaccaaggaggtgatttggctggctagaagcacttcaatgcagaaggttctctcgcacatcctgacgcccggctgctccaacgttgactgtcccaacaaccagtcggagttggatgaggttctattggagcacggaagaaggatcaccgataatagggtgtggcgagtggagctcagagtgcgctacgtgccaaataatattcaagagctcttcgaggaggacaaggccacatgcttctattatttcaatcaggtgaaagaggactttatccaagccaatgtcacagccatcgacactgaagtggcggtgcaactgtgctgtctgggcattcgtcattatttcaagaacatcaccgtgaaagcacctgacaaaaagcagcacattgactacattgaaaaggaaatcggatttaaaagttttcttccacaatctgtgatagccacatcaaagccaaagaatcttaagaaactgatccaagtcggttacaaaaaggtctacaattacaacgacattgagtacttgacgcggttctttgatcttctgaagaatatttatttaacgaacttcgagcagttctcggtaaccctgagctcggcgtggaatatttctggaattctacacgtcggccctcacattggaatctcgtaccagactcatcctcaggccagcttgaagaacgtggctcagtttaaagatgtggtctctattaaaacgtgcactttaccaaaggaaaaactgtccaagtctggggagaataccacagaaccagagcttcagaattttaattgcaactgccagaagattaaaacccaaataaaaatatccgcttccaacaatgtggaagatttggttataacgtgcaatggtattaataccgctgagagtattgctgacctaattgacggttactgccggctgttatcaaaagacctagagttcacgatttggcatcgagagacaaacgcgtcgaacgaagatagcgcaaaagcattgcccaatgatgcgacgctggggtccaataaatcaacttcaagtcagggaaaaccgatgctgaccgatgattatgccgagattggtttattggagggcgagggcgactactctacgcccaccgttcgaaattatgagttggacagagccctcataacgccgagcgccaaaattggtgtgggacagtttggtgatgtgtatgtaggcacgtatacgcttccgaaactgggcaagggcaagaacttagcaggaaatggaaaaaatagtaatagtgaccaaagaaatgccgattcaaggccagatgttatacaagtggcgataaagacatgtaaagctaacgacgatcctgaaaaaaccgaaaattttcttgccgaagcttatattatgcaaaaattcgatcatccccatattatacgcttaatcggcatttgcagcgtaatgcccatttggatagttatggaattggccaaactgggtgaattgcgtgcgtacttaaagacaaacagcgaaagattaagccacggtactttactgaagtattgctatcagctatcgactgctcttagttatttggaatccaaaaagtttgttcaccgagatatagcggcgcgtaatgtactagtcagctcaccaacgtgtgttaagttggctgattttggattatcacgttgggtttccgatcagtcgtattatcactcaacacccacagttgccctacccattaaatggatgtcccccgagtcaataaactttagaagatttaccactgctagtgatgtttggatgtttggtgtctgcatttgggaaatactcatgctcggtgtaaagcctttccaaggcgtcaagaacagcgatgttatattgaagctcgaaaacggagagcgtctgccattgcctcccaactgcccacctaggttatattcgttaatgtcccaatgctgggcgtacgagccacttaaacgaccgaatttcaagcggatcaaggaaactctgcatgaaattctgattgaagacagcattaattcatcggagacactgaagcgggagcaacgaaaagtggcttccatgtcctggattggcagtgatgacatcgacattccgccatcgaaaccttcaagggtgatgcacgatcctgacatcactggcttaatgcctgaaacaacggggctacctcagacctatattattgcacaaaatcccgcggtgctggccaaactgatgatggagaaccaaaaacgaggcataaatccagcggcgtacaccacaccagcttcgggcattcacaatgttttgggcgaaaaactacgacaacagcaaaaggatagcaacagcgacagcgaatggttaattcaagaagaattgctacggcagagatcctgctcaatacctcaaggatcgctcaatgatcatcaggctcaaatgtttaagcttgacttcatgtcagctggtccttccagtttgccggactgctcgaactccagttctcgacctatgacaccaaatgccaatctttcttcactgaagtcgaaccactcatcggcggatcatttgtccagcttgacatctgcagaagaacagatgggttcaaatgcacgaaacctgggcagtgcagttccaagtcgaccacctaaccgcgcagatgacgaagtttattgcgccaccacactggtggtcaaatcaataatggcgctgtcacaaggtgtggagaaagcgaataccgagggttacttggaattggttaagaacgtgggcgtcaagttgagaaacttgctaacatcggtggacaaaatatctataatatttccagcacaggccctcaaggaagtgcaaatggcacatcaggtactttcaaaagacatgcacgaattggtctcagcgatgcgattggctcaacaatatagtgacacaacgctggattgtgaatatcgcaagagtatgctgtctgctgcccacgttttggctatggacgccaaaaacctgtttgatgttgtcgattcgatacgtcaacgttatcagcatctattcccgccatccgccacaaaagaaacaagttgttcgtcaagtttcgagtcgacttctggatctattgtcgcagagccagttaatgaccttggtggttatatcaagactagcacttctggagatttgcttcaaaacacaggaatatatgataatgatttgcatcatagcttcaactcgcaattgcagttgcaaaacccaaaagccagcatcgacttaagcggcggtggtagtctacagcgagggatgagccttggcttggacacaaccaggtcgacaaacgaaccgttgcgaattgttgaggagaccctgggcagcccgggtgaacatatgtactgcaatacgtccgccttgcacggccacgcgtaattctaaagcttgtgtttttttctatgcgaagatagatattaacttaacgatctaactactgtaaatacttaatatatatcagaatatgtatatcccacgaactattcagcggataattcgcttatttacgtacggaatatacatagctttgaacatacttactcactaaaaagtttgacgagaccccaactcggccggccgcattctcacatcgtcatgtagtcaaaataatttaagaaacaaagacacgtttttgattgaagatggctagtaatagtaatttatagataatctactcgatctaatacaactaaaaattaaattcatcatcaattcgggtgtgttttaagacatttatattgtgatttatagtttaccattataggctttactcgaagctaattattttggtgcaaggttcaatcacaaaaaataaaaagattaacta

SEQ ID NO: 21201 - protein, 1200 aa, DROSOPHILA
MNTAGATSQPPPTKNEINSEEYLIHVHMPNKSFKAVRFNVKETVFHVIRRTVEDLGTDGRTPSIQRYACRMLNMITKEVIWLARSTSMQKVLSHILTPGCSNVDCPNNQSELDEVLLEHGRRITDNRVWRVELRVRYVPNNIQELFEEDKATCFYYFNQVKEDFIQANVTAIDTEVAVQLCCLGIRHYFKNITVKAPDKKQHIDYIEKEIGFKSFLPQSVIATSKPKNLKKLIQVGYKKVYNYNDIEYLTRFFDLLKNIYLTNFEQFSVTLSSAWNISGILHVGPHIGISYQTHPQASLKNVAQFKDVVSIKTCTLPKEKLSKSGENTTEPELQNFNCNCQKIKTQIKISASNNVEDLVITCNGINTAESIADLIDGYCRLLSKDLEFTIWHRETNASNEDSAKALPNDATLGSNKSTSSQGKPMLTDDYAEIGLLEGEGDYSTPTVRNYELDRALITPSAKIGVGQFGDVYVGTYTLPKLGKGKNLAGNGKNSNSDQRNADSRPDVIQVAIKTCKANDDPEKTENFLAEAYIMQKFDHPHIIRLIGICSVMPIWIVMELAKLGELRAYLKTNSERLSHGTLLKYCYQLSTALSYLESKKFVHRDIAARNVLVSSPTCVKLADFGLSRWVSDQSYYHSTPTVALPIKWMSPESINFRRFTTASDVWMFGVCIWEILMLGVKPFQGVKNSDVILKLENGERLPLPPNCPPRLYSLMSQCWAYEPLKRPNFKRIKETLHEILIEDSINSSETLKREQRKVASMSWIGSDDIDIPPSKPSRVMHDPDITGLMPETTGLPQTYIIAQNPAVLAKLMMENQKRGINPAAYTTPASGIHNVLGEKLRQQQKDSNSDSEWLIQEELLRQRSCSIPQGSLNDHQAQMFKLDFMSAGPSSLPDCSNSSSRPMTPNANLSSLKSNHSSADHLSSLTSAEEQMGSNARNLGSAVPSRPPNRADDEVYCATTLVVKSIMALSQGVEKANTEGYLELVKNVGVKLRNLLTSVDKISIIFPAQALKEVQMAHQVLSKDMHELVSAMRLAQQYSDTTLDCEYRKSMLSAAHVLAMDAKNLFDVVDSIRQRYQHLFPPSATKETSCSSSFESTSGSIVAEPVNDLGGYIKTSTSGDLLQNTGIYDNDLHHSFNSQLQLQNPKASIDLSGGGSLQRGMSLGLDTTRSTNEPLRIVEETLGSPGEHMYCNTSALHGHA

SEQ ID NO: 21202 - DNA, 5583 bp, DROSOPHILA
gtacctgcccatccgccggtctttcaggagtggctgcgccaacgcttcgccactccgcacagttggtacgaggcgagaaatacgtatattcgtaccgtggccgttatgtccatggtgggatatatcctcggcctgggcgatcgccacggcgagaacatcctgttcgccgagggcaacggcgacgctgtccacgtggacttcaattgcctgttcaatcagggcgagctgcttccctatccggaggtggtgcccttccgtctcacacataacatgatcgttgccatgggtccgctgggcgtcgagggcagctttcgcaagtgctgcgagattacgctgcgtctgctgaagcaggagtccaagaccctgatgtccattctgcgtccctttgtctacgatgtgggggcacagacgcgtaaaggcgccgccacggccaaaataacaaaggatgtgcagcgcatcgccgatcgcctgcaaggacacgtgagtagagtagagaatcatgtggatctgaattagcacctaatgaatgcttctccttttccaggttaaacgacagcaggcgaacagcattccgctttcgaccgaaggacaggtgaacttcctcatcaatgaggccaccaaggtggacaacctggcgtccatgtacattggctggggagcgtttctttgaacgtatgtaagtgttgttatcgagatctacggattgttcgattttatacatatatgtgtataaacaattcaaattgaattcatataatttggctcgactgttaattgttaagtcgattacatatgtataaatgctggtgcatttgacaatataagtcgttctgttacacaagttaaaaaaacacatatttaattaaatatagcttcgttagttgttttataccatacattaaaatacaatattcataagctgtccatcgaattaaaagcaaactgagaattgaatggtgatcatcattgcgtactttatttaaatctttagtaagcgatcctagactactggtttgcttttgagtggcactttcctgtacatatcattaacgaccttgatgacaaagtcgggcagcagacatgccaccgagcaaatgatcgtgaacaaccagatgggaagtgagctgaggaactgattgtagacatcgtacagctcgccactggtgtacaggttgtagagatacgtggtcagcatgaaggcggcaatggaggctaggatcatggcaaagttccgataggtcatgtagtgggccactagcagcaatttcaggttgcccacaatcacgataatggtgatgagcatggtgccaaaggtctggaagctagcagtctgtccgccattgaagaggacattcgcatcgttgagcatggcgtaggtgaaaaagaagatgatgaagcactggacaaatccgttgagtatccacagactaaatactcccatcgaggcttgtctattgtgcgctagtggcttgtatagctcgggatgactgaaaatgaaatgcggatgtggatcgatcaggttcagacgatgcgattctatatatatcttttcttacctcagcagcgtctcctcactgtaatccttatcgcaaatggccaggacagtgaaactaaacgagatatagacgatgtcgaagagccatagatagatcgaattgtaaacgttggtggcggagtatagatcgtacacctggtagagggccatgcacccagtgatgattatgttcttgtagcagtagaagagcaccagaaaggccagacgctgcgagttgtagtgaccgtggacgaggaacagacggcgcagcatttcgaagcgggcaatcgagaagtcggcacaccgggcggcttgtttaccctcacgacccgtgatcccaatgccaatgtgcgcctcctggatcatggacacatcgttggcgccgtcgccaatcgcagccgtaatgtacttcttgcgccgcttgatcagcgtgacaatctcggacttttgcagcggactaagtcggcaacagagcaccgctcggcagcgtagtgcaaggtcggcaaactgacgcggtgtgtgctccagcagtgcggttatagtagttccatctactatcagcacctccggctcgtcatcgccaatcatatccagtcgggcaagaagctctgctggctcagtcgtattgatgatgaagtgctgcttcgatccacgcggaatatggcggcaagcaagtccaatgttgtaggccgtttccactttgtcgccggtgagcacccagatcttaagaccagccgcttgcagagcctcaagggtctcgcccacgtgctcctgcagtgcatcctccaaggcagtggcgccgagcaggtcaagttctgtgaaaagtgacgagtttagtgcattgcaattgaagcggatgcggattcttaccattctcgactgtttcatagcagcttgctattagttcgttcctgttactcaactgggtgttggccttacggtagagctcttcgaaatggaataactcatcatcggtcagcatgcgtcgccccacagccatggtgcgtaggccattctgggcatatttcgttatctgcgcgtcagtttgctccacgagaggactcgccttgcatcttggaaagatggcactttccgctcctttggaatatagccagattgtgtcgctctgatctcggacaatgacgctcatccgttgtcgctccgaactgaactccagaacgtgcagtctcttgaactgcaccttttctgcgcttggatatcggcagatgcttaggacatcattctcctgaccctcatacactagacccagactggcgcagccctcgagaagagccttctcgtcgggactggacgcctgatagcgatcaacaatatttctgctcatcaagtgactttgttccgacacggattccgacgactccagagtcttgtctcccacttcctggagtacttccaccgtatgacacacggccagtgcctcgaaaagcactgctgcatcggccttgggcaaagtgtaacgatatatttatctatctatatgctttgattgaagaaatgcagtactcacatccagtttctccagttcaaacttttcatcggtgccctcggaaacgagatgggtgttttggagctgataattagtacctggcacatagcaattgacgaatttcatgaggttcttggtgagtgtacctgtcttgtcggagaatagaatattgacctgtcccagttcttcgttcagattcgacgcgttaacccgacatggctgatcggtttcctcatcgtacaaatggagatcgttgtgcatgaaatgcataccgaagatgcgatacacttcgatgttcatataggcggaaatgggcaccatgtaattgaagagcagcaaaaaggagaggaagtcctcaaagatttgccacgctgaattgaagttggttggtggaccctggtagggcatggttggcacaatcttcgcctccttgtgactgcagtttaaaaagataatcgcttataaataaaatgcattttaaacgtttgtaatctcattctagatatacacccaccgttcgatgagatacaaaaccaccaccaccacgatcattcccacgatgagggccaccataaatcgattgatgtacttctcgctggatgcggacttgttgccagtgtaacggctattcagctgcaacttggtgtgcattccggtgtagatggcacagccaacaactcgttcggtgctcttaactcggacaccgcgcagtagaagattatcaatggtcaggggcagggcgtcaccagcgctagatcctgcaccatcgttccctgacctcaactccagacgaccattaaaggtgtagagatcagcgctagaaggctcgcatacaatgcaatccttgccctgcagttcatgatctccggctagcaagtagtttgttggcacgcatatggtcttcaaattggtctctccatccaaattggctgtgttcacgaagcatttgcgatccgcactagatgattggagcagtacaaggtcacagggcacatcgccatcgtttcgcaccaccacaagatcgcctggcacaataaactgcgaatttatgatttcctccttgccgttccttatgacagttactgtatatggaaggcggtactgattcaaatggagaacctatcatgaccacaagtttcatttcatttcctacctctggctgtattcacaagcttatcacttttcgatctcgagtagtcttccaatccctcctttagagccgtaatgatcattacaaagagtaggggtagcagggaaaccaatggcgatatcgtttcgtctatttgtcaagggatcgaccattgagaattgtccaattttggaagagtaaacgtacttacttacgaaaaacgatacaattgtaatgatcagaaagtaaaagtaaacagcccgcctaaactgttcgtagaagttgaggggcaggaatgtgaaccaggtgtatttggtggtcgtcacccgattgagaggcttctgctggcgactctcgatgccgccaatctgaatccgcagcggatccgcagactttttcttgtcagctcccattcgttaccagtatttaatgaactatatagagtgtaatatttgctcattcggataatcattaggtggttggcacgcgtggtgcctttcggagcagacgttagactgaactgaagttagccagcctgaattagccacatacataaattggcatatgataaagataatgttccattttccgcttatataaaacctattttggctcccaagtggccctgtcacaataggtatcccattgaaaagaagcctatacttatttccgtcgttttgccgatgacagattagtccaagctaagttgtagctattaggcacgctcgcagcttagattagatggactcatgtcatgtcagattattaataatgaaattgaattttaatatttttggctgccatatcatcgatttggccattcctcttcaaaccatgtcgaactgctgtaagcattcaaagattgcttcacaccaaatgtgccaacgctttcccttaactgattagtactatcgcctttcttaaattcgaatatcaaatccagctgatatcggcttacatactaccctaatcactggtctaatcagctaaacacttagattatagcagtggcacttggggctattttcaaaagtaaatgaaggtctttgagctatggactctctgcttctgggcattcgtagacaactatagagccgactaggcgataccctataattacttcttgtttatttgatatgtgggcaagaaagaactaaaagtaagtattttaagcccgaaaatatagtgtaaattatacccaatggtgtaatttataatctataatctatatgataaactttttcccgaatgtggaaatgaatgtcgttgttgattttcgatcagcttaaaagctaacgccataaagcttttgctaaagcttaaatgggttaccgtctctggcaaagctttaacataaaaaatttacattctttattttattgaaattcttataaaaatcaagagttaattaaa

SEQ ID NO: 21203 - DNA, 3183 bp, DROSOPHILA
atgggagctgacaagaaaaagtctgcggatccgctgcggattcagattggcggcatcgagagtcgccagcagaagcctctcaatcgggtgacgaccaccaaatacacctggttcacattcctgcccctcaacttctacgaacagtttaggcgggctgtttacttttactttctgatcattacaattgtatcgtttttcgtaaacgaaacgatatcgccattggtttccctgctacccctactctttgtaatgatcattacggctctaaaggagggattggaagactactcgagatcgaaaagtgataagcttgtgaatacagccagagtaactgtcataaggaacggcaaggaggaaatcataaattcgcagtttattgtgccaggcgatcttgtggtggtgcgaaacgatggcgatgtgccctgtgaccttgtactgctccaatcatctagtgcggatcgcaaatgcttcgtgaacacagccaatttggatggagagaccaatttgaagaccatatgcgtgccaacaaactacttgctagccggagatcatgaactgcagggcaaggattgcattgtatgcgagccttctagcgctgatctctacacctttaatggtcgtctggagttgaggtcagggaacgatggtgcaggatctagcgctggtgacgccctgcccctgaccattgataatcttctactgcgcggtgtccgagttaagagcaccgaacgagttgttggctgtgccatctacaccggaatgcacaccaagttgcagctgaatagccgttacactggcaacaagtccgcatccagcgagaagtacatcaatcgatttatggtggccctcatcgtgggaatgatcgtggtggtggtggttttgtatctcatcgaacgtcacaaggaggcgaagattgtgccaaccatgccctaccagggtccaccaaccaacttcaattcagcgtggcaaatctttgaggacttcctctcctttttgctgctcttcaattacatggtgcccatttccgcctatatgaacatcgaagtgtatcgcatcttcggtatgcatttcatgcacaacgatctccatttgtacgatgaggaaaccgatcagccatgtcgggttaacgcgtcgaatctgaacgaagaactgggacaggtcaatattctattctccgacaagacaggtacactcaccaagaacctcatgaaattcgtcaattgctatgtgccaggtactaattatcagctccaaaacacccatctcgtttccgagggcaccgatgaaaagtttgaactggagaaactggatgccgatgcagcagtgcttttcgaggcactggccgtgtgtcatacggtggaagtactccaggaagtgggagacaagactctggagtcgtcggaatccgtgtcggaacaaagtcacttgatgagcagaaatattgttgatcgctatcaggcgtccagtcccgacgagaaggctcttctcgagggctgcgccagtctgggtctagtgtatgagggtcaggagaatgatgtcctaagcatctgccgatatccaagcgcagaaaaggtgcagttcaagagactgcacgttctggagttcagttcggagcgacaacggatgagcgtcattgtccgagatcagagcgacacaatctggctatattccaaaggagcggaaagtgccatctttccaagatgcaaggcgagtcctctcgtggagcaaactgacgcgcagataacgaaatatgcccagaatggcctacgcaccatggctgtggggcgacgcatgctgaccgatgatgagttattccatttcgaagagctctaccgtaaggccaacacccagttgagtaacaggaacgaactaatagcaagctgctatgaaacagtcgagaatgaacttgacctgctcggcgccactgccttggaggatgcactgcaggagcacgtgggcgagacccttgaggctctgcaagcggctggtcttaagatctgggtgctcaccggcgacaaagtggaaacggcctacaacattggacttgcttgccgccatattccgcgtggatcgaagcagcacttcatcatcaatacgactgagccagcagagcttcttgcccgactggatatgattggcgatgacgagccggaggtgctgatagtagatggaactactataaccgcactgctggagcacacaccgcgtcagtttgccgaccttgcactacgctgccgagcggtgctctgttgccgacttagtccgctgcaaaagtccgagattgtcacgctgatcaagcggcgcaagaagtacattacggctgcgattggcgacggcgccaacgatgtgtccatgatccaggaggcgcacattggcattgggatcacgggtcgtgagggtaaacaagccgcccggtgtgccgacttctcgattgcccgcttcgaaatgctgcgccgtctgttcctcgtccacggtcactacaactcgcagcgtctggcctttctggtgctcttctactgctacaagaacataatcatcactgggtgcatggccctctaccaggtgtacgatctatactccgccaccaacgtttacaattcgatctatctatggctcttcgacatcgtctatatctcgtttagtttcactgtcctggccatttgcgataaggattacagtgaggagacgctgctgagtcatcccgagctatacaagccactagcgcacaatagacaagcctcgatgggagtatttagtctgtggatactcaacggatttgtccagtgcttcatcatcttctttttcacctacgccatgctcaacgatgcgaatgtcctcttcaatggcggacagactgctagcttccagacctttggcaccatgctcatcaccattatcgtgattgtgggcaacctgaaattgctgctagtggcccactacatgacctatcggaactttgccatgatcctagcctccattgccgccttcatgctgaccacgtatctctacaacctgtacaccagtggcgagctgtacgatgtctacaatcagttcctcagctcacttcccatctggttgttcacgatcatttgctcggtggcatgtctgctgcccgactttgtcatcaaggtcgttaatgatatgtacaggaaagtgccactcaaaagcaaaccagtagtctag

SEQ ID NO: 21204 - protein, 1060 aa, DROSOPHILA
MGADKKKSADPLRIQIGGIESRQQKPLNRVTTTKYTWFTFLPLNFYEQFRRAVYFYFLIITIVSFFVNETISPLVSLLPLLFVMIITALKEGLEDYSRSKSDKLVNTARVTVIRNGKEEIINSQFIVPGDLVVVRNDGDVPCDLVLLQSSSADRKCFVNTANLDGETNLKTICVPTNYLLAGDHELQGKDCIVCEPSSADLYTFNGRLELRSGNDGAGSSAGDALPLTIDNLLLRGVRVKSTERVVGCAIYTGMHTKLQLNSRYTGNKSASSEKYINRFMVALIVGMIVVVVVLYLIERHKEAKIVPTMPYQGPPTNFNSAWQIFEDFLSFLLLFNYMVPISAYMNIEVYRIFGMHFMHNDLHLYDEETDQPCRVNASNLNEELGQVNILFSDKTGTLTKNLMKFVNCYVPGTNYQLQNTHLVSEGTDEKFELEKLDADAAVLFEALAVCHTVEVLQEVGDKTLESSESVSEQSHLMSRNIVDRYQASSPDEKALLEGCASLGLVYEGQENDVLSICRYPSAEKVQFKRLHVLEFSSERQRMSVIVRDQSDTIWLYSKGAESAIFPRCKASPLVEQTDAQITKYAQNGLRTMAVGRRMLTDDELFHFEELYRKANTQLSNRNELIASCYETVENELDLLGATALEDALQEHVGETLEALQAAGLKIWVLTGDKVETAYNIGLACRHIPRGSKQHFIINTTEPAELLARLDMIGDDEPEVLIVDGTTITALLEHTPRQFADLALRCRAVLCCRLSPLQKSEIVTLIKRRKKYITAAIGDGANDVSMIQEAHIGIGITGREGKQAARCADFSIARFEMLRRLFLVHGHYNSQRLAFLVLFYCYKNIIITGCMALYQVYDLYSATNVYNSIYLWLFDIVYISFSFTVLAICDKDYSEETLLSHPELYKPLAHNRQASMGVFSLWILNGFVQCFIIFFFTYAMLNDANVLFNGGQTASFQTFGTMLITIIVIVGNLKLLLVAHYMTYRNFAMILASIAAFMLTTYLYNLYTSGELYDVYNQFLSSLPIWLFTIICSVACLLPDFVIKVVNDMYRKVPLKSKPVV

SEQ ID NO: 21205 - DNA, 7203 bp, DROSOPHILA
tgcagcggacacgtgcaggcgtggttttggagacacttgcgtccgtggcaaacccaagcctcgcagaagtcgcagatggcgcccaccattccgaggcccgtggtgtagacgcccggatgtttgaccacgcagtcgccggtctttagcatgcacttgattttcccgcactgggcgcaaatgggtaatctctgaatgctctggcagaaatagcagaaggctctcgacttctgcttcttctcgcacttgtcgcactccattggtgcattgcagggcaaatccgcaagaggcacctctctgctgcggatctccttgaggcgaagcttctgcttctcggccttcttacgctgcccagtcttctttttcggcatttttgaaatcaaggaattagaaaacttatttccttacgtgtgcggcagtgtggctgctgcgggtgcgccgaaaaataccacaaaaagctttcgaatattccgctaaatatgtagctacatcttgaaaatagctacaaaaaatgcgttaaattagcatcgtggagttagcggcgacggcggagccgagtaatttaacacatcatttttctggccagcgtgcattttggaatatgctctgcgagtggagatattccttgaaaagtagctagccgatttttttattgcatattttatatactttctgagtcctataaactttagtcgtacatagatagttagatctcttaaatagttcgatttattaagatttttgcatttgtattttttttggaatttacctataaatagcgaaaaattaaataaataaataagattctcattttccatatttcaccgttctgccatagacgctaatttgacccacatagattttcagtggaaacaagtggaagcaacaaccgattagtgtaaccaaatacctttgcttttatttaggtctagtatttttgtaaggtctgtctacggctttcctttccacaggaaaatatattttcagttttagggaaggggtgctacagtgagcgtctttcgttcccagtgtcgttatttctatagtattgctgagatatatatcagagcagtaaagatatttaaatataagttcttcgaaatgggtggtcacgacaactggaacaatggtcaaaatgaggagcaagatgtaagtagcacacaaaaccgcgactgcacagggaaaaaactcagttcggccataatcccaatatatatatattttggtgatcaacgcgcttttacccatgcggcaactaaagttgatgtgctaaagcatttcgttgcggttttgttacttaagactaagactaacagtagttgtatcttaatagtgctagggagtacgatgctgtcggtattggtttctcttttagctttttagtgcaaaaggcgtgatcaagaatacacatgttacacacattttttaaggcatggtgaaaagaaacagggcagatattgtaaaagtattgtattgacaagggtgtctgtcaacttatcgttatcgttctaggtagtatcgaataggtgctgggtttaatcgggttgtagaaacggtcacactgtattcagttttttcattcgtctcgtgtgtcaggggactttctccatttgcaatagcaaaaaaaatagttagattagaagttgttcaacttttgcattagtaaaatggtgaactcgaaccagaaccagaacggcaactccaatggccatgatgatgtaagtagtggatattaagggtctagaaatttcctgtaagctggtgtctcgccttgccggtcgccattttgaaaattacgcatgtgtctcaagggcggaaagtgaggttatggccattgataaaatcaataatttaggactttcctcaggactccatcaccgagccggagcatatgcgcaagctgttcatcggtggcttggactaccgtaccaccgacgagaacctaaaggctcacttcgagaaatggggcaacatcgtggacgtggtggtcatgaaggatccgcgcacaaagcgttcccgcggattcggattcatcacctattcccactcgagcatgattgatgaggcccaaaagtcgcgtccccacaagatcgacggtcgagtggtggagcccaagcgcgccgttccccgtcaggacattgattccccgaatgccggagccaccgtaaagaaactctttgttggcgccctcaaggacgaccatgatgagcagagcatccgcgactacttccagcactttggcaacatcgtcgacatcaacatagtcattgacaaggagactggcaagaaacgcggattcgccttcgtcgagttcgacgactacgatcccgtggacaaagttgtgtgtaagtacaacgcttttcctaatctagacaatatcaaatatcctttaagaatgatttatctcttcgagagtagactgttaggaaaatcacattgccatgttcttagatttatacaatacagattgaattatctgcacaggaaacgaatattaaccccatttgtgtacgcggcgttcgtgtagaaaaaaagtatgacatgcaaccacccctaatctatatgctcaatcagctctggcacattgtagggcttctcgtaaatgtccatcagcgtcggataaacgaatgcgcactataagcaagaaatttcgataaaattgcaattattacaatatatccacagtcccagctccgcatagcaatgttcgatgtgcttgtgcggcgtttgtgactgtaagaataaattccagccagtattatatcattgttgttggtgctcttcgtgcatcaacgatgaaagagtatatggcacactatagcttgaatctaaaactgtttcctaatatcacagtactgacaaattaactggtttgaaaccatcaccagggtagtttttttttaaacgctgtgagatgaattaaagcgtcggctaagctatgttatgcgaatgtaagcattgcgcctattcagtgtaacacgcagcctcgttacaatagttcaattaattgctattatggaaatcgatacacagtcccagctccgcatagcaatgttcgatgtgctcatgcggcgtttgtgactgtaagataaaagacccagcccatattatatcgtgttgttggcgctgttcgtgcatcaacgatgaaagagtataaggcacaatatcacattgaattaccaactatatgaaaagaatgagtatctaaatgccttcgcttacttgaatatactgacaaatccacagaatggtgaatgttatttagcgtgaatatatctcctaaaattagctacgattccacagtcccagctccgcacagcaatgttcgatgtgctcgtgcggcgtttgtgactgttagaataaattccagccagtattatatcattgttgttggtgctcttcgtgcatcaacgatgaaagagtataaggcacaccttgattatcgaaccgattaaacagaaagtttctagatcagccccttcgtggacgtcacagtactgacaaattgacgggcttgaaaaagtcgcctgtatggtttttatttaaacgctgtgagattaatttaagcgtcggctaagctatgtgatgcgaatgtatattataaatcaattctgtgtaacacgcagcctcgttacaactgcaaatcaaatgcaccgaaatggtgaatgtgtactatccgatatcgatcctaattttagctaaaattccacagtcccagctccgcatagcaatgttcgatgtgctcgtgcggcgtttgtgactgtaagatgaaatcccagccagtattatattgttgttgttggtggtgtttgtgcaccaatgatgaaagagtatatggcacactatcctccggatgcaccacatagggaagttcattttcgaataccactaatagcatgctttccctctttatttttgcagtgcaaaagcagcatcagctgaatggcaaaatggtggacgtaaagaaggccttgcccaagcagaatgaccaacagggaggtggcggaggacgcggtggtccgggtggtcgtgccggtggaaaccgcggaaacatgggcggtggaaactacggcaaccagaatggtggcggcaactgggtaagaacttattgatcgccatcaattcgatttgaggcttattactggttaattggcattgcagaacaacggtggcaacaactggggcaacaaccgcgggggtaacgacaactggggcaacaacagcttcggtggtggcggcggcggcggtggtggttatggcggtggcaacaacagctggggcaataacaatccgtgggacaatggcaatggaggcggcaactttggaggcggcggcaacaattggaacaatggtggcaatgattttggaggctaccagcagaactatggcggcggtccgcagcgaggtggcggcaacttcaacaacaatcgcatgcagccctaccaaggaggtggtggattcaaagcaggtgagcaacagcacgtctgttgatgcattactgataacaactagatagcaagacacagtaccctgacacctaactgttagagcgtcgatagagtttggcagttagcttattaaacgctgtgagatcaactgacgatggccttcgctatgttatgcgtatgtaagataatcccagtacgacgtaacacgcagccacgttacagttttttcatgaacagtcaccaccagtatagaaactagactagaaagacgattggatatgttcctaacgatcctgggttttcttttaggcggtggcaatcaaggcaactatggcggaaacaatcagggcttcaataacggtggcaacaaccgcagatattgagagagattccggacgaggtgagacatccaaataaccactactaacacaaaaatatacatagtccaaggcgaattcaggccataactaaccgcttatctatcccgtatgaccattaatctttcgcttgatttgacaaacatatgttgtgtgtttttttttttttataatagcgcccttatcggcatttttggtagtttataaagcatattgagactaaaaagcaaaacggctgagacagtccgacccaccttactcaacaaacttatatacgtatttacacttttaagtatttagagaacaaaaacccatcaaccaattaagaactccttttcataccaattgttttaaataacgtttctcatttatcgacattttataggtgataaagtaaaagtcgctcagtataatcccaaaattcaaagtcaagtaaacgatacgcaattcaatgatcaatatgatgaagtatgaacgcacgttcatagtcctaagaagttttccgagcaccacaaaccaaacattacagattgattgatcaggatcagtgcagtgcagtgaagtcgtaagaagtttggttcagtcttggattagaacagaaagagagatcagtaccaagcaagaccagaccaatacagagtgcagtgcagtgcagagcagtgtgtgagctaaacagaagaaacacagcaagtggcagtacacgtacacagaaggtgaccaggattccattcaatttgtctttgcaagcgatgataaattgaatgtcaagaggcgcatcgaaaactatccaatacccacagaattgtaatctataatttgcaacccatatgtagcagcccatataagtaacattgtaattagatccacaaagccgacgacaggccaaacatttgtatctccaccacacgagcaaccaaccaaccaacctacttaaaacaaccagtcataaacgaatcagctatgtaaaacttcaaggcggcagccgagagatatgtttctttggttgcagacagctctccagtccatcggctgccggcaacttttgataatcagagcagaaaacacaaaatatataaaaacatgtattacattttacaactttactaggctaagttctcatagaattaaatcgagtagagcgtgcggagcgacttctgcatccatccgcacgctaccctagtcttaataattttactattcaagttctaagcgaacctgaccgtgtgtggaggaatctagatacttagatttttgaataagtgtcgacatggatataacctcttccgctgcttagatgtaaccgatcaacaaacaacctttattgtaatttataccttttagcaagcagtctgtctgaggagtcagcgcaattatacttaacaaaatttacattttaatgtagctaaaaaatacaagatgcaaaaaaaaaaaataagcaagtgtcccgcaattgatgtaaactctgacgaaagaacaaaaagtatatagctaagccaaagcctcgtagttttctatatttctgtagcagcatcagcaaaaggatctcgatcagaatgagagtgtattgcagaggtaacaaggtgcagcaagtctgaccaggtccaaaagccagccaagaatatgtactttactatagcatttgttgtgggcgggccattaacgtcgttcgagagttctcctttcactcgcttaacaggaatcattttccccttttatttgatttgccccccgcctgctgtaccatgtcatttacaaccatgtatattattgtaatttctgttgccagttggctgcgaaaagtatgcgaagcgctgaaagactgccgccgcgctactgaatgcagccacggaaggtgcccgcgtttgctagcaactccggtcgctgggtttcggttccctctgggtaagtaatcctccgcagatcccaaatccggaaaaagttgtaactttcaggtggtctgaatcggctcgtcgcacctgaggatggaatggatgttgaacggtttcccctctgcaccatcgtaaatatacgacttttatttattacttcattttattttcattattactatctttgaataaagaaatttcagaataccaaacaaaatgattttcgtttcattttgaattaaaatttcaccagtgggggaaaataacggtatttgaacaataatggcgttgcgaatgtaacgtgattggcgtaaaatcgcaaattccgttttatatagttgaatgattttcaaagcattcattttgttgcatttaatgttaaattttaattagtccactgaaaataataaatcatgataaatgagcactgtgtctgtcactttgttgttggtttgagtcttctctaagtggtgaataagttttctgcgatat

SEQ ID NO: 21206 - DNA, 2185 bp, DROSOPHILA
ctacagtgagcgtctttcgttcccagtgtcgttatttctatagtattgctgagatatatatcagagcagtaaagatatttaaatataagttcttcgaaatgggtggtcacgacaactggaacaatggtcaaaatgaggagcaagatgactttcctcaggactccatcaccgagccggagcatatgcgcaagctgttcatcggtggcttggactaccgtaccaccgacgagaacctaaaggctcacttcgagaaatggggcaacatcgtggacgtggtggtcatgaaggatccgcgcacaaagcgttcccgcggattcggattcatcacctattcccactcgagcatgattgatgaggcccaaaagtcgcgtccccacaagatcgacggtcgagtggtggagcccaagcgcgccgttccccgtcaggacattgattccccgaatgccggagccaccgtaaagaaactctttgttggcgccctcaaggacgaccatgatgagcagagcatccgcgactacttccagcactttggcaacatcgtcgacatcaacatagtcattgacaaggagactggcaagaaacgcggattcgccttcgtcgagttcgacgactacgatcccgtggacaaagttgtgttgcaaaagcagcatcagctgaatggcaaaatggtggacgtaaagaaggccttgcccaagcagaatgaccaacagggaggtggcggaggacgcggtggtccgggtggtcgtgccggtggaaaccgcggaaacatgggcggtggaaactacggcaaccagaatggtggcggcaactggaacaacggtggcaacaactggggcaacaaccgcgggggtaacgacaactggggcaacaacagcttcggtggtggcggcggcggcggtggtggttatggcggtggcaacaacagctggggcaataacaatccgtgggacaatggcaatggaggcggcaactttggaggcggcggcaacaattggaacaatggtggcaatgattttggaggctaccagcagaactatggcggcggtccgcagcgaggtggcggcaacttcaacaacaatcgcatgcagccctaccaaggaggtggtggattcaaagcaggcggtggcaatcaaggcaactatggcggaaacaatcagggcttcaataacggtggcaacaaccgcagatagtgataaagtaaaagtcgctcagtataatcccaaaattcaaagtcaagtaaacgatacgcaattcaatgatcaatatgatgaagtatgaacgcacgttcatagtcctaagaagttttccgagcaccacaaaccaaacattacagattgattgatcaggatcagtgcagtgcagtgaagtcgtaagaagtttggttcagtcttggattagaacagaaagagagatcagtaccaagcaagaccagaccaatacagagtgcagtgcagtgcagagcagtgtgtgagctaaacagaagaaacacagcaagtggcagtacacgtacacagaaggtgaccaggattccattcaatttgtctttgcaagcgatgataaattgaatgtcaagaggcgcatcgaaaactatccaatacccacagaattgtaatctataatttgcaacccatatgtagcagcccatataagtaacattgtaattagatccacaaagccgacgacaggccaaacatttgtatctccaccacacgagcaaccaaccaaccaacctacttaaaacaaccagtcataaacgaatcagctatgtaaaacttcaaggcggcagccgagagatatgtttctttggttgcagacagctctccagtccatcggctgccggcaacttttgataatcagagcagaaaacacaaaatatataaaaacatgtattacattttacaactttactaggctaagttctcatagaattaaatcgagtagagcgtgcggagcgacttctgcatccatccgcacgctaccctagtcttaataattttactattcaagttctaagcgaacctgaccgtgtgtggaggaatctagatacttagatttttgaataagtgtcgacatggatataacctcttccgctgcttagatgtaaccgatcaacaaacaacctttattgtaatttataccttttagcaagcagtctgtctgaggagtcagcgcaattatacttaac

SEQ ID NO: 21207 - protein, 363 aa, DROSOPHILA
MGGHDNWNNGQNEEQDDFPQDSITEPEHMRKLFIGGLDYRTTDENLKAHFEKWGNIVDVVVMKDPRTKRSRGFGFITYSHSSMIDEAQKSRPHKIDGRVVEPKRAVPRQDIDSPNAGATVKKLFVGALKDDHDEQSIRDYFQHFGNIVDINIVIDKETGKKRGFAFVEFDDYDPVDKVVLQKQHQLNGKMVDVKKALPKQNDQQGGGGGRGGPGGRAGGNRGNMGGGNYGNQNGGGNWNNGGNNWGNNRGGNDNWGNNSFGGGGGGGGGYGGGNNSWGNNNPWDNGNGGGNFGGGGNNWNNGGNDFGGYQQNYGGGPQRGGGNFNNNRMQPYQGGGGFKAGGGNQGNYGGNNQGFNNGGNNRR

SEQ ID NO: 21208 - DNA, 4569 bp, DROSOPHILA
tgccgctggagaacctttgctgtgccatctttttcggcggcatttgggacagcctggccaagatcctgggccgcgggcaggccaaggacggcgatagcaaagatgttaagaagagcaactaaaactatttgtagtcagccccatcttcccccggacaaatagtacttaacgctgccagccaaagctaacgcctaaaacgcacacaatttatacataaatagcaatttataatttatacataacgaacgagatcttcccatgtgattcgattcagaagcgcaagccaaagacattatttgtgaggcgtgaacatttttgctctcgaggatcagcgcacttggttgggtgtgccagcagctgttcctcgactccgactccttcacgccgagtgtaagccctcgaaaattttaatttgttttgttttggtaatttgattggtaggatttttttgttggttttttttttttttttggagaacaagcgcagctgcagaaaccaaccacagacttattaagatgccatacttaagtgctttaaacatggcccatacagcttatcatctataactaagacgacagccaatcatgattttagacagaaggacgccgagtcttgtgacttttgccgcaaaagcgcgtgctcaacgaacgaaatgtgtaaatgtaaaatattgaggtcgtttccattgcagcccttcattttttttttgtatacattctaagagttttttttttgccgaatacccattcgaaaaccgaatgatgatagatcattgcttcaagattgtgaacacgtattcaagctgaatttaaggcaattgtatgaggtgtgaatgtttattgtttgcaataaaattaaactacgattttgcttgagtttctttggtaacttgtgcattaagttgggatttaatggtagccagttgttgtaatctgaatatgtattggatctttgggcaaaatgatttatcctgctacctctacgttattgtcaaatttttattctgcaatatatttcgttataacgtatcaatcagtagtatatgtttatacatttacaatctatacaattgtttatggattcgaacatattgttatttctgaaagcttaataatgtaggtatgttagttcacaatgttgaattaaatgcttttgtataaatgttaaaacaatgaaagctcaaatgcgtaaggaatataataaaatgataaagaacttacaacatttttcaaagcctagtgaaattttagcggcaaaaatgcttataattaaatttagatagatacattgtggattttttttttaatttttctttcctaatagaagaatagggtacttttcttaagagattatatttaaaaaaattgtttactcaaaaagaatgttatttaaattgggcttaattgaggtcgtctttgaatggaagtcgcctgtaaagcacgttctattgtcacaatctatacagtcgtgtaatgcgccttgcagtgaactgaaaaagatgagcaacatgggtgagcaggaggtgtggcaacaaatggactacgaatagctgcataccaataaattcggacacgggatcgttgtcgccctcgccgcgcattgtaccggtgatctcctcgttctccaccatcggcaggaacagctgcacgaactccggcgagtagggatgtgtgatagtctccagcacctcggtgacaaagtatcgtattagcgaaatgtctgtgtcctcgatggcgcagcactgctttatgtatctgagaacgggtacaacgcagccgcgcgtcagcaggttaaccattcggtccaggatcattttcttcatttccaattgaacgagaatctccagctcatcctgcttggactcaaataagcggatgagcaggaagaggatctgctgctgcaaggtgggatgaacggcggccacttcatccagtaccgccaagtgcgtgggacagctgtctgtggagagcttgaaatatgaaggctccataacaacgttttcgatccaccgaatgacaccaactcccaccacaggatatctacgattaaaagagatctttacgttaagggaaaccaataattttttgatatacatcggtcgccttacttgatgcaattatacagcgtttgcaactcggcgattagctcggtggatccctggtccacattacaaatggtgtgtgccttttcgatagcctgaatggtgctctttagctcctccttgtttagcatgcgctcagtcattggtcgctttttggccggctggtcgatgaccgcggacgcgtaggctagcagaaacatatacttcggtttgtgctcgggattgattttaacgccggaacgaaagagcgcgtctaccagtagctccagaaactgggggtttcgtatcaagtcgatgggcggtggatcggaaccggagtagttgcgaaacagcacggtgatatcggcgggattcagtgtattgcgggtgagcatggaagttagggcttgacatgcttgcggatagactgccgaaccattcagggccattgtaataggcgttacattttgattgctaaacaatgaagcaaaagaaaggatttatgttatgactaactatgtggaatcgtcagttattttcatacttctgcagggcgtatttaataatttcctgagagagccgcttcatgttgaacccacccttctgctcctggctgaggacctggatgagcacctgggagtatacgtaagtgtgctggccatggcagaccattcgtgcgcactcctgaatggcaccgtgcacatcatccggattgtttagaaatttgacgatcgaggtctttagaacccgcgagaaaacctcaatctgctgtgccgctgtcgaaatggaagtgatctcgctctggaagcccgcgtccgagatcaacttgattgtaaagttcagcattagacaatcgggatattcttcggccagtcggtagattagcgagcgccacgtatagtggtcgatcatctcggttagccagtcgggcgtctcaccctcctccgtgaatatggtgtccgccttcttgggatcgaaggacttaagaatcatttccttgagatgattctccaccatggcctggacttcggtaaccttgacgcccgccaggatgagccattccgcaagcaggttggccatctgggccaccgccttgtagttctcggatagcatcgatataacctcctccggagatccgcccgactgaaagtagcgcttcagctgcgtaaatatccccggctccatgatgtagtccggtgtgaggaacttctccaggcattcctgtatcgtcttctgcggattgtcctcaagcgtttccttcgattgggatgggataacatgatgtttagttgttattttttatggtttatctagtagcgtcatcaaattgccgggattgcctgccacgccgtacacgctctatactcaattacctccggattggtttgtcctttggcgcggccctgccaaccagagtcgtcgtattccacttccattttttctcaaaaacttatttacaataacataaaaatatttttcttattttgattaactatgcatttttagtgtgactgtaaattgttaaccacgacgcgcacacctacgcgggttatgcgccgtttacacttagcaaactcttctgttaatttcatattatgcaatgtaaatcttaaatttgaggagaaaaagaaaattgtcaataagtgtaaaacgcggtaatgtaaacatatattaactaatttttttttaaattaatatatgtaaaatcgcagttggaacgtggctgttattcaagaaaaagaagaagaagctgccaaacatatcgatagccacaagtgcggcgaatgccggctttcgtaaacaaaggtcgcgtttttgcgagttttaaataaacttggcaaaatgtcgacacaacggaaggatatgtggaagttgctttacaaccacgtaaaccggaacgtaagcaacttttccggcgtgtacagcgttatagaagacatattgtgccaggagccgagtctgataagctgttcgttggtgcgggagctgcacaacaaattccaggacacattcctactctggctgctcaacaagctggccaagtgccttagtgaatctccagatagcaggtaagatgagccacaagcattggactccaaacttatgacacaccgtttttctgctgcagcgagtgcatcaatcttcaaaggaaaatactgagctcctgctgttccaatcatcctaagctttttgaacgccttgtactggcctatgtggaagccattgaggagacgcaccttcagctaagttccctggacctcggccaattgagtaatgagcgaaaacccgccataactgtaagaatattccgatgcgatgtggaatgcctgcaggagttcgatccgcactgcgctatcgaggacatcaaggtgccccttgagcaagccgacatgtatgccaagagcctgctggaggtcctccagcatgcccatcacattggatacgccacgcacggcgacatcttctcgggcagccttcatcaggctctg

SEQ ID NO: 21209 - DNA, 2247 bp, DROSOPHILA
atcaaaataagaaaaatatttttatgttattgtaaataagtttttgagaaaaaatggaagtggaatacgacgactctggttggcagggccgcgccaaaggacaaaccaatccggaggaaacgcttgaggacaatccgcagaagacgatacaggaatgcctggagaagttcctcacaccggactacatcatggagccggggatatttacgcagctgaagcgctactttcagtcgggcggatctccggaggaggttatatcgatgctatccgagaactacaaggcggtggcccagatggccaacctgcttgcggaatggctcatcctggcgggcgtcaaggttaccgaagtccaggccatggtggagaatcatctcaaggaaatgattcttaagtccttcgatcccaagaaggcggacaccatattcacggaggagggtgagacgcccgactggctaaccgagatgatcgaccactatacgtggcgctcgctaatctaccgactggccgaagaatatcccgattgtctaatgctgaactttacaatcaagttgatctcggacgcgggcttccagagcgagatcacttccatttcgacagcggcacagcagattgaggttttctcgcgggttctaaagacctcgatcgtcaaatttctaaacaatccggatgatgtgcacggtgccattcaggagtgcgcacgaatggtctgccatggccagcacacttacgtatactcccaggtgctcatccaggtcctcagccaggagcagaagggtgggttcaacatgaagcggctctctcaggaaattattaaatacgccctgcagaacaatcaaaatgtaacgcctattacaatggccctgaatggttcggcagtctatccgcaagcatgtcaagccctaacttccatgctcacccgcaatacactgaatcccgccgatatcaccgtgctgtttcgcaactactccggttccgatccaccgcccatcgacttgatacgaaacccccagtttctggagctactggtagacgcgctctttcgttccggcgttaaaatcaatcccgagcacaaaccgaagtatatgtttctgctagcctacgcgtccgcggtcatcgaccagccggccaaaaagcgaccaatgactgagcgcatgctaaacaaggaggagctaaagagcaccattcaggctatcgaaaaggcacacaccatttgtaatgtggaccagggatccaccgagctaatcgccgagttgcaaacgctgtataattgcatcaaatatcctgtggtgggagttggtgtcattcggtggatcgaaaacgttgttatggagccttcatatttcaagctctccacagacagctgtcccacgcacttggcggtactggatgaagtggccgccgttcatcccaccttgcagcagcagatcctcttcctgctcatccgcttatttgagtccaagcaggatgagctggagattctcgttcaattggaaatgaagaaaatgatcctggaccgaatggttaacctgctgacgcgcggctgcgttgtacccgttctcagatacataaagcagtgctgcgccatcgaggacacagacatttcgctaatacgatactttgtcaccgaggtgctggagactatcacacatccctactcgccggagttcgtgcagctgttcctgccgatggtggagaacgaggagatcaccggtacaatgcgcggcgagggcgacaacgatcccgtgtccgaatttattgttcactgcaaggcgcattacacgactgtatagattgtgacaatagaacgtgctttacaggcgacttccattcaaagacgacctcaattaagcccaatttaaataacattctttttgagtaaacaatttttttaaatataatctcttaagaaaagtaccctattcttctattaggaaagaaaaattaaaaaaaaaatccacaatgtatctatctaaatttaattataagcatttttgccgctaaaatttcactaggctttgaaaaatgttgtaagttctttatcattttattatattccttacgcatttgagctttcattgttttaacatttatacaaaagcatttaattcaacattgtgaactaacatacctacattattaagctttcagaaataacaatatgttcgaatccataaacaattgtatagattgtaaatgtataaacatatactactgattgatacgttataacgaaatatattgcagaat

SEQ ID NO: 21210 - protein, 578 aa, DROSOPHILA
MEVEYDDSGWQGRAKGQTNPEETLEDNPQKTIQECLEKFLTPDYIMEPGIFTQLKRYFQSGGSPEEVISMLSENYKAVAQMANLLAEWLILAGVKVTEVQAMVENHLKEMILKSFDPKKADTIFTEEGETPDWLTEMIDHYTWRSLIYRLAEEYPDCLMLNFTIKLISDAGFQSEITSISTAAQQIEVFSRVLKTSIVKFLNNPDDVHGAIQECARMVCHGQHTYVYSQVLIQVLSQEQKGGFNMKRLSQEIIKYALQNNQNVTPITMALNGSAVYPQACQALTSMLTRNTLNPADITVLFRNYSGSDPPPIDLIRNPQFLELLVDALFRSGVKINPEHKPKYMFLLAYASAVIDQPAKKRPMTERMLNKEELKSTIQAIEKAHTICNVDQGSTELIAELQTLYNCIKYPVVGVGVIRWIENVVMEPSYFKLSTDSCPTHLAVLDEVAAVHPTLQQQILFLLIRLFESKQDELEILVQLEMKKMILDRMVNLLTRGCVVPVLRYIKQCCAIEDTDISLIRYFVTEVLETITHPYSPEFVQLFLPMVENEEITGTMRGEGDNDPVSEFIVHCKAHYTTV

SEQ ID NO: 21211 - DNA, 3754 bp, DROSOPHILA
tctgacgaaagaacaaaaagtatatagctaagccaaagcctcgtagttttctatatttctgtagcagcatcagcaaaaggatctcgatcagaatgagagtgtattgcagaggtaacaaggtgcagcaagtctgaccaggtccaaaagccagccaagaatatgtactttactatagcatttgttgtgggcgggccattaacgtcgttcgagagttctcctttcactcgcttaacaggaatcattttccccttttatttgatttgccccccgcctgctgtaccatgtcatttacaaccatgtatattattgtaatttctgttgccagttggctgcgaaaagtatgcgaagcgctgaaagactgccgccgcgctactgaatgcagccacggaaggtgcccgcgtttgctagcaactccggtcgctgggtttcggttccctctgggtaagtaatcctccgcagatcccaaatccggaaaaagttgtaactttcaggtggtctgaatcggctcgtcgcacctgaggatggaatggatgttgaacggtttcccctctgcaccatcgtaaatatacgacttttatttattacttcattttattttcattattactatctttgaataaagaaatttcagaataccaaacaaaatgattttcgtttcattttgaattaaaatttcaccagtgggggaaaataacggtatttgaacaataatggcgttgcgaatgtaacgtgattggcgtaaaatcgcaaattccgttttatatagttgaatgattttcaaagcattcattttgttgcatttaatgttaaattttaattagtccactgaaaataataaatcatgataaatgagcactgtgtctgtcactttgttgttggtttgagtcttctctaagtggtgaataagttttctgcgatatatttaagcggtcgcaatacggtcatactaattgcatttcttttaggcagggggcgttaacttgcgaattaatgactataactaactaaaacaccgactaaggacctctgaaatggactctactgccactcgcacgctgccctttgtgtacaagtataaaaatcataaaggccaagactgcgaatcccggctggacatcacttttccctttgaccaggaaaatctggaggagtgtatcacccagctgatggctcccaaccagatggaccctatgatgcggtacctggacgagaatatcagtgagtatcagtatgtgcggatggagtaccagctttagtcttgctattccaattagaactcgaacgggagctgcagaaattcgtggatacggagcagcaaaatttcctggacgaccaagccgaaaagctactcaaacaggcggccaacgaggagatggacatcgaggccattgtgcgggacacagagaggctgtacaaggaggaactactgcaatttgccgatcgtgtgggtcccagcgatgctgacatattcgcccagagcttccatcgcctggtgcactcttcgtccctggaggacatactcaagcgagagcgtgcatatgccaaggtggtgtccgacatgaccgatcttatggacagcgaggtggagacgttgaacaactctcagcagcaggaaatggatagccagataaatcagttggacatcaccaccacctcggaggatatcaacaatctgctggcgcagcagtacaccacgcagaattatgtgcggaagcgatacgaatccgaactagaagcaatgatgggtcatcagaagaatgagtatcgaaattggatcaccagtcaggtcagtcagatgtttcaagtgtcgccggtggccacgccgctgggtaaccgctcctccatgttcgtctcgcaacagccctccatggaggagagcttcaccattcacctgggctcccagctgaagcacatgcacaacatacgcatcctgagtgccaatgtcacggagctctgcagtccgctgcacgccgaggagagtcttaatggccttaacatggctctgggattgtactccagttccctctgcggcgtcgtcgtgctgaccccatcgattcaggcccaggccaacaagaatatcattaaaaatgccaacaagtccaccgagtttcattttgagcaaatagacgttcagatggaaaagatcgagaagcagattaagaatttgaccactgaagattccagtggcagtagtactagcaacagcagtgccgagggcagtggcacaccctcgccgaccaagaagagcgtgcccagactgaaaacaggcgacttcttcatcaccaagcactcgaatctctcgcaaacgcatgttatttttcacctgatttcggacgaacccatcaacagtcccagtgagatcaactcgcggcatccagtgatcttgggtttgcgaaacatcctaaagacagccagcaggcacgacatcaccacgctgaccattccggctctgctgcgtcacgagatgagcgaggacatgaccgtccagtggtgcatcagaagagcagagctggtgtttaagtgcgccaaggggtttatgatagaatctgcatcttggggcggagctgagttaaggtggctattgaggttttgcaacgtgtgaacgtttttgctaattgtttttccaatttcagcaccttgcaactgctactgcctgatgacatatcggaaagtttgttcaccactctggcgggaatggttcccagcgtttttcacgtggccaatcccaagatacttgtggacaccagcaagtaggccgcgaaaacattcctcaaacttcactttgcaaatagactttaaattatttgtatgaatatacagttttattcagattcagagttatatatgtatgtatatgcttcgttattcgtcgcttcgctcaaaaagttgtttaaacttcaacacactcagaattttctgtaaatgttcctgtatcaatttttgtcaataattcatcgcaaccttttcaaaactacaacactacaatgtataagtacatattctcatatatatagttatattttaggcataggtatcatgtgtgtatattacttccaaatgtaaatgtttatctttggtttcgaacccccatgcatttcgtgttgtgtgtgtatctctgtggattgtattttagtctgttcggttatctattacgattataataatgatactttgaataactctgaccattaacttgtaaatatgcttttgaaatatatatttatgtatatctaaacaattgtattctgcggtatgttataggtttgttaacaataattcggttttttctgttcattaacatttcgctgttcaactatgcttcgttttattctttttggatttagcccagtgcgttgtttgttgtgtctgtgatttgctgctttgcagtgggagtagagtttcagaaaatatttaattaatgcttcagttgtttatgtgtatttgattggtttgtccggcttaagggttacataaaattagtgacaagtgttaaggtacaggaacggaccgctttgagtttttaggtgcgagcaatataatacacatatatcgtatctctgggatctttcttgtgcctttaaaagcacaaagtgggagtggataatcggtttttggtactttggaaactggttttaaagaattgacataaacagcgtaattaattggtaaagtagctcgtataaataaattacgtttctatagccgattgccaataaatgcgcattggagtagtatggccttcagagcacgatcc

SEQ ID NO: 21212 - DNA, 1639 bp, DROSOPHILA
ctaactaaaacaccgactaaggacctctgaaatggactctactgccactcgcacgctgccctttgtgtacaagtataaaaatcataaaggccaagactgcgaatcccggctggacatcacttttccctttgaccaggaaaatctggaggagtgtatcacccagctgatggctcccaaccagatggaccctatgatgcggtacctggacgagaatatcaaactcgaacgggagctgcagaaattcgtggatacggagcagcaaaatttcctggacgaccaagccgaaaagctactcaaacaggcggccaacgaggagatggacatcgaggccattgtgcgggacacagagaggctgtacaaggaggaactactgcaatttgccgatcgtgtgggtcccagcgatgctgacatattcgcccagagcttccatcgcctggtgcactcttcgtccctggaggacatactcaagcgagagcgtgcatatgccaaggtggtgtccgacatgaccgatcttatggacagcgaggtggagacgttgaacaactctcagcagcaggaaatggatagccagataaatcagttggacatcaccaccacctcggaggatatcaacaatctgctggcgcagcagtacaccacgcagaattatgtgcggaagcgatacgaatccgaactagaagcaatgatgggtcatcagaagaatgagtatcgaaattggatcaccagtcaggtcagtcagatgtttcaagtgtcgccggtggccacgccgctgggtaaccgctcctccatgttcgtctcgcaacagccctccatggaggagagcttcaccattcacctgggctcccagctgaagcacatgcacaacatacgcatcctgagtgccaatgtcacggagctctgcagtccgctgcacgccgaggagagtcttaatggccttaacatggctctgggattgtactccagttccctctgcggcgtcgtcgtgctgaccccatcgattcaggcccaggccaacaagaatatcattaaaaatgccaacaagtccaccgagtttcattttgagcaaatagacgttcagatggaaaagatcgagaagcagattaagaatttgaccactgaagattccagtggcagtagtactagcaacagcagtgccgagggcagtggcacaccctcgccgaccaagaagagcgtgcccagactgaaaacaggcgacttcttcatcaccaagcactcgaatctctcgcaaacgcatgttatttttcacctgatttcggacgaacccatcaacagtcccagtgagatcaactcgcggcatccagtgatcttgggtttgcgaaacatcctaaagacagccagcaggcacgacatcaccacgctgaccattccggctctgctgcgtcacgagatgagcgaggacatgaccgtccagtggtgcatcagaagagcagagctggtgtttaagtgcgccaaggggtttatgatagaatctgcatcttggggcggagctgagttaagcaccttgcaactgctactgcctgatgacatatcggaaagtttgttcaccactctggcgggaatggttcccagcgtttttcacgtggccaatcccaagatacttgtggacaccagcaagtag

SEQ ID NO: 21213 - protein, 535 aa, DROSOPHILA
MDSTATRTLPFVYKYKNHKGQDCESRLDITFPFDQENLEECITQLMAPNQMDPMMRYLDENIKLERELQKFVDTEQQNFLDDQAEKLLKQAANEEMDIEAIVRDTERLYKEELLQFADRVGPSDADIFAQSFHRLVHSSSLEDILKRERAYAKVVSDMTDLMDSEVETLNNSQQQEMDSQINQLDITTTSEDINNLLAQQYTTQNYVRKRYESELEAMMGHQKNEYRNWITSQVSQMFQVSPVATPLGNRSSMFVSQQPSMEESFTIHLGSQLKHMHNIRILSANVTELCSPLHAEESLNGLNMALGLYSSSLCGVVVLTPSIQAQANKNIIKNANKSTEFHFEQIDVQMEKIEKQIKNLTTEDSSGSSTSNSSAEGSGTPSPTKKSVPRLKTGDFFITKHSNLSQTHVIFHLISDEPINSPSEINSRHPVILGLRNILKTASRHDITTLTIPALLRHEMSEDMTVQWCIRRAELVFKCAKGFMIESASWGGAELSTLQLLLPDDISESLFTTLAGMVPSVFHVANPKILVDTSK

SEQ ID NO: 21214 - DNA, 4487 bp, DROSOPHILA
attctagcagtgattgtaaaaatttgtacagaagcatatcgcttaaatcacagagttctttgaaagcgtagtaaagatagtgtaaaatataaaatatattcgcttgtagttgaccgaatgtcgtatggtgatggtgtcgccatctaggagttattttttttgtttaagatgtgggggcccgaatcttatcatagattcccgtcagctttatctgccgatccacactcgatcagcttggtgttaccgtctgttgtatggcgtcacatccaggcgacatagaagtgcataggatgcacagcagcagccgccgtcttaggaataacggagtaatgatatactagattcgttgaaaactaagtaacactacataatccgactatataatcttttataatttctatcggcttgataaaaaaaaacttttcataatttccatcggtttgataaaaaaaacttcttgccactctaacaccaaaaacctcccatttttctcattatatgtagtctccaatatctatcgatatgccagaaaaataatgaaatgtagcgttcttactttcactggcagcattcaccaattaataaattaacgtttccgtaccttaaaagttgttttaaaaaattgaaacatatttaatttccttaacggtatagcgataagagaatataacggctctcttaatggcaagacattccggatggtctgaacagtttgtgtgtagctatcgttggctgctaaacagtcatgataaccctattaaaaccaattcataaatggctctgcttctgcctaattgcaataatcgtaattctcggcatcaaaacccaaaatgcaaatactaagcccagagtttcagaagtcacaggatcggatgacacaaattccgacattcctcctgctgaagaagatcgaaatgtacaggatgtagtccggcccgcatattttgtggagtccgccaagtgcaagatcccgtatgttgatcccttcgcctcagatgcaatggccattttccaccccgagcattttgagacctgctcaaacgaaaccgccctggttactccgatctatgacatcagtcggcagcgatatgtactcttcatcaatgagtcgttagcctccattattctcaactccaatgggggggagtacaattgctattatcaggagataacgcgggaccgtaagcacgacagttatgataagtaatatcttgcttgatttgttgcttagaaccaactccctattaatttcatacttttcaggatggagcgaaaatacttctctcagaactacgaggtgccgctccatgttgagggcctgatcttgacctgccatcgtcttggcaacgagtcggatattttgcagagcgatgcgtataacctcattcaatacaggccaccacccaaaggactctcgctgaaaccgtccaagaggaagccaagtgtccttatgttcggcatagacagcctttcgcggatcaatttgcgtagaactatgccgaaggtctataagttcctaacgagggacgggtggttcgagcagcaaggatacaataaggtgggtaaagaaagcgggatttataaacgaggactaaatattttatcatgtgcagataggcgacaacaccttccccaatctgttggccattttgacaggctacaatccagagtcggccattaagaaggtgtgcaactggcacgaggatgggtgcctagataggaccccttttatatggcactacttccggaatgccagctatctcacagcctatgctgaggatgaggcaggcattaatacattcaactattggaaaccgggtttcctggagcagcccaccgacttctacttaaggcccttgcagaaggccattgaatcgggcctgaacacctggaaatgcagtgactgctcgatgaagtactgtatcggccggcggatcacgagcagttatgcctacgacatggccagaaattttgccaaccgtttcgtggatgagcgacccatttggggtctgttctggtcaaacagtttcagccacgacagcttccaaatgccctcgaaaatggaggactatgtgcttcagtacctgctggacttcgaggccgatggtgtgttcgatcagagtattatggtgttcctctcggatcatggctcacgctatggcagactcatgtccctgccgagtggattcctggaagagcgtcttccctcgatgtttatctatttgccgccttggttccgggctcagtatccggaatacgccagggcccttgagctgaatcggaatcggcttacatccaactacgatctgcacaacaccctgaaacacatcatcgaactgggcggcactccagatggtcaaacattgcccaaagcggccgactgtcccaagtgccaatcccttttttatcccgtcgatgagacaaggtcgtgtgaggatgccggaataccggagcacttctgcacctgtgtgccttacaaaagactggatacgcaatgggcaaagagcattgcccccaaggtgatcggtcgaatcaacgagtatctggccggcaggaatctgagtaagatttgttctgaactcacgctcagctatattcacctgacagaaatgaaagtcgagctagaccagaacttccacgacgatgtgcctcgtgcggagttaggcacctatcgcaccatgttcaaggtgaagcagaactccgccgacttccgggccaccgttatcttcaataatgttacagattccgtggaggtggaggtgcctactattagtcggctcgacagctatgaaaatgtttcaacatgtgtaaaagataaaaccgacaagatgtattgtatttgcaagtgtgatatcaaagatgattagaatgttgtacagatatttaaatattttattgtttttattgcctcccttacttgaataataagttaaatgattacataattagggatatcttttttttaatcatgttactcggtgaaacaagatctacgatatttgataagtttccctatagataagacaaggtattcaaatttcagactacttggctatattgatttttattatcaacaaatttcatagagttccgacatgcaattatatttcttaacttttgtgaaaaacatttggtgttatattccttgttagtagggggtcgctgttctctttattgtctgataaacatatgtaagttataattataaattaattgtaaattaactctgagaatgctcgatatcggattgagtagtttttcttattagtttcgaatcgaaataacagttcttgttttgtttgcagtagctagaactgaaggtaatctcaacttatgattgcatctataaaatttacttgcagaaacacagatacagatactgcagcgcgatcttcttcacagtcgccgcttccagatggaactggtgatcgagattagacctgaccaatcaaaagtgctcatgctagagcttttcctatatatctagctctaaataatccagacattcatcaaggcgcctcgcaggtcatcggtgataagcggcatgggtaccttgccgtgagctttttctaggctcaaagggcggatggaaaggtggaagccatccgagctcacctctctttccgctcctttcagtcggacttatctgcgcttatcatcgcgtgggttgtttacctgcacaagcgcacgtttaataacaaaggagtcgcccttcttttcccagcgagctttcagctgcatccaatgaactttatgtggcttgcattttgtcagcagcactcataaaaacctatctaaaattgaatctaaggtgcagtagagaataataagattccgcacttgaaaccgttcgtcggggcaatcattaagcagggtttcatcatgtgatggggttgagcttacgtgactcagttgaaaaatgttgaggtcctggtaaattcaaaattgaaagcaaatatctctcttaagtgacaaaaagtcactgcaatacattaaagcgccgctttgttttgcagatatatatttattgtcctgccgcgtggatttaaagggccaaaggcagccagtggtctttggcatcgcattgggaatggcctgctgaagttgccggcggcattgcggttcgtaaagatcctattggtgtcctcgatcattgctctggagagcggacagtccgcctgggacaggagcactgcaatgagcattatttggtgcattacggaaggattccttattgatatgaatttcatttagaatcaccaggttataagtggtttatatacatatatgttttcttacccaatccgagtccaatagctacgattagaagtagttgttgcacttccatcgtgcttgttgatcaatgagttgagcaactggtgcttatataccgtttagaccggcttttctggcctggccctttgttctggacaggctcgtgggcacgtgtctgcattcagacaacagactatttttggccatgggca

SEQ ID NO: 21215 - DNA, 1856 bp, DROSOPHILA
atggccattttccaccccgagcattttgagacctgctcaaacgaaaccgccctggttactccgatctatgacatcagtcggcagcgatatgtactcttcatcaatgagtcgttagcctccattattctcaactccaatgggggggagtacaattgctattatcaggagataacgcgggaccgtaagcacgacagttatgataagatggagcgaaaatacttctctcagaactacgaggtgccgctccatgttgagggcctgatcttgacctgccatcgtcttggcaacgagtcggatattttgcagagcgatgcgtataacctcattcaatacaggccaccacccaaaggactctcgctgaaaccgtccaagaggaagccaagtgtccttatgttcggcatagacagcctttcgcggatcaatttgcgtagaactatgccgaaggtctataagttcctaacgagggacgggtggttcgagcagcaaggatacaataagataggcgacaacaccttccccaatctgttggccattttgacaggctacaatccagagtcggccattaagaaggtgtgcaactggcacgaggatgggtgcctagataggaccccttttatatggcactacttccggaatgccagctatctcacagcctatgctgaggatgaggcaggcattaatacattcaactattggaaaccgggtttcctggagcagcccaccgacttctacttaaggcccttgcagaaggccattgaatcgggcctgaacacctggaaatgcagtgactgctcgatgaagtactgtatcggccggcggatcacgagcagttatgcctacgacatggccagaaattttgccaaccgtttcgtggatgagcgacccatttggggtctgttctggtcaaacagtttcagccacgacagcttccaaatgccctcgaaaatggaggactatgtgcttcagtacctgctggacttcgaggccgatggtgtgttcgatcagagtattatggtgttcctctcggatcatggctcacgctatggcagactcatgtccctgccgagtggattcctggaagagcgtcttccctcgatgtttatctatttgccgccttggttccgggctcagtatccggaatacgccagggcccttgagctgaatcggaatcggcttacatccaactacgatctgcacaacaccctgaaacacatcatcgaactgggcggcactccagatggtcaaacattgcccaaagcggccgactgtcccaagtgccaatcccttttttatcccgtcgatgagacaaggtcgtgtgaggatgccggaataccggagcacttctgcacctgtgtgccttacaaaagactggatacgcaatgggcaaagagcattgcccccaaggtgatcggtcgaatcaacgagtatctggccggcaggaatctgagtaagatttgttctgaactcacgctcagctatattcacctgacagaaatgaaagtcgagctagaccagaacttccacgacgatgtgcctcgtgcggagttaggcacctatcgcaccatgttcaaggtgaagcagaactccgccgacttccgggccaccgttatcttcaataatgttacagattccgtggaggtggaggtgcctactattagtcggctcgacagctatgaaaatgtttcaacatgtgtaaaagataaaaccgacaagatgtattgtatttgcaagaaacacagatacagatactgcagcgcgatcttcttcacagtcgccgcttccagatggaactggtgatcgagattagacctgaccaatcaaaagtgctcatgctagagcttttcctatatatctag

SEQ ID NO: 21216 - protein, 598 aa, DROSOPHILA
MAIFHPEHFETCSNETALVTPIYDISRQRYVLFINESLASIILNSNGGEYNCYYQEITRDRKHDSYDKMERKYFSQNYEVPLHVEGLILTCHRLGNESDILQSDAYNLIQYRPPPKGLSLKPSKRKPSVLMFGIDSLSRINLRRTMPKVYKFLTRDGWFEQQGYNKIGDNTFPNLLAILTGYNPESAIKKVCNWHEDGCLDRTPFIWHYFRNASYLTAYAEDEAGINTFNYWKPGFLEQPTDFYLRPLQKAIESGLNTWKCSDCSMKYCIGRRITSSYAYDMARNFANRFVDERPIWGLFWSNSFSHDSFQMPSKMEDYVLQYLLDFEADGVFDQSIMVFLSDHGSRYGRLMSLPSGFLEERLPSMFIYLPPWFRAQYPEYARALELNRNRLTSNYDLHNTLKHIIELGGTPDGQTLPKAADCPKCQSLFYPVDETRSCEDAGIPEHFCTCVPYKRLDTQWAKSIAPKVIGRINEYLAGRNLSKICSELTLSYIHLTEMKVELDQNFHDDVPRAELGTYRTMFKVKQNSADFRATVIFNNVTDSVEVEVPTISRLDSYENVSTCVKDKTDKMYCICKKHRYRYCSAIFFTVAASRWNW

SEQ ID NO: 21217 - DNA, 3219 bp, DROSOPHILA
taagttagttcttataataccctaagcttatttactcgctaattgcaactattttattacaaaatccagagtcagatcggccgccaacagtgttcgataaggatgggatcataactcctgcagatgaggctacctttcagatgaatagtatctacaatcgatttgagtatctttttggatctggacaaacatatgtgccttcttccagaagtctttcctttgatcgtggtcaccttacaccggttgccgactacagcttcccaaaaatcctaagacaaaccaacaagtacttgaatgtcgttccccagtactacaatattaatcgcagcaattggaagatagttgagaattgggttcgaggacaaaaggatgtgctaaatgtctgcacaggggcattgggtgttcttgatttgttgaacagaagccaaaaatctgtttcgatttacctagcaccgaacaaaaatcccgttcccagatggacatacaaaatcattaggagcctaaccaccggcatcaagtacgtgatattgacctccaacaatgggtgggaaacccaacaaccaaacccagcatcagtctgcaaagttactgcctgccccagaactttgaatccaaccggaactggatacaccttctgctgtgatccaattgactttatcagaagaaacgttcctaatttggcaggtgtgtgctgggataataccgaaaatgtgtagaggtttctatttatcttcagtgtataaacatattaatgcatttcaacttcattgaaaaaaataaatgcatctttggaaatacatcggttccaagctgattgaccgactaataggttattaatcagcgatggcttatcattgggccgcgttgaggaatcttgggattttctgaattaaagagataagaataatgacgaatacgatgctgataagaaatgcgtttggcttgaccgcgctctgaacgtttcagaattcttagttcgtaaatcaaccttaagctgtgaagatgcccgatctgaagtatatgttgacgattctaagcctgtatttctgtgagtatatatagaataagctttattgttatcagaggttcaactgatcttaagttgtaggaagtgttcaagcgaattgcttaatcgacttggctcatttgaatgccaattatgtgtacttaagccaaaataacggagtctatgatattcagcgcagtgatattgtggaaatccaccagacgttgtatctgctgtgcaatggaggacttcatcgcaccacattcctgtgtcgatatgacagtgttttcagtccagcgctaagctcagcagcatgtgcaccacccgatcctgtcgtggtaaaagtaccagatacatcttgttccattccgagtgctacgttcgccgtaggattttccttcaatggacgctttatggaactgtatcgcaattgttttgatggctacagcttggcgtttcaacattccatctacaaggcttatcgctacgtaaacagtaagtggaaaatattggtgcaaaaacagtagttaacctggtactattagccgttccacgtcccaatcccacttggcagtcggatcaattaagtggtggatttgacaatgcctacgagggaagagcaacacaagcttgtttgctcactaacctgggcgcagtacagccgcagtgtaaatttgatcgtggccacatgacaccggcttctgcatttatatccacagagctgaagaagtcaacgttcaggtatctaaacgctatcccccaatatcgaggagttaatcgtggcaaatggaaggccgttgagacctgggtgaacaatatggttaggggactgtatgataatccaatcatcaataatgtacaaataccgcgtacttacgatgtccttaaggtttgcattggggcattgggagtgcatagactaagacataataccaataacaatatgataccaatttacctgttggataataacaaaattcccgtgccagagtggatgtacaagatagttagccatctctccggagataaatgggtaatgctgacctacaacgacgtaagtctacccaatcagcaggcattaaaccagatctgccatgtgataccctgtcatccgggtcttaaccttaatacgaaggacgttggacacactgtctgctgcgatccgtaccgttttattaccataaacgctccacacttaactggtgtttgctaaggtcaaactaaatattttcttagatcttgaaaatgtgcatattaaaataaatataaagtggtatttgaaaacattgttgatttgtacatcattttcgctttattatgacggcttatcagtaacctgcaacaaaccgcgaagaaaattggaattctcagaattgctgcgataaggaaactgtatgcaattaatttaattttgcagggcaatgaccagaacacattgaatatagaatgaacagaggggtttaaaaagaacctacctcaacccggaaacattgtctgccacagtgattgcatactataactttttatggtgctcaacaattgctttatttaatacattcaccactctttgttacgctataatatcttcggtacatgttttagttttgtcattttccgtctagatgtcgcacgcgtgcggttttgaattctcaatagtgggcgccaaaaagcatcgactagcgccatctattaacaaaagtacatatagaaagagaaaggaataagagcgactgaataagcagcaaacggagagcgagacaaatataggcgtcaagtgcgcaaaattcaaacaggggaatttatttttaatttaaaaatataagttattttcgttgacttagactagaaaatttgtatgattacttaaatatttttaggtatttagaataaagagatcctataattttaaactatatttgtaataatagtaatagtaattgttaattgtactttaaattataagccattaagtattttccaatttaactattatttcttagcacttcatttacaccttaagccatttgaggttgcttacaaataagagcattaaatgcacttttaagtggccataaactatggtgtcgtttggacggaattccacttccgatgcatacaaccaactaccacagataattgttgcttttggccaatttacttattggcttactctacatacttcgctggtggacgttgaccatgtttgaaattta

SEQ ID NO: 21218 - DNA, 1115 bp, DROSOPHILA
agatgcccgatctgaagtatatgttgacgattctaagcctgtatttctttgtaggaagtgttcaagcgaattgcttaatcgacttggctcatttgaatgccaattatgtgtacttaagccaaaataacggagtctatgatattcagcgcagtgatattgtggaaatccaccagacgttgtatctgctgtgcaatggaggacttcatcgcaccacattcctgtgtcgatatgacagtgttttcagtccagcgctaagctcagcagcatgtgcaccacccgatcctgtcgtggtaaaagtaccagatacatcttgttccattccgagtgctacgttcgccgtaggattttccttcaatggacgctttatggaactgtatcgcaattgttttgatggctacagcttggcgtttcaacattccatctacaaggcttatcgctacgtaaacaccgttccacgtcccaatcccacttggcagtcggatcaattaagtggtggatttgacaatgcctacgagggaagagcaacacaagcttgtttgctcactaacctgggcgcagtacagccgcagtgtaaatttgatcgtggccacatgacaccggcttctgcatttatatccacagagctgaagaagtcaacgttcaggtatctaaacgctatcccccaatatcgaggagttaatcgtggcaaatggaaggccgttgagacctgggtgaacaatatggttaggggactgtatgataatccaatcatcaataatgtacaaataccgcgtacttacgatgtccttaaggtttgcattggggcattgggagtgcatagactaagacataataccaataacaatatgataccaatttacctgttggataataacaaaattcccgtgccagagtggatgtacaagatagttagccatctctccggagataaatgggtaatgctgacctacaacgacgtaagtctacccaatcagcaggcattaaaccagatctgccatgtgataccctgtcatccgggtcttaaccttaatacgaaggacgttggacacactgtctgctgcgatccgtaccgttttattaccataaacgctccacacttaactggtgtttgctaa

SEQ ID NO: 21219 - protein, 370 aa, DROSOPHILA
MPDLKYMLTILSLYFFVGSVQANCLIDLAHLNANYVYLSQNNGVYDIQRSDIVEIHQTLYLLCNGGLHRTTFLCRYDSVFSPALSSAACAPPDPVVVKVPDTSCSIPSATFAVGFSFNGRFMELYRNCFDGYSLAFQHSIYKAYRYVNTVPRPNPTWQSDQLSGGFDNAYEGRATQACLLTNLGAVQPQCKFDRGHMTPASAFISTELKKSTFRYLNAIPQYRGVNRGKWKAVETWVNNMVRGLYDNPIINNVQIPRTYDVLKVCIGALGVHRLRHNTNNNMIPIYLLDNNKIPVPEWMYKIVSHLSGDKWVMLTYNDVSLPNQQALNQICHVIPCHPGLNLNTKDVGHTVCCDPYRFITINAPHLTGVC

SEQ ID NO: 21220 - DNA, 21890 bp, DROSOPHILA
ggaactcttaacggtatcgtgtaatgacttaattaaggcgcaacaagtgccgtgaaaaatggttaaatgaagcccagtgggcgtagccgaagctagtcgaaaatgtgattttcaaacggctaattttaagctcattttcaaagatttgttgattaatgtgctataagtgcttcaatgaggaagtagtgtgggtaatggaaatagaatggaatagattgatactctggaaaaaagaaatatattatttatattatttacactcccactgaaccaaaaaaatgtcatctttaaatcaagaatataaaatgttaaatgtatattactgtttatactgtatactatacaccagttatttatttaattatctgcacagcttttctaactaattacctttgctataatttaacaaatttacattccctcaacaagttcgttggctcggtatgttcgatttttgatatttcactgctccatgtgcatgactaaagccatgcatgtttatctatgtgaacaaactatatcaacatcgtataaaaaacaatctctctcttcctttctctctctctggcccacgatctcaggtctctttttttaacatcaactctcggcaactctctcgttttgcagcttttgccgcatttcggcagctcttgcgcctgatgcgcgcgtcttggggtttcagtttcgttcacgactccggcgcgtttggcagcagcagtataaatcggcagcaaagctatagctacagcatatatagctacaagaaaacgatatcactttgtgctcttttattacgtgtaccttatacgaaagaagcgttagttataaatcaaattacgtattttacttgcgctctttttttaaagcacgctgttgtcgccgcgccctcacgattgtcgttcgagtccacgttttgagtttgaaaaccagaaaacagctgttacaagacaaagcaaaccgctaaaggcaaaaaaaaaaaaaaacgctcgctcactcgcgcctaatatgaagtcttagttcgctgcctaagtcttttgttttgtgcggaggcgcacgcgaatttcagtgtgagaaacagttcggtgtgtgtgcagaaacaaatcgaaataaacaagactatttactggcagctgcggaaggcaaaccagttgtgcaactgctattcgcaacatccattgaatcacattgcccagtgaccagtgcatccctttcggaaacggcaaaatggcgccgaagaaagaggcaaccttgagccagcagcagacgcagcagcccatcatggacctggaaaggataaagcgtcacttcagctggtcggaccccagtgccatgtgagtcacagccattacagatggcttaacaggtcccttaatggtccataaactagtcgttaagtcgagagacgtcgtcgaaacggaactgaaccatctaccgatcatcatctgaagttcgttgccgaagtcatccgatttttccacaagcgataacaacaaatagtggtttgcttcgaggtcgccgctcaagaactttgtgtcttcgttacgtttcgatcgaatagatttgtgttttttattgcaaaagctaaagtttaacaatacacattgaataacagccgggcacgtgtttcaagtcatttatttttggaacgccgaattgaaaaacatattaatctgttcgatatgccaatgaatgaatattcaaatgagtcgactgaaagaaatcgcatatgatcacattcattactggtcgagctgtgaagtacaatatttatttcggatccaaacgtgaatgacacctcgatagccaccctcgacatcgaggagttcgatgcattgcacaaggcttacatgatggtggctgggtgaaatgcaagtttagacaactgatcattatcggagtcagagtcaggaatcagtaagcccagcttgtcgccgccgcgcaaattcccaattttgcaattcgtaatagtctgcgcaaattccacgtcatgcttattaagcgttgggctttaattgcatttattcacatgctaagcaactttagccacttcagccactttacaaagtgacgagtgaaattcgcaattatataaatacgtagtaaggtaacaaattcgtagcaagttatggcaaactctgcgatgagcaactgaacgctaaactgaaggcttataaatagaacccagggtcgctaagctatagggcgatggtttctattgaagagactgcttagcctcgctcggcaacggctggctggctttcagcaagcacttagcatttaatttaactaattgcaaatttcaataatttccctaacaaaatccgcacaattaatggcaaacaaatgagttttcgtacaaattaacgtccatcatcgccgcaatcaacgttagcctggtgatttttgcagctgagcggattgtggcacatccggcaatcggtcgatttcgcacaatgtgtgaaaaattatttagccataatttcacacaacttcaggtacaagggaggtgtgtttcgctgcgaaagtatcggctttatatgcaaataaaattggtcattcattcctttatgctggttttcttctttggttcgccttttgaatgacataatattggcagcatatgcgatcgcatacaagggcgtagcaactgaaatacagcaattaggggtgcaactttatgatgtgaactaataagtaccctactaagaactttgttttgataaaatctatatattaatatggactttatataatagcccccatttttcatgccaacgcccatgtatgtaccacattttatgtcaaacataatcatatcattagcatccgaatgcggctttaggtcgggtctataaccgccgtatcgatggttgaaatgagattgtttgttgcctttggcggtgtttctcttgtgctggccttcattatacaacatccaccttacaatcagctacgtcacttccgcatgaactagttcagttgtgagtggcatcgaagtattgggaaattactccgatttctgtctgccttttttgtctgtcaacatgttttacttatatctgtcgctcctggcgtgccgttaattgttgttatggacgattatgggtgatgatttgcaacccaagcacgccctcgtacagacgaagccgttcaaaacagttttagcacgcgctaaaattaaaattctaatggctgaaatgtgcaattggaattctgaaaaccataagcaatatatgagagctgcctgctcatctgcgcagtaattctatagttcaattaaaataattttatatcgcctacttaagttattggttacaccaaatttagaatactttatgaagtatgtataatctatattcatttgtatacaatatacatttgtaagatcctgcacggaacattttaagataggtttttaaacgtaaagcctgaaatgtgttacacagtgtaaaaagctttgatatgagctttgatgaattttactttgaacttggcttagctcccaaaagcccgcttatacataagctttttattgaattcactgtcgtagcaaaatgatataaaactaaagctcaatctcaaaagctttaacgtaatttaagattgtcagcgctgtctcatttattagataagccgagacaaaaaacctaagctcaataaccatttgattgctcagtcgacgattataaatactgattctgagaatgtacaggctcgttcatctccagtaataggcttcaaaggtcgttgagcaaatctattttaaactaccttttgtagaacattagtaactattttcaaacatagtaactatgttctttacgtacattttcatacagaactacgacaatgtatgttgaactttgttttgtggccattaagttatattatgcttaatttctatcccattcagtgtggagacagtcgtttggcctgtaaggccacagattttaaaggaaatcaccaagtcatcttaataataaaataaaaagagatctaaaaaagcacacgcctgtcataagaactttagaaattgaagatttatttccgcgatgtgcaagtgtcactggctttagcttttctgagtaacctaccacctttttataaaccaaagaacacagttcgaaattatacagtgcgagctaaattttaatgaatatcagccatatcacgtaggcccaatacaattgtcctgaataaagactgtcacataaatttccgcaagttcttagggcttttgtgcggcggtcttttccacgaaacaaagacgatgttattgtagttttttttggaaattttgtcaatatatttttaaagtactttcactgcaagaagccacatgcattgtcttagagcaactatttcagcgtatttgcttatggcattaacaacaatttggccagcctgctaattgccacaaaatgtggtcaaacagacaaaaaagttgcacaacgaggccaatcaacttggcaaaaatctgactcaaatgccgtgcattgtgtgccaaaaagttttcacccgataattatggatatatggatatatatcagaaaaatagagctccgtcccaaatcgctcaaccagctttcggtttccatttcatttgatttagtgtgccttgtttcttttgctcatttgctagtttacagaagaccttgacacgtttggggcgtcgtgtattattttttcatttttggtagctttgatagctttggccaaaatcttcacaaattattttagccgaagacgagtcgagccaggttttattcagcttcttctctgtgagtcgaagtgaaccaagtaattacagcaaaaccaatgggccgtttgcgtttgccatttcgtagatctttgtttatggaccggctacagcccctaattgtaattaatttatctgttacattagcagctcctttgcatgtggccactcgaaattaagccaaactagtcgagtctcagctccgagctgttgaaattgcataatatttggcaagccgcgaaagaaactactttgagtgctgaaaagcttggcagcagctggaactttccactcattttgctctgagttgcagtgagcaaaattagagaaatatcttgaatatcttagaaagatttgaacacaacaaccttataaaggttaatgaaacttaattgatatgatggctgacatggttgcttgaggtcaattgttagctatgttgaacaggaacgggaagatacagattaattactcagctccgccaaagagttacctttaagttaagcggtaaagccttcttttcagagggctttattaattcctctttcttgtattaaatctcctgtgactcacaggggattaggacacagtctgaacgagcgaacaaaaacgagtttcgagcgaaagggaaattttatcgttaagtgcaatccgttttatggacttcagtttgccgacacagtcgtctcgtggctggatgcaattaatttaaggccaggctggagcttctgcagtccgtctggaatttggcccctttgctccgccagcttcccagtaaacttcctcctctcaaaaccgacgaccttgtgcccattttcacagcagcataaaaacacagagataaaccgaaaaacggagggaaagaagaaactaaaccgaaatgaatggggactaagactgggaatggagggctataaatgtggatttcaaatgtgcacatcgcaagacaaaaggccgaaattgtaagtgaagctgtcgagtgtaatattgatgcaatggcaaaacccaaaaacgtttgtcaaccaatttctttaataactttattgcttttttcgcagttaccatttgttgttgttctcatttttccaagccgaagtcaacaaacttgttcaaggtgttgttgttgcttgcacagcatgactggccaaaaaaagaaacttccataagacaaagaaagacaaaaagccaagttagaaaattgcaagcttagttttggatttcgtcttgatggcaaaccgtgttgtctgaattatatttgtgtgggggcgttacccattagttgaaactaaaacaacagttacgaaatttgcaacttataagagcgaaattattgaaggctttacatgacttccactgcacagattggtataccatgacctggctttttacttattgtaaattacctggaaatggaaactagatttggatgagcagactgaatcataacggctataagactatttcgacatattccaatttaatgatgaatgaatgaggagctgaggaacagagttttcagggctcattagcacgttgctcgtcgtgtattccaaaaaccatgtcaagtgcgacagcgacgcacttcgtttatttatttcttgatatcccctgaaacaagtctgaattgcttgttttttacactacaataatatccattgcagccactacgaggatgtttacaggcccatcagtcagccgcgaaatcggttttatgcgattcattaaatccaactgcccgttccacatagcgtatgagtaatctgtaaggaaaaaatatcacaccgcctattaaataccgatttgtcagctagaaaagtcactgttttagatctcgggaatgcatgacgggcagatattataatgtatagcaggcgaccttgccagttaattgccgtttaatagcaaatgaaaaaaatgtaaagctcccaaatattgaaacccagctagctgtccattgctattgtattgctgtctattgaccattgaccacctgcttaagatgttcgaacgcgatttgttacaacactcgattcgatggcactcttttggccagaaacacccacatcgccaagttcgctgtgcattttcaatgtcagcattgcgcaaaactagacagtttagtttgtttggatattttcttgtttctttcttgtggcttcgtttttccctaacacacgtcaaacgcccttagtcacgcccttaacgccggcttgttaattttttcgtttttttctattttttcttggatgacattgaaattgtgcaatagacaaataacaaaattttaatatagacatgtttattgattttgcggcttggctgcctgtctgtccatcactcagccaccaaaagcattctttggcatagcaattatagtaattaagccatttaataataaggccttgggcagctgcaaaaatgtatatctctccctggcccatttgagctattagcggtgaactttgctccagttggattgttagttacttgtgcaaagaaaagcaatacctaattaaaaaagacttgggaattttaatgagattgcgattgcaattaaggccaaatgaagccattaaatgatctaaaaaaaaagagagctgcagtgaatgggtgagcggcccattgggcttttgcaattctggccgaagaagaagatagccaaggtcgttcgtggattgcataagtggtatgtacatgtaacgtcactacagcgacgtaaaaaacccaaaaaccggggccctttttcagagaaggtgaaccgccgccaggaacgaagccaacaaacttgccactcgttcacttgttttgctggacgcgacgagctcattcgtcgccaagttgccaccaaaccgctcaaaagtgagtgacttttcgagtgcttttgaggcgcaggtgttttgcggtctgctctggcttaagcttaagctttgcattcgtgttccaggcactcagacagtcagtcattcgcaggtccaacaactagacgcgtttatagtcgcgcttgaaacgcacgtgcaaaagtgcaatcgccgtccgctcgcttaccgctcgctcgctacctctctgtcgcactcgctcttgcgctgcctccatctctgtcgcatccattgacaaagtgtaaagtgcaaagctagcagcgccaacgtcgacgcagcgccagcgtctcagcatcagcttaagtcaactcagctcggctcagtccgccttttggccagcgactcaaagtcagtcttggccgaacctttcagcgcaacgcaagtgctccggttatacgctccctcggtccgttcgtcgttttttgtgtgaacccccgtggaacgtcgacagatcccattcatcggcgatcgagattacaagcgatcgcgttcgtgtcctaagtctttcgtttggcaagaagtggattataaaaagaaacccgcgaaacgactgaaattgtgtgcaaacatatttgctcccaggccaactagtacgcgcattgtaagtgtaaatttgctcatcaaacaaaatgggactttttggaatttgccgagcttgaatggccaacagtaccgacatccacaccacacgtttcaggaaatcgcccaaaaggcattcagtttgatatttaagcgaacaacagcttattctttacaaaaacaaatggccgctctgctgctttgtcgtcaattactttgtttgcgaacttccaccatcatcataatcatcatcatcgggatccacatcatcaataacaaagtggatgcctccgcccacgttaccttccccccctcaaaatgttccaacgcgtgtgctccgcgtttggcatacaaataatgggcggagtggtcgtcatcgtctccctcctcaaaacgttgttagaatatgaccactctgatattaccaatccgtcgacggcaactccatcgcgatgttgctacacattttgcctgtgatggatgtgaattgcaaaaaaaaaaaaaaatgtgtggttataatttcggtcattaacagcatttcacatcgccccgatgtgtcattcatgcagccattgtacatggatattatcgccatggcactttgcgtaattttgcttttattgatcaggcttatggcagagtgcttatgcctgagtgcctggctttttgtcgcagtggaatttttctgattctagtcccggacctcaagcactttcctctggcagtaaaaaacacgtttttgacctacgactgccataagtatttagctaatagccctttgattctcagtatttgcctgagatcagcgcattccagctgatccgccccgtggggccaaataaaaaaattaacggcttcaggtgacgcccacaaccaaaatgggaagaggtcatctacaaacagagagcagttagccacttttttcaccggacattgcaaattgcaattcgagcaaagttcagcgcaattaagttctgtgactttttgcattttcattgcacaatttgcaaagcgtcataataataacaattatatcttacaataaactgcattcatcgtcgtattttgtgcacccagagaccttcgtcaaaggccctgaaattagttgtcaaggtttagcccctctctctccacatgtgcatttccgagcagtgcagcattttaagtttaaacttgaactggtattttcgacttgaggtttttttttattttccagtatctgtctttctttctttcggtcggtgagcattttcggggcctcttattctctgtttatcacgtcgcggctatgcctcgagcagagttcaaggtgccttcgatccattccactcggcaacagagtgaagttgactgaggctgtatctagatatccagagatataggcatcattattaagccgtaaaacgctgcgacacttaattaataccaaggcagcggctctgagctattaagataaaagcttatataaatagccggcagaactcgagaaaattcgcttagcaatcggatccgttccgatatgattatggggattgttagactaattgcaaacaatttgcattgctctaaccgattttaagcgaacggctaatacttccccctgaatgattgccctgagctgcataacaattcagaatcaaattggtcttaaactggacttaatgctgtgcagtgtcccatgacgtcggtcacttaataaccgatcaacaggccctaattgctcaataaagtcaagtaagatatttaacgagctgcttgagattaaatcgggacgacagttcgtcatattgatttctcaattggccttaaagctgtagaccttaagggtacatctgtaattcagacttgtggtctgaattataaattcagaaggggtgaaaaatattccatgacaaacccaacatttgttggggttcacgtgacccctgctgaactccaggttacctggatgtgattgtgcaactgtgagacatacacaacaattgagaaaattaaatattaattgaggcaatcggacattctctttcgagttttcgcaggaatcggacttcagactggtttcagtagagcaacaacagccgatcgatacacgccactagcaaactgattaggtccgattcaagttggttttacagactaccatctggattatctaacaccttggttttagtcagtgggtgagtgagggtgagtgctcggctatttatttttgggcacgggccgccgaaaagtctaaagacctgttgcagaaccagttgctaactggtttggctcgccatttgcagaaatggccaaaagcccgcccgtcgaagaagttgcagtcacgaaagtgtgtcgcatacagttgtacttctgctgaaaagccaactcacagacatacgtgcctgaaattatgtcatcggaaaagccagtcgaagaaaatgaaaactggccactagaaatcgaaagtgttgggtgttgagtgctcattggggagattatttttcgtttgatattcttaaaaatttcgaggccgaattaatgtctttttgtagcccacacacgtaggcccattaagccttaagttttaattatggtttttcctgtctgcagctgctgaaaaatcgttcagcgcttgcattaagattgccccattgaaatttaaattgtgttgaatgaattcatccaagcattgtctgcagctggttaaacggctaaatgtttaaatggctgaatgcttttatgctcaactggccacctgattgagcaacttttaaatgaattgcgagtccatgggtttttcagatgactaactcgtaactgatgtttgccccctacttttttgggttctcacttagcacattggatgacgcacttgttagcgcttagataaaactttccgctgcaccggaaactcacggagcttcaccattgcatgctagctacttttgaccttggcaatagaaaaacggcaacgcactcggcatgcaaactaggcatcagcgaatagcaaatgattgctaagaactcgcctgttgttttcaaagctgaaagctgaaacttcggtgcttaacacatctccaagtggctccgaaaacaacagagctccaatgtcaaatgcgtacattgctatcgggctctcaattattattgttattactacttaaattgttattgttgcgcagagctaagcggcttttggtccgttcgcatatcgaattggcgcttttagtccaagaaacaatcacagttgtatgaatgttgaccgtataacgctgcagtcatcagaaatgactcagcaatttggcattatactattatcacaactacagaagtaaacaccgcaaggtgtagattgtataatttttgaaacggggaatttgatcaaccggttattgttacttttggagtgatctagaagcatgctttttccccaaattctaagctacttatggcgtaaaatcattgatgatttctcattcatcaccagcaatgacttggccaaaagcatgccagatcatatacaacgtgacgcatgcgtaatattgaaagcccaggtgaaagacacaaaagccggcaaagaaaaatagatggatacacatacatacaagctctgcaaactccaggtctccagccagtgcataaatcaaacaacaatttacgctcaaacatgactattatttatacatttcagcaatgtgtgcctgaaacacataaaaagcacagtctcacagccacttgggcattgcaaaagattggcccggcagcgaagtaaaagtaaacgcttaacaaagtaactagcatttagacaaaggcaaataaaaacaagcaataggcgaagcaaagccaacaaaacaacacccaccatcgccaaaaaagaaacaaataaaatgctgatatcaacgtaagtaaattcgtagattcgtgggtaaacgtgcagagattacgactataaattgcaatcaaggtgcgaaacaaacgcaatcatttcggtttattttcgtttttttttttctttctccattttgacccactgatgttgacccacttggtggcaagtcaatcggccatcagtcattggtttgggatttggggaatcggcattatctaccagtttcctgctgtcaacgcccgatctcgacttcaacacctgtcgagccatcagcattgcataagccagcgatttgacttttccagcgcttcttcacccttttgccagtctttttactcacttgtgaacacatatacatatatgtattttctgtgtcttttgctgattttttaatcgcttttgcatatttgccagctaggccgaaaaatgcgatcgaatttctcagcggggcgaacgagtttgtaattatgtcaaataccaaaaggctcattgcataatgccctgccattgcgaattcgtcttcttttggttttaaattcacttcagcggattcatacgattcatgtgaagatgaaacattggctgggtatctcccagccataattttcagtctgtaaatcatgagagtttgctgatttatttggcaaatgacaagtctgtcagttcaatggcttcctcgttggtccaagaatagaagctcttaaacatatgcgcgcgcaaaaagagtacaacaaaaggcaattacacgacatttgcttcttccgcgtgtggcagcgacttgtatggaaatggataagaggtgttttgcctgccaataataagcacccggtctggcctggaattcccctgaggtctggagacccaagaaaccgccggggatcggcgtgcttagcattcagcattcgtttgctgccatcgatgcgtgacacactccagcttatcggagccaggaacaatttgagtccccgagaatacctctcccttcaatgattataggcgattaggaggctcgatcatcaatgaaatcgcagcacgaaatgcagcctctcaggctattatgtaaaattgcactaaaaagatcgaagtcaatttagataaattgattacaatcaacttaatgaaggacgggttaaaactcgtactgtacaatcaatgtctatacatcaaatttgatatttcccatttttctcgctgtgtacttcctagtctatatctttatatgacctcactgtcgtctcggtgggagtcactgtgcactttgcctctcgcagcacgcgtttatttcaaactattcgccacgacaattacacattctaaagttcgcatttagcacggtgagcaaagggcggaaaggaaaatgtgtcagttatggcagagcagtgcagttaatattattgatggtttctggttaagggaaatgacgagtccgttgggctttagaaattagtgtttcgaagtgttttttccgcccataactcagtatgttgacaaacccttaccaattctcacgcttcaccattcggttgggtgcgtctctgaagaaatccacgagataagcgtcccaaaaaatggtgggcccgtgctgagcacatagctgcatgcataaatagcgctctaatagttaattaaattatcaataagcatacacaaacacaaacaaataccgccatcggcggtccgaaatcttcaagccataaatgtcaagcacaaatgtgaggaaaagaggaaaaaatgtcggtttgttgtcattataaaaaactacctggcctgaccttgtccattgttgactggcgcacacagagacgcgccgatttacgcaacccgcgagtgttggatgttgtctcttggcttttgggctgtgactaactccgtgccgaccactgtacgcaaatcgaaagactcaggcaacgaacttgaaacacatttcgtcaaccggtcgaatgaaattgcagcatggcagcatatctgagtgcgtttgatattcagaattcgtgcggcccagccccaaatgttgtcagcgcattatgctaatatttgataggccgcataatatagccacttaatttcccctgcaaacgaagctatttgaggatgtttgctcgccactcgaccgttgggcaacccaatcccaattccaatcccagcccatctcgtgccatataataaatgcaaatatttaccgccgatcgaatatttatcttaacgagaagtaacgcaatcgattagcaaaaactcgagacggccaaatcgtttcgttttcgaaagcgacatcggtgggaacagaaaaaaggcaaaatatcgtcaatcgaatgcgctcaattagtgaccttgaactagtttccccctccagcgtattatttatatttgggtctgtttgtctcgcttctcgttttctggtatgacttgctcgtttgccagcgctaatgatatgaaaacccgaaaaaaaaaataatttatagctggcagtcaaaatatgttcaagaggtgcgaatgtgattaattgcaggcaattatgaactttctttacccgactaacagtgcagctaaccttgacccaaaattgccgaatcttttggctgtttacacgcttgcgacgcgtgcaaaagctgcatgcgaattgcataattttctgccaatgcaaatgcaaatgataactgcaaactgcaaagtgggcttgcatatttgctcgacgactgaccaacttggtagtggatggatggctgttgagcaatcatccattgctggtccaaaacaagacttggccaacgactttaccttacctcgtgcattcaatccgactttagcctaactttaactttaacttcggccggactccagcttttcggccgaccaagtggccaaaaagcgtgttgctcaagagacgagtgcccaactataaatattgaaatgaaaagtgttgccaagcttgtccattgtattttttgccgtttcgctctgttttatgattttttgcaatgtgtgccgctgacatagtttcggtgccgagatgccgagctattgaagcgtaccccacaaagcccataacacacattcgaagcgggttcaaatgcaaatcgttatgcaaatgtatatatatatatctgatatgcgacagcaggaagctgccaattataacactattaaatattctatctagcgaatgaaaccagttttgtatggccaaaactctctacaatgtgtatttaacactcatgattcccattaatgtccgcacttaaaaaaggtcttacaaaaccagagcaactaaaagatacgtaaggcatttgaataagtgatgacaatgtttaacgactttaatttaaattgaaattgagatattactttgtatacttttaatttgttcatacgattgatcccaaaagttaaataaaccttctcttagtaatctccattttttttcaagttcaatagaagaactcagaatgcaaatactcatacgatttatgcattgaaattgctgcttcattgtttacttttagataccctagccttttgttgttttatttattcgaattatatttaacgatttgaattatatttgacgttaacgaataagtcaccttttagtttccattgtgtaaggtcatacgattatctatgattttaaaaataggtatcaagtatctttggatatggatagttgtattacaattaaaataatatatataatattaatatactcttggtactataaaaataatcctcaatctgaaaccccgaactaattcatttttcccgatatcattgcagtatttccacagactccgcgatggcggccacaaacaacgatggtggcacgcagccgaatgccgtggcggcatggggtgctccggccaatggaccccggaacacacaggccgccgtatccgtgcggcatgccttcaaggcgtacggaaagaagaagaacgccaaccaggtgctgaacaacctgaacatgaccgtgcccaagggaacaatgtgagtgagagtgatccgagcgattccgatccatcaataaaagtgaaatgctgacagctcaatttagcgagtttgtaaaatagaaacggcgaaagtaattagcacctaatgctggctgaactcgaattcgaaattagcagcaatgctaagcgatttccttgtgtctgagatttgattgcatttgcaccgatctccgatctccgatccgatttcgtctacatcagaggtcacttggttacgcttgcgcctaattgcggctattatatgcggctaaccggtttagtcgttcgactatcttgcaattgaaacggcatttttgcatgataattctagcggctaagcgagggtcgttaggaaagttcgtctgatctcgcatcgcagagatgcccctggtggagtgatcccaattaagccgcatcccaactgacgtcaatgacgcgactaagtccacacgtcttgccaattaatctcgaaatctatttgtatgccagacactgggcctgtttgcgttattctcgaaacaaaaccaatatgcccggctatattgatcgattgtcgtcggaaaagattgcaaatggctgcaaaacaataatgatgtttgttcagagaccccccaactgatctattgccatctttgtcacggcacatgtgcttaattgcggcacacgaatttttggcaaacatttaggggccataaaaataaaaaatcgtatattcattttttttttttttcttcgctgcctttggcattggttacggcccgagctgtattattaaattttgtttatttcttgttttcggcattctgagtgattaattcagcgatttaatgctgtgtcgtaacggatttttattttattctccgccgtctgggcagcagtcttgacccagttaatagcctggttcgttcagctttttgacctaggtcaggtcgccgagttagtcatatatttttcggctttgaacgagtcaacgaactgcttttcggctgtcaaagtcagtgcattagcgattgaagtcgattaaaggctggccaactaccacacagacagacagacactcctatccccaggggctatattatcagattttgtctggtttaattcgctaaatggctcagcacgctaattataataatagattcaataagaggccaaaacgtgcgacctacgagctgcaatatttttttttttcaaaggccgaagaccaaacgaaaacagacgacaaactaacaatgcgataatcacaataattccagccaccaagttcatcatgatgatgatggcgataataataatggggactaacccctccccaaaagcacaaaaacggggcggagtcgcattttgtgatagctgcgggcatttcttacatttcaaggtgaacatttggaaataattcaacttgaactgatggaattagcattgacatcgccgccgacatgccacgatcgtatatatgtatatatatatctatccagttacatatataggcttgtttacggtggcgacagttttcgtgctgagttggctaaatgtttttccctctttctgcttgcttttcatttaatctctttacctctctgtcacggttggcttcttgaccttttgtgaccccgtttaatggtcaaaaagcgtataaaaaagtgacattcaagaaaaactaaaaatgctaataagtaacgtctgctttccaaaataaaaagttcaaaaaagattttatgagacaatatataattatttacacaacaagtttggtttgggtttagtatggtatatgctctcaacaaacactttttaattaaaataccttttcttttttcccagctatggtcttctgggagcctccggatgtggcaagaccaccctgctctcctgcatcgttggacgtcgttacatggacgccggtgagatctttgtgctgggcggcaagcccggcactaggggatcaggtgttcccggaaagcgtgtgggctacatgccccaggagatcgcactgtacggagagttctccatccaggagaccatgatgtacttcggctggatcttcggcatggataccaaggagatcctggaacgtctacagttcctgctcaacttccttgatctgccgtcggagaagcgactggtgaagaatctcagtggtggtcagcagcgtcgtgtgagtttcgctgtggccttgatgcacgatccagaattgctgatcctggacgaacccaccgtgggtgtggatccactgctgcgtcagagcatctggaatcacctggtgcacatcaccaaggcgggccaaaagacggtcattattaccacacattatattgaagaggcacgacaggcgcatacggtgagcgatttagaatttcaatttatatatatttatattaataatataaatatattctcagatcggtctgatgcggtcgggtcacctgctggccgaggagtcacccagcgtcctgctctccatctacaagtgcatcagcctggaggaggtattcctcaagctgtcccgcatccaaagccaaaagggcgatgtgacccacgtgaacttcaggtaaggatctagactggcatgcaccacgtggctaacccgacgcaaccactctaatcaccactctgaactctccactatgactctcctccatccgacactcgcatgctcgcaatctgtgttccacctccatctgtttgtggttttgaactggtttttcgggagtagtaacaacatctcgttgcacgccatggcctttggcagcaagatggacaagccgagttccagccaggagggcggcgtggtgggcctcaacttccaccagagcaaggaggtgctcattaacgacagcaatggctccatctacacggttcgttttggaatatccttgcgattgctagggttaatcttaacatctatcgcttgcaacagctcaaccaggaaccctacagtccgccgccgtcccggcgcaacaataatcccaatgatgaggagagctgccaggactgctattccaacctgtgcaagatcacctccaagggcaagattcgcgccctgctcaccaagaacatgctccgcatgtggcgcaacgtgggcgtcatgctcttcatcttcgccctgcccgtcatgcaggtgatccttttctgcttggccatcggacgagatcctcagggccttaacctggccatagtcaacggagagatgaacgacacggtaagggtaagacacacattatacacactttatgcacattccaagtcttagcttagtattcaagttaaaactcaaactattgaataccaagtgaaatattttgattaaaccacttttaagattgttaaaaactacacaactataaaaacgtaacaaagtttaagatggattttattggcatttgatgccataaaatatacaatttgaatagcacttaaatataagcttaattatcatacaactataattaaagaccagcttaaccattttaatgatcaaatcacttgcactttaaccaattaaaatatgatataatataaaaatattttcaggaaaactgctattgggaggatggatgccacttcaagaacctgggatgtcgttatctgagtcatttgaatacgagcgtagttaaaacatattatgaggacctggacgatgccaaagaggccgtgagaaagggcacagcttggggggcggtctacatcagcgagaacttcacggacgcctttattgcccgagctaatttgggacgtgactccgacgacgaaacgatcgactcctccgaggtcaaggtctggctggacatgtccaaccagcagatcggcgtcatgctcaatcgggacatccagttggccttcagggacttcgccatgggccttctcggccagtgcggcagcaatccgaaattgggcgacgtgcccattcagttcagggaccccatctacggcaccatgaatccatcgttcaccgatttcgtggcacctggcgtgatcttgacgtaggtttcatagatatacatttaatgggagagtcattaatgcttttttcacatattttatagcattgtattcttcttggctgtcgctttgacgtcatcggctctgatcattgagcgcactgaggtaagtcgagaaaatctatcctcttttgggaataattataataaaatttgcttacttccattccagggcttgttggatcgctcctgggtggctggcgtctcgcccttcgagattctattctcgcacgtgatcacccagttcgtggtgatgtgcggacagaccactctggtgttgatcttcatgctggtggtgttcggggttaccaacaacggcgacctattctgggtcatcgtgctgaccctgttgcagggcatgtgtggaatgtgctttggcttcctcatctcctcggtgtgcgagctggagaggaatgccatacagctggcgctgggctccttctatcccaccctgctgctgtctggagtgatctggccgattgagggcatgcccgtggtgctgaggtgagttcttgtggtattactctgttgtgaatggaaatttaaaaaatcttatcccccagatacatatcactgtgcctgccactaacgctagccacctcttcgctgcgctccatcctcacacgtggctgggcgatactggagtcggatgtgtacatcggctatgtgagcacgctgtcctggattgtgggcttcctggtgctgacgcttctcgtgctgcgagccaaacgcggctaggatcttcagatattacgctacttttagatgcctaactttagaacacgataagtcgtcctaattagtttacacccacttcgggtcttcttcttaattccactttcgagtttcacttcccttcgtatctgcccaaatgtcataaattatttaagcacattcgcagctttccttagctttccactcggcactcgtttttccttagactaagttccgcactttcgtagtttaaagcgtaaggtttaggtactcctaaatgaaatgttgtaaatattttgtgtcacgaattcagtaatccgttgctctagatgtccattatttgcaaccctctgtactagaccttttctcgacgccgacacgggcagtttatcacatacaaacgcaactaattttatatattttcaatggactgtgattgttttttctacataattcacgcgaatacacgtagggcaagcctaaacaaaaagaaaacacaatgaaaacgaacaaaaacaatggtgggttttgttattaacattaagtagcttaaagcatttttgtatgggtttaagttttttaaggtaaaacataattaaatacaataatgtacgcaaccctaaagagtatgtaaaaatatatttcaggaaatattttgcgcagagcataaatatttcacaacgaacaaacataagacaatgaacaacgaacaagtgaaaaacgttcttatttaagtaaatattaatgtgaacgcagttatgtataaataataataaagcgtgaataaataaataaagttaaatttaattgttggtttacttacattttgaaaaagatgttctcattttaacattggcgccaatgcactgttactgttttctagcatgtccataacagtcttttaaatgcaggaaataacaactcattgtgaccaactggctggaatttaataaatatgttatcacttctaattttctccaaaactaaaaagataatttagcaggttagttcaaaatttaaatatttaacgatagctaacttgaataccagggctggtcgctggtgttccgcttaaaagcagttgtgcgctctggtaacactggcgttaca

SEQ ID NO: 21221 - DNA, 2737 bp, DROSOPHILA
ctaatatgaagtcttagttcgctgcctaagtcttttgttttgtgcggaggcgcacgcgaatttcagtgtgagaaacagttcggtgtgtgtgcagaaacaaatcgaaataaacaagactatttactggcagctgcggaaggcaaaccagttgtgcaactgctattcgcaacatccattgaatcacattgcccagtgaccagtgcatccctttcggaaacggcaaaatggcgccgaagaaagaggcaaccttgagccagcagcagacgcagcagcccatcatggacctggaaaggataaagcgtcacttcagctggtcggaccccagtgccattatttccacagactccgcgatggcggccacaaacaacgatggtggcacgcagccgaatgccgtggcggcatggggtgctccggccaatggaccccggaacacacaggccgccgtatccgtgcggcatgccttcaaggcgtacggaaagaagaagaacgccaaccaggtgctgaacaacctgaacatgaccgtgcccaagggaacaatctatggtcttctgggagcctccggatgtggcaagaccaccctgctctcctgcatcgttggacgtcgttacatggacgccggtgagatctttgtgctgggcggcaagcccggcactaggggatcaggtgttcccggaaagcgtgtgggctacatgccccaggagatcgcactgtacggagagttctccatccaggagaccatgatgtacttcggctggatcttcggcatggataccaaggagatcctggaacgtctacagttcctgctcaacttccttgatctgccgtcggagaagcgactggtgaagaatctcagtggtggtcagcagcgtcgtgtgagtttcgctgtggccttgatgcacgatccagaattgctgatcctggacgaacccaccgtgggtgtggatccactgctgcgtcagagcatctggaatcacctggtgcacatcaccaaggcgggccaaaagacggtcattattaccacacattatattgaagaggcacgacaggcgcatacgatcggtctgatgcggtcgggtcacctgctggccgaggagtcacccagcgtcctgctctccatctacaagtgcatcagcctggaggaggtattcctcaagctgtcccgcatccaaagccaaaagggcgatgtgacccacgtgaacttcagtaacaacatctcgttgcacgccatggcctttggcagcaagatggacaagccgagttccagccaggagggcggcgtggtgggcctcaacttccaccagagcaaggaggtgctcattaacgacagcaatggctccatctacacgctcaaccaggaaccctacagtccgccgccgtcccggcgcaacaataatcccaatgatgaggagagctgccaggactgctattccaacctgtgcaagatcacctccaagggcaagattcgcgccctgctcaccaagaacatgctccgcatgtggcgcaacgtgggcgtcatgctcttcatcttcgccctgcccgtcatgcaggtgatccttttctgcttggccatcggacgagatcctcagggccttaacctggccatagtcaacggagagatgaacgacacggtaagggaaaactgctattgggaggatggatgccacttcaagaacctgggatgtcgttatctgagtcatttgaatacgagcgtagttaaaacatattatgaggacctggacgatgccaaagaggccgtgagaaagggcacagcttggggggcggtctacatcagcgagaacttcacggacgcctttattgcccgagctaatttgggacgtgactccgacgacgaaacgatcgactcctccgaggtcaaggtctggctggacatgtccaaccagcagatcggcgtcatgctcaatcgggacatccagttggccttcagggacttcgccatgggccttctcggccagtgcggcagcaatccgaaattgggcgacgtgcccattcagttcagggaccccatctacggcaccatgaatccatcgttcaccgatttcgtggcacctggcgtgatcttgaccattgtattcttcttggctgtcgctttgacgtcatcggctctgatcattgagcgcactgagggcttgttggatcgctcctgggtggctggcgtctcgcccttcgagattctattctcgcacgtgatcacccagttcgtggtgatgtgcggacagaccactctggtgttgatcttcatgctggtggtgttcggggttaccaacaacggcgacctattctgggtcatcgtgctgaccctgttgcagggcatgtgtggaatgtgctttggcttcctcatctcctcggtgtgcgagctggagaggaatgccatacagctggcgctgggctccttctatcccaccctgctgctgtctggagtgatctggccgattgagggcatgcccgtggtgctgagatacatatcactgtgcctgccactaacgctagccacctcttcgctgcgctccatcctcacacgtggctgggcgatactggagtcggatgtgtacatcggctatgtgagcacgctgtcctggattgtgggcttcctggtgctgacgcttctcgtgctgcgagccaaacgcggctaggatcttcagatattacgctacttttagatgcctaactttagaacacgataagtcgtcctaattagtttacacccacttcgggtctt

SEQ ID NO: 21222 - protein, 808 aa, DROSOPHILA
MAPKKEATLSQQQTQQPIMDLERIKRHFSWSDPSAIISTDSAMAATNNDGGTQPNAVAAWGAPANGPRNTQAAVSVRHAFKAYGKKKNANQVLNNLNMTVPKGTIYGLLGASGCGKTTLLSCIVGRRYMDAGEIFVLGGKPGTRGSGVPGKRVGYMPQEIALYGEFSIQETMMYFGWIFGMDTKEILERLQFLLNFLDLPSEKRLVKNLSGGQQRRVSFAVALMHDPELLILDEPTVGVDPLLRQSIWNHLVHITKAGQKTVIITTHYIEEARQAHTIGLMRSGHLLAEESPSVLLSIYKCISLEEVFLKLSRIQSQKGDVTHVNFSNNISLHAMAFGSKMDKPSSSQEGGVVGLNFHQSKEVLINDSNGSIYTLNQEPYSPPPSRRNNNPNDEESCQDCYSNLCKITSKGKIRALLTKNMLRMWRNVGVMLFIFALPVMQVILFCLAIGRDPQGLNLAIVNGEMNDTVRENCYWEDGCHFKNLGCRYLSHLNTSVVKTYYEDLDDAKEAVRKGTAWGAVYISENFTDAFIARANLGRDSDDETIDSSEVKVWLDMSNQQIGVMLNRDIQLAFRDFAMGLLGQCGSNPKLGDVPIQFRDPIYGTMNPSFTDFVAPGVILTIVFFLAVALTSSALIIERTEGLLDRSWVAGVSPFEILFSHVITQFVVMCGQTTLVLIFMLVVFGVTNNGDLFWVIVLTLLQGMCGMCFGFLISSVCELERNAIQLALGSFYPTLLLSGVIWPIEGMPVVLRYISLCLPLTLATSSLRSILTRGWAILESDVYIGYVSTLSWIVGFLVLTLLVLRAKRG

SEQ ID NO: 21223 - DNA, 3810 bp, DROSOPHILA
attagaaaacatctattagaattgatttagttcatcgcgaaatacacagaaacttacgcggctgctgtaatgctgtcttcatcatttagcatctcgcttatgtccagcactccttctaattttccattgaccagatagatcttggcgggattttgtagttttccattgaccgtctttattatatggtagttttctacatcgcagaagataaccttcggctcggtaatgtcgtacatgtatttgacagtctctgaaagggaatttaatttcatcataatagtaagcatactaaagtaagtacaggagttttgaacctcaccttcagtaaactccggatgcagtggattaatggggatgccacggagcaaagccgcaattatcacactggttaaatacgtcgagttattggccgatatgccaacgacatcgcccctccgtagacccaatctcttgaaggcctgtgctatgcgggcactctgctgagccaactgagcaccggtgagctcctgacccgtggtatcacatatttgcatcacctgatctgcgttaatctgcagcacgcgcatgatgacctcgcccagggtcatttctggaccgtagaagtccttgccacgcggtccaaaccaagtccgcgaagcggcatcgtagtgcacctcacagctcatagtgttttccaacgtccggcgatcgaataagtgctttattgcgtctcatttgggttttatatggctcggggagtacggaaaacaaagtggagctgttaattagtaggacacggcaagacatcgatgcttgtcgccagtgtcaactaaaatagatgctgatttactcattggcaagtcggagccgcctctgttttccgctaatcaaatcgagccgtccagcagacatggaaactttttaatttctttcacagttcttgtgatgattcactgtgtttacatttattaaacacgattataaacaactcatgtattgtatatttagcataaatcttatctcacaaatgtgtggttgcctcgctcaactgcgaccagatcttcctgcgctgcaccttactgttctgcgtcttcggcagattgtccacaaagaagactcctccgcggatgtggaaggcatcgcttagatgttgtgccacaactcccttgacatccgcctcggtcagctgggcacccaactcatcctcattccgaaccactgcacaggctgtaagattggtggacacctcatcgggaattccgaagacagccacttcgtggactccgggcagatggagaatcacgtcctcgatctgcttgggataaatggggaagtgattgtacttgaagacatcggtgtcacgggactgaaagtgcaggcagccctcatcgtcaaagtatccatgatcgccggtgagcaaccacttgccgtcgggcgtgacggtcacctgggtctcctgcggattgtgatagtagccgccccagcgaaggttgagccgcaccaggatctggcccgtctggttggggcccaaggactgaccgtgtgggtctaccacgcgaacctggacatttcgcagcaacctgccctcgctgcccagtggacctcccacattcttggagattcctccggtctctgtgagaccgtagagcacggcgaatctgttcgcacccagtagctcgtacaactgccgccagatgcccatcggtaccttcgagccactgcacacgaaggactgaacacactgcatcttggctgctagctcctgtctctctgggctcttggccagcagagccatgtggtggggcactgtgagcacaaagctgacctggtgtcgttccacaaggtctgcaaagtacgccacgctgaaaggacgattggtgatgatcctgcgacatccattgaccagcgaagcgagcagtgtgaagatacagctgatccaatagagcggactgaagcagaacagcactgtatccgaggtaaagagctgagggctgtttaatatccattaggggtcatatttttcaaatgctcttgccacattctactcacattttggcactgttcagcagactgcgatgcgaacgggttacgccctttggcaaaccggttacacccgaggaggtgatgatgaaggccgtatcatcgccacacaaatgcgggcaggcaaagctggaagatcaggactagcttgagggttctttctttgaacttctggtttcacatctacatacagtgttttctcatcgtatccagtgcagccatctgcaagcaaatcctgaatgttacgcactccaggcagagttccagtgagcagaatgatctccgtcttgaacttgagactgcttttgaccgcgctcaaggtctggtagttgtccaggtcgcagaatatcaccttgggcttcgtgatctcgaacatataggccgtggtttctgtgtataaagttgtgcatttaacgagttatataaatatatatccgatttcttctacccgcatcgaagtccggatgcagtgggttgatgggtgtgccattcagcagggctgcgatgaccacttcggtgagataggtggtgttcttggccgaaatgccaaccacatcgccgcgttgcagcttcaatcgttgaaaggcgtgggccaatcgacgactttgctccagcaactgactaccggtgagctcctcgcccgtgggatcatacacctgcatcaccttgtccgagtacagacgcaggatgatcagtgccacctcgcccagcgtcatatccggaccgtagtactccttgtcctttggcccagaccatatcttctcaaagctgtcgtacttggtggacgccatttggctctctctgcgttctggattccttttggccgttcgattggacaaaacacaactttcgtacacatcaactgagtttcggcgagagtggcctggcctatatatacagtcggcactcgggaggtgctagaactagatgttcgatctgctaattagttcgacacgttctccatgcccacatacacataccttctacccgcttccatgggcagcgctcctaatgaactttgccgactgctggcgctgccaaattatcaggtgagtttgggtgcacctcatggttactgagattggtaccaaaaaggatgtcataggacagctatctagctttagaaagtaggattcccaagtagtccttagttacttctaaggatcacttgaaaatgtgtttctttaaaagaattagataaggatccttagtcttctatattcattccatttcacatagcttccaaccactgtgccagttggaactcagtccatggccgttgcatggcaattgcataatttccacgatttaacacggtttgagctccgttcacttttgcccatctctgctccctgactgcgcccgctccatttcctatatccttgccatatccttgcgctgcggctgtctccacgtgccacgattcctggttcttgttgcgtctgtccgtctggccaggtgaatggatatatacgcatcgcaaccgtactcgtattcgtataactgccatgtgcaaccgcagagagatagagtcgcatccttgatgggcacacgcttcatttgcgtgcttagttaggaaatcaagcgtatggctgcagaacaagtgggcggactggcggtgatggggcggcacttaaaatgcaaggtgcatccacctgaatggggtgtgggtgttggcttaaacttcgattcgtggccgggactaaaagttgcccagcatcagcgggcggaagttccggggcgtttggagatagttcgccgggctgagtgaaaaactcggattttgcctgc

SEQ ID NO: 21224 - DNA, 1632 bp, DROSOPHILA
atggcgtccaccaagtacgacagctttgagaagatatggtctgggccaaaggacaaggagtactacggtccggatatgacgctgggcgaggtggcactgatcatcctgcgtctgtactcggacaaggtgatgcaggtgtatgatcccacgggcgaggagctcaccggtagtcagttgctggagcaaagtcgtcgattggcccacgcctttcaacgattgaagctgcaacgcggcgatgtggttggcatttcggccaagaacaccacctatctcaccgaagtggtcatcgcagccctgctgaatggcacacccatcaacccactgcatccggacttcgatgcggaaaccacggcctatatgttcgagatcacgaagcccaaggtgatattctgcgacctggacaactaccagaccttgagcgcggtcaaaagcagtctcaagttcaagacggagatcattctgctcactggaactctgcctggagtgcgtaacattcaggatttgcttgcagatggctgcactggatacgatgagaaaacactctttgcctgcccgcatttgtgtggcgatgatacggccttcatcatcacctcctcgggtgtaaccggtttgccaaagggcgtaacccgttcgcatcgcagtctgctgaacagtgccaaaatccctcagctctttacctcggatacagtgctgttctgcttcagtccgctctattggatcagctgtatcttcacactgctcgcttcgctggtcaatggatgtcgcaggatcatcaccaatcgtcctttcagcgtggcgtactttgcagaccttgtggaacgacaccaggtcagctttgtgctcacagtgccccaccacatggctctgctggccaagagcccagagagacaggagctagcagccaagatgcagtgtgttcagtccttcgtgtgcagtggctcgaaggtaccgatgggcatctggcggcagttgtacgagctactgggtgcgaacagattcgccgtgctctacggtctcacagagaccggaggaatctccaagaatgtgggaggtccactgggcagcgagggcaggttgctgcgaaatgtccaggttcgcgtggtagacccacacggtcagtccttgggccccaaccagacgggccagatcctggtgcggctcaaccttcgctggggcggctactatcacaatccgcaggagacccaggtgaccgtcacgcccgacggcaagtggttgctcaccggcgatcatggatactttgacgatgagggctgcctgcactttcagtcccgtgacaccgatgtcttcaagtacaatcacttccccatttatcccaagcagatcgaggacgtgattctccatctgcccggagtccacgaagtggctgtcttcggaattcccgatgaggtgtccaccaatcttacagcctgtgcagtggttcggaatgaggatgagttgggtgcccagctgaccgaggcggatgtcaagggagttgtggcacaacatctaagcgatgccttccacatccgcggaggagtcttctttgtggacaatctgccgaagacgcagaacagtaaggtgcagcgcaggaagatctggtcgcagttgagcgaggcaaccacacatttgtga

SEQ ID NO: 21225 - protein, 543 aa, DROSOPHILA
MASTKYDSFEKIWSGPKDKEYYGPDMTLGEVALIILRLYSDKVMQVYDPTGEELTGSQLLEQSRRLAHAFQRLKLQRGDVVGISAKNTTYLTEVVIAALLNGTPINPLHPDFDAETTAYMFEITKPKVIFCDLDNYQTLSAVKSSLKFKTEIILLTGTLPGVRNIQDLLADGCTGYDEKTLFACPHLCGDDTAFIITSSGVTGLPKGVTRSHRSLLNSAKIPQLFTSDTVLFCFSPLYWISCIFTLLASLVNGCRRIITNRPFSVAYFADLVERHQVSFVLTVPHHMALLAKSPERQELAAKMQCVQSFVCSGSKVPMGIWRQLYELLGANRFAVLYGLTETGGISKNVGGPLGSEGRLLRNVQVRVVDPHGQSLGPNQTGQILVRLNLRWGGYYHNPQETQVTVTPDGKWLLTGDHGYFDDEGCLHFQSRDTDVFKYNHFPIYPKQIEDVILHLPGVHEVAVFGIPDEVSTNLTACAVVRNEDELGAQLTEADVKGVVAQHLSDAFHIRGGVFFVDNLPKTQNSKVQRRKIWSQLSEATTHL

SEQ ID NO: 21226 - DNA, 4608 bp, DROSOPHILA
ccgtagctgattgattgatcaatggacgacgcgacagcgaacgtaattgaaccaaccaaccaaccaaccaacaaaccaacaaaccaaccaaccatcaagaactttgatcttggctttcttgctctggactagtaaattgtaaccttgctttgaaggaatatagcgaatcgaaatatttaacatctgaaaatgataaaaatttatatgtgattgtgaattgtttttatatatatatttgtaaatttaatgtttgtattaaatttttatgaaaaatgttatgtcaagttgaatgatgacagtgtcttttttttattgttcccagccatatcttttctattcaaatagggaagataaaaatggttaagagagaaaaaaaccaaaataaattttgatcgatttattggcaaacatccgagaacaagagaaaatatcgctttcgatacaacaaaattagtcttaggatttattgtttttagtttaataaattttttaataaatgtaaacaatttttaagtatctgaacccattcttcttttgttatttatcgttgttatttgtcaagcatatttctgcgatgcacgtaaatgaaagggaaggcattattattatggttttcataacatttcatctcatttgttgaatatttatattttcagattgcagtgcatccatccatcccagtgaaatgcagagtttcggttggtagaaaatgttttatttacaaaaatagaaaatatctacatatttaaatatatatgtgtttcgatcacttatttcaatattcaagccaaattattgtagccatgtagttttggatttcagaattttcataatgttagtttttccttgtaaatcattagaaattcgttaatacttatgtcttcttctgtcctatttagctgcgtacgctaagtatacaaaatcgaatatatatatttttacatagttggctgagaggtatattacatggacgcggatccgtatttaagatgcgatccatttaagatatagtacagtcgcagcacatcagtgagtagtacaagcatttaacgactttctcatcgttgtcatcgtactccttgcgattcaatttggccttgtcattgtcatagcctaacgatttggcatccaactggtcggcggccaggccctccacctttttggacatctttcgcttattcgcatgtatcagttcgttggtgtttcgctgtcccaccatttcgtcgatccaatcgaagtctgtggcgtttccctgaaacctggttaaactggaaatggtttcgatcgaattgatatcctcctgtttgtgcaaaaagaattatatagttataattatagttatatatagttatatctgtcatctatacctgattgttgttgtggttcttatatctacttttctgtggcgttgtttgctgggaatgtgatgcgggcggcgacgagcccggcttatgattagccagtggcgaagaatcggttgctatcgatgctgtggttcccgcagagctatttagcaccacatcggtgtcctgtgctgctggaaaacttggcaccttcggcaaatcctcggggcttacaaagttgtgctgcaagcggataatggttggatttatttgaattaagcagaacagaatatagcctgacataccaagtcctgtattacaacggtggtgatcacgctgggcgaagtcatggctcgcgtggatgcggttgcagtctcggaagtaggactatacgggatcggtgagttcgggctcacaggcgtagtcggcagtgtggcagtctccgaaacgatggccaagtcctcagaggatgctctatcgctgtttgcgcatccttgaaccagcgaacaggtggccacaatgctcagcgacgatgatggtgagttggcagacaaatcggtggagggactggaaggtagtttataattagcttccttattattatactaaaatatatcttgaaagtcttaatcatcgtgcataggtaagccgcttaatgcatgtttggttaatacaactaaaactactttagtgccttaatcacaatctctccaccgtacttacaaatcaatcagctcggcctgagccttgctgccgcccaaggaccatacttcgctctttttctgtggacccgagtacgagatatgcttgttggtggcattaaaacgacccttggaatgggactttcggcccggtatccacaatatgcgcataccgctcggtttgcttttcttcgttgagttggaagccatctgaaaatcgtatactaaattcagaaattaaactataaaaacaaaccggtcgtttgattgtgatcaggtgtagctatcaattcgtttgtgaagtgttactcagaagttttggccaactatgcttgaaaaaaaaaacctatctacccaaaaatgtttaaactaacaaattatttaacagtacatataattggctcattttatattttcttaaagttcgttaatgggattctagtcagatcgagttcataaatactatacatatgtacatatatgtacatacatccaatcagcattaagaaatcataacattgcagggaattgggaatgttgttctaatcagatcgagttcataaatactatacatacatatgtatatgtacatacatccaatcagcattaagaaatcacaacattgcaggtaatttatcattgcgaaaaaagtaaacaaaattcttgctaaatgtagtaaataatattctcttaaatgttaagatcctcaatgggattctaatagaatgaaagcattgaataaagtacatatctatatctatgtctattcacgaagacaatataacattgaatgaataaatatttaccatcgtaaacaacctgatgtttgcttactacttagaagaaaatactgtttacccaaatttattgacaaattggcgctatgaacgaagacattgtacgcaaaaatgcttgaaaaggtattttcccaattggatttggtttttgggattacgttatgtgttcgtatgtatgtatgtacatatgtatgtatgatgcgaatcgcgacgacgtgaataaaatttaaaaagcggtttaccaaatatattcatacatatatatacatacatatgtacaaaagtcgagattcacaacaccacgcacatttactccgctataaacatatataaccacacatacaaatatctacttgcccacacatacatacatatgtttaggtgacaaataaatagcagaagcacgaatacgaatttatgtatgttagtggtttaaacagaaattagcctaatggtttataagaaagataaaacttagaatgcactcaccttttctcctcagatattgacctcaatatcacaaggttttgtgcaaataaagcatttgtgtaagccaagtaaatatatacgtatatatactatcgtatgtggacttcaatatatgtacatataagccgtgatatggtttgagattcacagttagaaagtcgacgaatttctttgagtgttgtctttgttatgttaacaccgtgggaacttatcgccgcaattggaaggggatctataacttcacgttacattactttatttgtttaaggacccgagctcatgtatatatcgaataaacaaaactcagaagtgccagtgttggaaaaagaagtgcacaccttagtagctttctctttttctatcggtaatcgtaaaatgcattattcacaccgcgggcagtaagatatcgatattgttgtcgatgccaagaactaaaagtagtggaatagcaaaggcaaaaattacgcatataacaaattcctttattacttgcctttatccctgctatggacaatttacttaagtgtcttgacatcgatattagaagccaaagtaatagctatatattatttgatttattccattaacaatattatatattaccaacacgaaataagtggttgatgaagggcatttttgagtggcttttggtgggattttgaaacgcgaacggtcacacctgacacaaattgtttagcttcgcggagcttttatctgtttgtttacgtttagccgcaatccaattatttatgtaagcagccaacaagtgtaaataataatatcccaataatagccccaaatgatcaacataagccacagcagtttatcccatcttatgattactctgtgtgtaaatcggtggaaaaataagtgcaccatagggcgggcaatcagtttccgttgagttttgaaagagccgtcagaatgcgataatggcgctctgctcgcgagagtttcggttctctagaaagtcggacattctaataatatatcaggttctcgagagcagcccccatacaatatagtataatatctggcccagtctcccagtgttcgtgctgcactctgctatccattatccgtttgctcgcgtgttagacgtaggtaatttccagcttaattcgtttatttcttacaaatatttgcatttatcccaatcgcgtgtgtgtccggatttgtaagagtggctgttaactccactctccttagccagcaatctatgtggctatagatttttaccatcttgtacacatactatatacattatgtgcctgccgc

SEQ ID NO: 21227 - DNA, 1261 bp, DROSOPHILA
agctcgggtccttaaacaaataaagtaatgtaacgtgaagttatagatccccttccaattgcggcgataagttcccacggtgttaacataacaaagacaacactcaaagaaattcgtcgactttctaactgtgaatctcaaaccatatcacggcttatatgtacatatattgaagtccacatacgatagtatatatacgtatatatttacttggcttacacaaatgctttatttgcacaaaaccttgtgatattgaggtcaatatctgaggagaaaagtatacgattttcagatggcttccaactcaacgaagaaaagcaaaccgagcggtatgcgcatattgtggataccgggccgaaagtcccattccaagggtcgttttaatgccaccaacaagcatatctcgtactcgggtccacagaaaaagagcgaagtatggtccttgggcggcagcaaggctcaggccgagctgattgattttccctccaccgatttgtctgccaactcaccatcatcgtcgctgagcattgtggccacctgttcgctggttcaaggatgcgcaaacagcgatagagcatcctctgaggacttggccatcgtttcggagactgccacactgccgactacgcctgtgagcccgaactcaccgatcccgtatagtcctacttccgagactgcaaccgcatccacgcgagccatgacttcgcccagcgtgatcaccaccgttgtaatacaggacttgcacaactttgtaagccccgaggatttgccgaaggtgccaagttttccagcagcacaggacaccgatgtggtgctaaatagctctgcgggaaccacagcatcgatagcaaccgattcttcgccactggctaatcataagccgggctcgtcgccgcccgcatcacattcccagcaaacaacgccacagaaaagtagatataagaaccacaacaacaatcaggaggatatcaattcgatcgaaaccatttccagtttaaccaggtttcagggaaacgccacagacttcgattggatcgacgaaatggtgggacagcgaaacaccaacgaactgatacatgcgaataagcgaaagatgtccaaaaaggtggagggcctggccgccgaccagttggatgccaaatcgttaggctatgacaatgacaaggccaaattgaatcgcaaggagtacgatgacaacgatgagaaagtcgttaaatgcttgtactactcactgatgtgctgcgactgtactatatcttaa

SEQ ID NO: 21228 - protein, 322 aa, DROSOPHILA
MASNSTKKSKPSGMRILWIPGRKSHSKGRFNATNKHISYSGPQKKSEVWSLGGSKAQAELIDFPSTDLSANSPSSSLSIVATCSLVQGCANSDRASSEDLAIVSETATLPTTPVSPNSPIPYSPTSETATASTRAMTSPSVITTVVIQDLHNFVSPEDLPKVPSFPAAQDTDVVLNSSAGTTASIATDSSPLANHKPGSSPPASHSQQTTPQKSRYKNHNNNQEDINSIETISSLTRFQGNATDFDWIDEMVGQRNTNELIHANKRKMSKKVEGLAADQLDAKSLGYDNDKAKLNRKEYDDNDEKVVKCLYYSLMCCDCTIS

SEQ ID NO: 21229 - DNA, 4009 bp, DROSOPHILA
ccgtagctgattgattgatcaatggacgacgcgacagcgaacgtaattgaaccaaccaaccaaccaaccaacaaaccaacaaaccaaccaaccatcaagaactttgatcttggctttcttgctctggactagtaaattgtaaccttgctttgaaggaatatagcgaatcgaaatatttaacatctgaaaatgataaaaatttatatgtgattgtgaattgtttttatatatatatttgtaaatttaatgtttgtattaaatttttatgaaaaatgttatgtcaagttgaatgatgacagtgtcttttttttattgttcccagccatatcttttctattcaaatagggaagataaaaatggttaagagagaaaaaaaccaaaataaattttgatcgatttattggcaaacatccgagaacaagagaaaatatcgctttcgatacaacaaaattagtcttaggatttattgtttttagtttaataaattttttaataaatgtaaacaatttttaagtatctgaacccattcttcttttgttatttatcgttgttatttgtcaagcatatttctgcgatgcacgtaaatgaaagggaaggcattattattatggttttcataacatttcatctcatttgttgaatatttatattttcagattgcagtgcatccatccatcccagtgaaatgcagagtttcggttggtagaaaatgttttatttacaaaaatagaaaatatctacatatttaaatatatatgtgtttcgatcacttatttcaatattcaagccaaattattgtagccatgtagttttggatttcagaattttcataatgttagtttttccttgtaaatcattagaaattcgttaatacttatgtcttcttctgtcctatttagctgcgtacgctaagtatacaaaatcgaatatatatatttttacatagttggctgagaggtatattacatggacgcggatccgtatttaagatgcgatccatttaagatatagtacagtcgcagcacatcagtgagtagtacaagcatttaacgactttctcatcgttgtcatcgtactccttgcgattcaatttggccttgtcattgtcatagcctaacgatttggcatccaactggtcggcggccaggccctccacctttttggacatctttcgcttattcgcatgtatcagttcgttggtgtttcgctgtcccaccatttcgtcgatccaatcgaagtctgtggcgtttccctgaaacctggttaaactggaaatggtttcgatcgaattgatatcctcctgtttgtgcaaaaagaattatatagttataattatagttatatatagttatatctgtcatctatacctgattgttgttgtggttcttatatctacttttctgtggcgttgtttgctgggaatgtgatgcgggcggcgacgagcccggcttatgattagccagtggcgaagaatcggttgctatcgatgctgtggttcccgcagagctatttagcaccacatcggtgtcctgtgctgctggaaaacttggcaccttcggcaaatcctcggggcttacaaagttgtgctgcaagcggataatggttggatttatttgaattaagcagaacagaatatagcctgacataccaagtcctgtattacaacggtggtgatcacgctgggcgaagtcatggctcgcgtggatgcggttgcagtctcggaagtaggactatacgggatcggtgagttcgggctcacaggcgtagtcggcagtgtggcagtctccgaaacgatggccaagtcctcagaggatgctctatcgctgtttgcgcatccttgaaccagcgaacaggtggccacaatgctcagcgacgatgatggtgagttggcagacaaatcggtggagggactggaaggtagtttataattagcttccttattattatactaaaatatatcttgaaagtcttaatcatcgtgcataggtaagccgcttaatgcatgtttggttaatacaactaaaactactttagtgccttaatcacaatctctccaccgtacttacaaatcaatcagctcggcctgagccttgctgccgcccaaggaccatacttcgctctttttctgtggacccgagtacgagatatgcttgttggtggcattaaaacgacccttggaatgggactttcggcccggtatccacaatatgcgcataccgctcggtttgcttttcttcgttgagttggaagccatctgaaaatcgtatactaaattcagaaattaaactataaaaacaaaccggtcgtttgattgtgatcaggtgtagctatcaattcgtttgtgaagtgttactcagaagttttggccaactatgcttgaaaaaaaaaacctatctacccaaaaatgtttaaactaacaaattatttaacagtacatataattggctcattttatattttcttaaagttcgttaatgggattctagtcagatcgagttcataaatactatacatatgtacatatatgtacatacatccaatcagcattaagaaatcataacattgcagggaattgggaatgttgttctaatcagatcgagttcataaatactatacatacatatgtatatgtacatacatccaatcagcattaagaaatcacaacattgcaggtaatttatcattgcgaaaaaagtaaacaaaattcttgctaaatgtagtaaataatattctcttaaatgttaagatcctcaatgggattctaatagaatgaaagcattgaataaagtacatatctatatctatgtctattcacgaagacaatataacattgaatgaataaatatttaccatcgtaaacaacctgatgtttgcttactacttagaagaaaatactgtttacccaaatttattgacaaattggcgctatgaacgaagacattgtacgcaaaaatgcttgaaaaggtattttcccaattggatttggtttttgggattacgttatgtgttcgtatgtatgtatgtacatatgtatgtatgatgcgaatcgcgacgacgtgaataaaatttaaaaagcggtttaccaaatatattcatacatatatatacatacatatgtacaaaagtcgagattcacaacaccacgcacatttactccgctataaacatatataaccacacatacaaatatctacttgcccacacatacatacatatgtttaggtgacaaataaatagcagaagcacgaatacgaatttatgtatgttagtggtttaaacagaaattagcctaatggtttataagaaagataaaacttagaatgcactcaccttttctcctcagatattgacctcaatatcacaaggttttgtgcaaataaagcatttgtgtaagccaagtaaatatatacgtatatatactatcgtatgtggacttcaatatatgtacatataagccgtgatatggtttgagattcacagttagaaagtcgacgaatttctttgagtgttgtctttgttatgttaacaccgtgggaacttatcgccgcaattggaaggggatctataacttcacgttacattactttatttgtttaaggacccgagctcatgtatatatcgaataaacaaaactcagaagtgccagtgttggaaaaagaagtgcacaccttagtagctttctctttttctatcggtaatcgtaaaatgcattattcacaccgcgggcagtaagatatcgatattgttgtcgatgccaagaactaaaagtagtggaatagcaaaggcaaaaattacgcatataacaaattcctttattacttgcctttatccctgctatggacaatttacttaagtgtcttgacatcgatattagaagccaaagtaatagctatatattatttgatttattccattaacaatattatatattaccaacacgaaataagtggttgatgaagggcatttttgagtggcttttggtgggattttgaaacgcgaacggtcacac

SEQ ID NO: 21230 - DNA, 1076 bp, DROSOPHILA
aacacataacgtaatcccaaaaaccaaatccaattgggaaaataccttttcaagcatttttgcgtacaatgtcttcgttcatagcgccaatttgtcaataaatttggatggcttccaactcaacgaagaaaagcaaaccgagcggtatgcgcatattgtggataccgggccgaaagtcccattccaagggtcgttttaatgccaccaacaagcatatctcgtactcgggtccacagaaaaagagcgaagtatggtccttgggcggcagcaaggctcaggccgagctgattgattttccctccaccgatttgtctgccaactcaccatcatcgtcgctgagcattgtggccacctgttcgctggttcaaggatgcgcaaacagcgatagagcatcctctgaggacttggccatcgtttcggagactgccacactgccgactacgcctgtgagcccgaactcaccgatcccgtatagtcctacttccgagactgcaaccgcatccacgcgagccatgacttcgcccagcgtgatcaccaccgttgtaatacaggacttgcacaactttgtaagccccgaggatttgccgaaggtgccaagttttccagcagcacaggacaccgatgtggtgctaaatagctctgcgggaaccacagcatcgatagcaaccgattcttcgccactggctaatcataagccgggctcgtcgccgcccgcatcacattcccagcaaacaacgccacagaaaagtagatataagaaccacaacaacaatcaggaggatatcaattcgatcgaaaccatttccagtttaaccaggtttcagggaaacgccacagacttcgattggatcgacgaaatggtgggacagcgaaacaccaacgaactgatacatgcgaataagcgaaagatgtccaaaaaggtggagggcctggccgccgaccagttggatgccaaatcgttaggctatgacaatgacaaggccaaattgaatcgcaaggagtacgatgacaacgatgagaaagtcgttaaatgcttgtactactcactgatgtgctgcgactgtactatatcttaa

SEQ ID NO: 21231 - protein, 322 aa, DROSOPHILA; identical to SEQ ID NO: 21228

SEQ ID NO: 21232 - DNA, 40059 bp, DROSOPHILA
tcacttcccttcgtatctgcccaaatgtcataaattatttaagcacattcgcagctttccttagctttccactcggcactcgtttttccttagactaagttccgcactttcgtagtttaaagcgtaaggtttaggtactcctaaatgaaatgttgtaaatattttgtgtcacgaattcagtaatccgttgctctagatgtccattatttgcaaccctctgtactagaccttttctcgacgccgacacgggcagtttatcacatacaaacgcaactaattttatatattttcaatggactgtgattgttttttctacataattcacgcgaatacacgtagggcaagcctaaacaaaaagaaaacacaatgaaaacgaacaaaaacaatggtgggttttgttattaacattaagtagcttaaagcatttttgtatgggtttaagttttttaaggtaaaacataattaaatacaataatgtacgcaaccctaaagagtatgtaaaaatatatttcaggaaatattttgcgcagagcataaatatttcacaacgaacaaacataagacaatgaacaacgaacaagtgaaaaacgttcttatttaagtaaatattaatgtgaacgcagttatgtataaataataataaagcgtgaataaataaataaagttaaatttaattgttggtttacttacattttgaaaaagatgttctcattttaacattggcgccaatgcactgttactgttttctagcatgtccataacagtcttttaaatgcaggaaataacaactcattgtgaccaactggctggaatttaataaatatgttatcacttctaattttctccaaaactaaaaagataatttagcaggttagttcaaaatttaaatatttaacgatagctaacttgaataccagggctggtcgctggtgttccgcttaaaagcagttgtgcgctctggtaacactggcgttacagctgattgaaatcataacaaaagagcaatgttttcctgtgttgtttatgcttaaaaagcgattttaggcgttattaaggacgcgaaaatggacaaatccaggtccagtgcgtacgacaagttcgttggcttcgtggaacaactgcgaaatacggaatgcaggtgggactgaacggaaatttgattgttttcggttgcattgaatgttttggggaggggaccggcaacagtttgttgctcattacggaacaatattgattaaattatgaagcccaggtgatttccggtggttttattgcccttaagatgaacctgccaacttgttaggccacccaaaacattcattcaacattgagcaataagtgcatccgctatgacgtcatgccacatacctgtaataaaactaatttatttcgaaccccccacagccaaaagcagaagatcacctgctttcagcagattgccgagtgcatcatgtcgccctcgctggcgggccacatcaactatgccgcccactgcggcacggccacgaatgttctgctgctgttctgcgaggatgtggattccgtggttcggatgagcgccgaggaaaacctaaataaaatactgaggtcactcgagaaaacccgggtcagtcgcattcttatggatctgtatggtgaaattaagcgtaatggtaaccagaggtaaggaggcaaatatattaaagctaaaataacaatcttaaaaaagaaaaactttctgcacagatccctgaggatttgcctaaaccttttctcctactatgctccacaaataaaggagaaacacatcaagtggtatgccgtgagattgctccaatgtatgaccaccatttcccagcgcaaggagacgttgctccaggagactctttgcgacttcgtcaagcactttagccgccatatacaacagggtctcagcgatagcgaatcctgcaaactgttcgaggtagaataatatccctaaacgtcttttctttttatgtttaagcgtttgttgacttttgcagacttttctggaccaaattagctccgattgtgccgtcaagcgtcgttgctctgcccaaaactgcatgagtctgattgagaatgcacgcaataggagcctcatggccagacatggggtcaacaaagtgatgggtaagacagcttaaataggaaatgaatttctgagagaaatacgaaaaatccatatgaacactgcatccttactagcaactatagcaaatgagaagttcgtgagtgctgttatttactattagaaaaggaatttaaattcagcagaatgatacacttgtttcaaaactctagggtcagctgttattgttatttcgcaaagagtaacaccattaaatttaacaatattgcagccttaataacagcctctattgtttgtacacttttggataaacgtattcactattcgctgctatcgctgttagttatttaacgcattttcgctacgacactttgtgttcaacaggacgctctttatattcacatcaataatgaaagagatgtttaaaaagcgtgtaacggccaaatactaagcctcgcatagatcgtcatatatatacatatattgttaggttcgtgctggctctgcagctaaaaaatatttttaatattctaaaaagccgcaaatccatgaaaaataccttaccaaaatgtaaagccatcgaactgcgaactacgcgagcgcgggaatagatggtttttggttttattcaaactcgaattgtgaatgcaatcacagccatgggtttgtttgtctgtggcctgtgggcgctaaagggggcgtggcacaataaaagtaactagacagttgatataaattatatttctacagtgctgttggttaccatgcgcaatcgatggacgagccatcgaatgtacgaatatacacacatatattttttccagatttgttttgattttaggcaacgatagcgggcagtttttattttaacatttgctaactggcggactgcagcaataactgcagcggcaaaaacaaaagtcatggcaacgtgagccatgcgaaaatgcttaaaaattgcaaacacaaatcattttttattgaattttcatgaaaatattattggcaaacgtcgacgaagaggtaaatgcaccatagttacgttacatttgccatcgtctttttatgacctgctgcattgtccaacaaaaaattaagttcaaacctcagaggagctcggtgtttggcatttgcaaacaattgaagtgatataccggactgggaaaactaattcatttgctaggactacctttatggaagtcaaaattctgacctcgcccaagttcatataaattaagcttcggcttgactcttcctttgctcttttcttgtccaaatgtttaccttcaaatcaactcctttagctcctgttccggtttctagctctgctcctttccctgccgcctaccggtcttctagtcctgtgtcaactttatgccacttctcggcaaaggcacaatgccaggcaactcttcagcgcatccttatacagtctggcgcctctttttatgggcacccatcatagtacttgggctgcctgtgttctggcatgccccaacaaacagacacaaagtacggtgctcagacctcagaactcagagctcagagccgggatcctagatcccagaccccagaacacagaccgcagagccgccctcgcccacgccatctccgtttgtttgtctccccgcccgtagacgaaatgaaatttatgcacttggacacttccatgcaataattcatgcgaaattgaatcagatattcattcctgtgcagctttaaagcggataatcaacgttgtaaacaaatgccggccgaacgaggccagcaaaggaaagtcggcagatgcaaaggggagctggcaaaatttatgttgcccactgactgatgccgagctaaacaaaaagtgcaaattattttccatggcaacttggtatggcagcacaaatggcacaatgaccaattcataatctgaaaacgctgctgatctctttgaaaacgtactccatggcccccagattgtccacctggtcgagaatgtcaaagtaattattttcattttgacttcattttgggcttctacgtgtatgacagctgcaaaattaattaatattcagctacaactgtatattcgtttgtgtgtgttaaaaaatatcgaaacaattcttatttaaattgtttgatttgtaatcaaataattgataacatttttctctcaaactttgggattacttgattctgactgtgcactttgcagttagtaggcctcaaactaaacacctctattcgggtggctattaattgcagtcctcgaacgtgcccagcatgaagtcccccgattctctgctctttccgttttgggctcgccaattttgcagaaagttcttgcggcttctgccgctattaattgatacacatggaaacaggccgcaagttgtgctcggcaaagtcacttggctgccatgagggccatgtaaaaagtttctccggcgaaaagtgttttcaattttgcgccccaaaggaagaaaatgaaaactaattgagtaacaaacttccaacatggcgttttgtgattggtggcgtatacgtaatgaaacgacaaataagcggagacaacaagagcaagaactgcgggaggtcgaggactgggtggtgggtagcgggaagtatgtgcatgtgtgcagagtctataaatatcagatggaaagttttcaacgagataaatttaattggaggcaatttgttgcaaaacatatgagagaaaagttgccaagaacacgaaagaagtatgaactgcaattggccggccaaacgccaaagaaagtgggtaaaggtatctggtactggtatttgtattggtattggaattgctatctgtaaatgtatctgtatcagatgctcgcgtattgcttattgagctaattggaattgccagcacacgctgcgcaaaaagtttgaagagcgtttttaatttgtatcaacagcagccgtaagtttccctccattaactaacttatccctattatttcttgcagagctcctgctgacggatcagcaagcgaacagcgtgctaggagccttggggctgctgcgcctcctgctgccacagcttatacgcggctaccccggcgatagccacgaggattccgagtccttggccggcaagaagcagcaacagcagcagacgacgacctccgactgtcggcaaattattgaaatttatgattattgtttgcacctgctgagcacgcagcacaccgcgaatcacgccatcataaatgccaccctggaggtcatcaacggcatactccaggctgtggacgccgcatccgatggccaatgtagccagagtctgggccaaagtttgcgccaactgttgtgcaatcaacaactgcagcacaatgagtatttgcggcgaaggaaatcattaaagaatcaaatattccaattgaaaaattacgaagtggcgacaagtcaacaccagctcgaggatgaggatgagaacgaggatgtggatgagctggtggttggggccactgcaatgcaaatgaaaaagaattcaaatgcaaaactgcagcaggcgaagtgtcgagagcagcagcagcatcagcatcagcagcaactcgaggttgacaacagctcgctgggaattaatgctggggaagatgccccgaccgaggctccaagttccgtcgctgatgaaggtatggcaaataaggcagaatgcaagtcgagatggtttgtgggtttgcgtttgggagtgtgtgcgcgcagtcatgtggaaatgtgacatgctgacggaggatcagaggaactgggggaaaagacgggcgtggcaggacagtgagggccgtgaagacagacgggcaggcggacggacgggcggacggaaccaacagacagaccatgccgaaatcaagaaaattgagcaattgcacaggctgatggagacgcccacacacaatgcacatatgaaaattattagtgcatgcttttaggcggcggcacatgcaggaacgaggtcaggccaaatttgcatttgcatttgccgccagcggaatcctgcacaaatatttacacaaattgtagggctaacccatacccgaactcatgcccacaccatttttgcattttccagggggagagccggagtcaacgaagctgcgctgccacattaggaatgccgcacgcagcatcagcgaatgcgttgcctcggatgaggacaagcaggggcaaggacaccggcagcagcgggacgaggatggtgtcgtagtggcggaggatgatgatgatgatgatgatgatgatgacgacgacgacgacatggagctgctgagtgccgagtgtgatgactttacaaccctgtcgcaactaaatgaacaacaacaggcgctgtcagcggcattgaaattgcccacaacaacagcagcatcatcaggcggagcagcaacatcgcaggacgataaactgattgatgttgatgccgatgttggggggctgcctaaaccgcagcatcagtcatctttgcagaatctgctcgccggcagcgatgacaaatcccagcatttgagtgacatcgacaatgaatctttcaacagcatcgatttcgatgccgaaatcacaattgccggcagcaaagagcagcagcagcaacatccaccggcggatgattcggtggaatccggcgatgcaacagcaattggcacattcttcaacaatctgctgtcgcattccaatgcaggtgagccagccataactgtgatacgatattccatttcgtgcaaatatttcattagcaaagttcaaagttagcggagcaagttcaaaactatttccatttgatgttattgcatttcacggtctaccgcagtcgccaccaaatcccattttgcccacaattttgatttttgcttttgtttctttttttctttgcgccaaacaattgtgcatctatttgcaatattcgggtggcattcgatggcattatttgcataattgcgaccgcgctgcagacgtgactcgcagccaagccaattgcacttgcgaattaatgaagcgtaattgttgccgggttgtcgactgaaattaggcaattcgtgcacaaggatctcggctcctgaagaagaaggatgtaggatgtaaagtgcaagtctgcgaagttattgattttagtgtatttctcattgagcttaaaatttgacccaattagtattgtgtttctcgttctcagtagctcactttaggctaagttgttacttaagttaatttagtttacactttattatgatacttatttctctccgtgcacttaagatgcatcttgttgttcacttcgttgtcttcagtccaaatgggcaaacaaagctctgcatcctcgattctaatgctatttgctgacatttcgatcccgattgatacgacaatcaatcgttgatataatttattttaatatttaaatcgctcgactgcctgactgtgtggcatcgactcggaataacgagcaccataagtatgccacacttttcccctgacctataaatggaaatgaaggaagagcgacgactggcagacatgatgccagacccatgtcctgtcgttagctagtgcgcggggtggaggctagtaataaacaaaggaaatgtactgcactgagccggaagtactaattaagcgaatgagtggtgggcggggcatagagagtcctggacgggaggggaataaagacaaccaactggatgggcgaaggacgagatggggtgcgtataaaaacccacatccacttgacgtaaatgttgggcttaaatccggcatttcttgtgtgtgtaagtctctgcgagggatgcggattaagcttgaaacatggcaatgcatttgcgctgtgcgatggccccaaaactccctctgccctcacctccatcatcctcccgcacgccaacctcattgctggttttcttgtgccgccactgccacttggccaaagcatcacactgcaagttggcaacaaagtggttaagacaaatgggttacgtgataaaatgcggttactcaaattgcatgtatgcaagcttacatgttgtgtcacagtatactcgtacgtacacggatacgtatacacatacgtgtgtgttttcggcgcgggtgtgcatggtgtgtatggtgtgtgtgtgtgtgcgggtttatttagcattgccaggaacagtcggccaaaacgagaggagccagccatcagttgctgcactttgcatgctctgcgcttggctcctttttattttcgtcctgcccaccgcctgttgttactgccgttcctgttgttgttgttgttgttatcctttctgggccgcattagttgtttttgctattgtgcacttatgcgctatcagcctttttgcgctgctttccctcgtccgtccgcggtagttattgccgcttgtttgtttttgtttctataaatatgtacacatatatctaggggtatatgttggtgctcagatatgtgaagccgcagccagatccgcccgtctttatctgcattacagccccgacgattagtatactcttggaaatactccagggacatacccttgcgatctgagctcgtaatagaaacatctttgaatgcttttggttttaaaggaattaatgtaggttctttcgtatctcagctagaaaatttataaaaaaaaatacgtactataatagcaatagaataaatattatcatcgattattactagcttttattaaaagatagcgagtcattatgtttaggccagctcacttatcctgtagtcatacacaatttttcgcgtctgttggtcgtgtccttccctatattttcgctgttttttttttataccctttcgctgcatccacatatgtaacttgagcagtaaaaaacatttgcatgtgtgctgttaggcggagaggtttgcccgtccgtgtggcgggcataaagtagcagccatggaaccatcgctccaccgttctcgccgcggtttttccgaccagagcccgcgtttcccacgcggttttcattgtcgcctagtttggggtttcgctcctttccttgcttatacgcttcaaagttgtatttgccattttggtgtgctgcattttttgtttgcgttttcagcgtgattttataataaaaggaaaacactcgaccgaagttgcggagctgctgccgttttcacttttatggaggctagagctattaaagcataaaatgccagccaaccccaaacataattaccggcgagtgtatgtgcatgaagttccataaaactgcatgcaggatccctgatttctgggtgcttttatgagcacccagcttttcctaatttgagggataactcagattgctggttttggtaaatcagttttttttttagatgttggattacttgttaaatgccagatgttctgcttaaacttcgatttgagctctggtctgtggggttttagaatcttaagagaatgcttttgaacatcagaaactactgtttgtttggttttaaaatttttcaatttaagcgaagcataattttgcgtacatttgtaaccaatttgctgggcttaccactcccgcacttaaaggatgtgttcctggaacactgatcaggcttcgtcggtagtttatctgccccgaacaatacatgcgagcactctgaccataaagtgctctgcagcttccgttggccgcagtcgtggaatcgtggttgctctaatttttacagctcttgcatgcggccggaacatccattagaacaataacaaagaacaacaacaacaacgacagggatagccacaacaagtgcatctaaaagatgcagccatttttaacccacttaagtggtcagtgggggaagcgagtggctgcactatgctcgtactttccatgaaattgaagttttcaattaattttcaatacaagatggagaaccgggaagtttgcccgcggcggcaagctaatagaacaacataaaaagtagctaggaaaatagtttcagcggttttgccctcacatatacgcacacacacacacacatacatccgtgccagatacttgtgcccttatggctcacaaagtttgccacgatagacgaatgtgccgggtaattggccgtctggagtggccgcaaattagccaacgccattgctggcattagtgtcaaaccaagttatctgctagaccttcgacggggcgctctaactctcgtggcttttgtgcttccagcttcggagtcggtcagtaagctctttcgtcaatcaagcggctctaagtccacgccctccaagtccgcttccactccggctcccgccgacaaatcggatgccatctcggccgcctcgcttacgctttcgcttacctccttggccagcagtaacctggagccgccggaacggcagcccttgattgcggagacgcccacgccagtggaagattcctgctcaataaccgcctcgcacacggcctccacagccctcatgatggatgctccagccgtggaagtggcagcctctaagcccgaaacaccgcagctgcgtggcacgcccaatggtaagtcgcttgccgtcgcacctttaggagacactaattagaagctttatctccttagctaatccctttctagtggagaactcgccgctccgacagacagttgtcggtcgtgccctgatcaccgtgaaaattggcagcatcctggagcagtcgttggtctactatacggctcgcttggtggcagctcggtttctgctcagtggacaagcggcgggattgcagcccgatagcatcagcagagtgtctatcaagagcctctccttggccgtgattgcccaatgtgtgcgtttggctccgaagattcttcaactcagcctggagattagcgagcaggaactgcagctgctggaggaggccacctctcagattggaagtggtgatagcactcaagtttcgagtccccagagcagcgacaattcccaggtgggcggagagaagccacccctggatagtagtctcgttccgactagcctggaagagaacctgcttctgctagacattaaggatgatcatttcgggccgagcacatgtccagcatacttgcagtcagcgacacccaccctaagccgcagtgcagacgcttcagttctcctacttgaaggcggcactacttcatcgcggtctgccaagaaatcggaagagatgctctccaagtccgagatcattgaaagttcgtacaggcccacagtggcagttgaggatgtgcctccattgagcatgcctccacgtccacccaagcgcacaaagtcaacgcgtagtcgagtaggagttcttggaacctcctctaccactgagagttcttcacctcaaagccgtcagaagctttcggatatcctgctcttccatgaccactgcgatcccatcttgcggggtggcgtccagcaggttgtgggtaacttcctacaatctagtggggctggactgtttctggatctgcaacgtggtcttggtctgcaacacttgttggccattttgctgaaggtaagtgcgtcgatggtcccatacgcgatattcgcacaaagtgtttcatagccagaggcactctgactaaagttcctttaatgggtacctcccatctgccggtgcctggttaatggtaagctacattacatgtatgctaacccgctttgtatatctggcgctatatctttgtcatagtacgcccacttgcactcctttcctccacctttcactactcctttttctcccctgcgtttgcataacgcatacgccacgttgtgcgactatttgctttaccctgcgtagggtatagtgacttgtttaggatgtttgttttggatttaagctataaacagtaccttaattaacgcaaaaaacagaaaaaaatagacaaataacttggttactcaagaattttactcagaaattcaaaattcccagagcattccatcttcgactggtccggattattatgtggcagcagcgaagtccgccccctattttcccctctgtgcaaacattctatatctataaatatgtaccccaaccttttcgctgtacttttttctatgttaaaccatcaagctaacatattttaacacatgcaggcaaacatacacggacacggacacgtgtccatatcaatggctgctgccttttgaatacttttcagctccggccaccaactcaagcagccaagccagttgcagttggagcttagccggcggcattttgtgtggttggttgtttttcatttgaaaataagaaagaaaattcttatcgccttcgcaatgtgcaagtgcaaatgcccctaaagggagcagcgcgcatccgttgccatcttactttctcccatccttccattcccatcaccacaccatcccacgattccactatcccaccatccattcccatcttacccaacttacccttccggtatgcagaatgtgcgcataagttgcacattgatttctgtctggggattggcggtggcagtaagttggggctccgatgcggggatggtttcttattgaattcaataatttagtggccagcaccgaacatttaaattgctgctggctgttggcctccccaaaagtgcaatttgattatgcaatgttgttgcagcgagatgcacgcgcagatgaggaggaagtggaatgggaatgggacgcaggacgtgccagctgaaaatcacattagatgcctgctatataatggctgcaaatccgtctcaatggcacttgccagcataccaaaattgaagccaaaacgagatagagattgttgggaaggggatcgaaatggggatggaaaacgggaagatcctccccggagctggctatcccaggccattccggggccaaaggcaaagcaactttgataacaatagccctttggccgggtctgcagctaggaaaagcttgttagggattcgttaaaaatgcacacactctcagatggatgcccggatggagggaagggatgcccgagagctggccactgtgtgattgtggaaaagtttttgcttgtgcaaacaataaaacacaaattcgcttagccaacgtctcgttttggccgtggccgtcttatgcctgttcttgagatcctgtataaagaaatttagccgaaaactttttgctcttctccacttattgcagggctttgaggacgagatccacacagtggttatacaagcgttgaatgcattcgataagatatttccgaatgtggtgtccaaatatttgacagagccgccatgtcattatcatgctcatcagcagcagcagcagcagcagaaggagcaacagcaacaagagcaggacaaccagaagctggagcaggacctgcaacgacattcaagtggacaacaaaagcgttcgggccaggcgcaaacatttggccaacaaacttttgcaaaggaccaggataatgccttaagcagtcaacggcagcaacaaaggcgtcctaacgatgccgggacatgtgccaactcctcggccactgataatgatgagctactggctgctcttttgaatgatttccaattgcaatcgactggcatgcggcagcagccaaagaataatagcaccgacaccgggcagtcgggtaatgagcccgatctcgaacccaatcccaatgccgcagtggagcctttctgtgtgtttgccatctcaccgaaattgctcttgagcaaactccggctctgccatcacaataaatattggctggtccagaataaatacgccgaagttatttcgaatttaaattacgtgctgctgcggtcgtactacgcaaattttcgttgtgccatcgacaacaaaaacagcggcgccaggaagcaggactccaagtggccaccgatggatgccagcagtgtctgccactctgtacgggacgcggagggcgaggacattgtctgcacttatgaggtaagcagctaaatcgtcttattacagccgctcccgctggcagtccaccatccgccgctcgccagcttgtttattgtgcagattattttacgagtgtgttttcgcccagctctctggagcgtttggagcaagtgcgccagagcatctggagcatccgaggcaattcgagtgccgggatggggcactcctctgacaactcttattgaacatttgtgcactcaagtgtgtggccgggctctttgtgcattctgccggagactgcgagcgcatcctgccgagtgccgagtgccgaatccagaatgacgggttccactgacagcctgacggactggctgacagagcttgggggttttccttttcgtggcaccagctcgcacatatatttgtttatttattattttgacaaagctaagcaatttactaaatggcactgagagggaaaacgtacatcaactcgagaagagtcggcaaacaattgcgccaaaggacgacagacggatcaaactgaatgccgagaaattgtaatagcatgaggagagcttaaatgtgtgcctacaatcctatctattgatgtggagcattgaatttcgtattccaaacgtagttgcaattatggttcactgtgttttcgcagagttcaaaacttggttgcccgcattttttgatgggcgctcgcgttataaacactttacttcaaaaaccattttgccagagtaaaaacttaattataaattattatatattatattaaaaataacgtagtaagaatcaacaattttttttttaatattcaatataacaacaaaggtcattttcaaatcaaaggttggcttttcatgctgatggccattttcttcagtgttctttctaccttgtgggccaaatcgactgggcaaaccgcatctgcacggccattcgaaactgccaaactgcataatgaaaacttggctcactttttgatttacaacgtgccgtcaactgactcaaaagcactttgcccccttgcaggcgcagtttctggctgaacttttacatctgctcggcgacgatgatgcgcgggtgcgggaacatgccgcctgctgtctttgccgctttataatgcaaacggcgcgccaggacccatcgcaggaccaaggagcaggaggcggaggtggggacgatatcgaaggcaatggcaacgtcaacgttgaaactcaacaaactaatttcaatttgctgtgggattttttcgactatcgcatatttggcagcatgtccgtgacgttgcgtaatttattccgggccagttcgacgattgtgccgcctctggctgagctggatgcattggccacctcgaattccgcgccatcttaccccgacactggcagcacgtccggctcctccacatcgacatctgcctcatccggaggatccgcagcggcagtctccgcggcgtcggcctacttcgaggcaagttacggtatcggcatcgccgaggggcatgtttttgcgctggcatccgcgtcccaacgtcaaatcgcgcaggaggaaaaagttttggccaaagttttgtatcgcttgacaaataaattgatgacgctgaatgataaaaatgtgcaggtaaatatttgtgtttgccaatcgaacgtagccaccgaatcgaagcgaatcgatacaaaccaatctgcccacccatttcccttcacagtttggcataatttacgcgctgcgcctcctgctgaggcacttcaatttcgtggactatcaacaggtctggctggaattcaatttcgttgaaatttgcattagctatgcctactacaacaatgcaacagctgcggacctcggctgccagaacgatttgattgatgtgatgggcaaattaatggcaggtgagtagtgggctggcctacctgccgatcacaaaaggggttactctgttatttccttgctggcacaatcccattcccaattctcatctccataaccccaaatttcccaaccatcttaaccgacattcacattcaaatgccgcattaattcatggctaactggtgattttttttttggtgcgcctgaatgccctcacgatatttcagatatctctgatattttcgatatttattggatttattcgactggggcggtcagtcgacgctttgtggctcgtttggctaatttaatttgaatggaattacaaaagcagtaatttttagtctcagactgcatatttaattgcattatgctgtaatgaatgctgtggaaacgtttgcataaatcattttaattaattgtttgtcattaaatagatttgcataaatattttcatgctgcggtgtaagtgaccgggcgcagtctattttttttagatgctattatttttaaatttaatcaagaaaaacgggaaattagcataaatggttttaaatttccgttgcactaaatgtttacttcgctaccaaaaaatagggaattaactatggtaacccccaatacagggtgacagtgtggacgaatatatgatatactctaactatgaaaattattcaattcgtgtggttttcatagatgtacgacatgcaaacgaactttattcaatctaatatttttggttaaaaagtacagaaatgttgcacctaataggctgacgactacactgactagcgctgaaactggattctgcatttattcgcacacttttttcccatgcaactaaacgtttttaatttaataattccgcacggcattattaacaaagtgcatctaaaaaatgccaacaactgtagcaacatcaacaacagttatgcagctagtgcagtaataaacatttcaattcaatttgcgaaatgtttatgggtcggagcaaaaaaaaaagcaaacagaaaaccaaacttcaactcaatttcattagggcatttcacaaccaccaaccaccgaacaccgatcgaactccacctctacacttcatcgcatgcattaggatgccataaattttaggacattgtggatgggatgcaaaggatggggaatggcgacaggctcttcattatttatcatgccggtcgcgtatttgctgcgcgctaatgtaatccaccataatcaaaaagtaattaaattattaataaaccattaaatgttaaataatttttgtgtcagtgacgccggctgctaccacaccaccatccctcgccccttaactaaaacacttgccatggccatttgaatttgcatccgcatttgtgccgcttgcctgcaatgtgcattcaacaatttaatatttaagccgcatgtacttatgtgcccatgtatccgcctatccgcgtatccgtgtgcctcgcatatctggacatcgatttaaaaacagaatcgccaaatgttttccgacactctcgcgtgcgcttcatgataagttttgacagttgccaaaatgtatgcaaatagtttccaattcatgctcggcaccaaaacaaacagccagcgaaatcctttaattgtggcctatgtaaattcacagttcaccgatggcttaaagccatagaagcacctgcaatcccagtggatttcgcgatatgtgatggaagttatataggtctttgtagcgcacttacatctaaaatccctgttcaattcttcctcctaaaaaatacacttcaatttcacttgataaatattcaaaacaatctttgttttgcaatatacatagctcatatatatatatatgcaatgttgcagctcgcttctctaattttaatgaactttgaagatgattacgttagattttaatgaatgggagtttgaggtgtactggactgtgagcaatgttggagcttctgataataataaatgaattttaagagccctaaggaatcatttatcacaattgtttgtgtatagacttgtggatacggtgcggttaaattcatctacttacacatcgtgagcggaactacctccaagtccaccttctgtggcctcataatcgaacgctgacctggcgccaaactgggaaaaataactgaaatgtgcgattaataaatataaattggtaacggaagaatggcggcgtctcattgcgattgtgtgcaattttcaattaattagtaaatgtaatgcaaacggcgatgcggggctgctggctatccacttgcacattgtggcccccgaaggggttctttaaatggctcccttaacacttaatttttataaatatttatgcgcatacaatttaatttatttgcaaataataattttttgcaatgccatttcctttcgcagccgccaaatacaaatatatattgcttattgccattgaatactgaacgttgcattgttgacacataaattgaaatgttgcgtgcgccgcacacactcacattaattaacgctgataaatcatagcatactttgaaactttttccgcttgttacctatgcaatttttgttttaatttcgcattattttgccgcctttgccgatcctacatatccacataaacgcgtatattgccatggcaatcccattgaatcgcgcatttttcaattgcaaatccattaatgcgtttttcattttgtgagctgcaattacgccgcatttgtataattttaagagctcgtttgcattttaacacaattagcccaggtgggatcacttaatttgccattaataagccgcgctaccgccactacccatcattgcatcattgcatcattgcaggtgccatgctgagctcaggtgagccaaacaccgcccacctggactttctgctgcgtcacagcgtcaagatgctgaacatctactatcacctggtcaccaatcagcgcccacccaccgcgggatcacagtcgggaagcagcagctccaagcagcccaagagcgagctctttgcccgcgaacagccagcggcaacccttcaggctctgggttactttgccggcgattacgtttacatgaaactttacaacattttaagaggtgctaatgacagctacaaggtaagtcagaccacggactcgcagattccgagccgggaaccgccattaagtcgctgctggcgccgaaatggcaaaagttgcgcggcacgtgcactgagatttcccagcatccagcatcacaggattcggttcgagatggagctcctgatggagatggagctgcagctggatgcacgtacagcgcaatgcgccgttttatatgcaacactttccaacgctgccgcagcaatggcaatgagttgtaaaaattcagcccgcgacgaaatgcagccaacgtagcatccacacttgacttttgccactcgcagctcaaacagaaaacttctccactcggagtgacttaatgtgcgggttgcattaggtcgccagcacattgcatccgccactaactcctcgttctccttctcctggataagtaactcgagtttttctatttgtcctccccagataaccataaatcaggaggccggcagcttattaatttgtctcctgaaaacctgcctccacgcagtgagcctctgcctggagggcatggcgagtgcttcgcccccggagctgaaattaatcgaagaaatactccactatttgaccaggctcataaattatgcgcccgccgagtgcgttgcatgtctgcggcaactgttgaaatatttattcgcccaaaattatgccagccaagtacggctgcagccatcggccatcggtggaaatggcagtgaaattggccaccatgccgccttcatgcgtccctactttgcggccaagggcaggggtcacggcgccagctccacattgttgccaacaataaattcaaaaccagcggtggcggtgggatcccagcgaggggcaccaaccgacgctcgccagccaattgatgccggcccactccaggacatgggcatgctctttgtgcacggcctgcagccacccactccgccggcgggcgactgtgtccggcttataaagctattcgagccgatggtcatatactgtctgacggtaagtacactgcgagaagcttatctttcatttaggctacattttaaatgtatatatgggtaggtaaactggtttccaaaggtacatttttattttatataaatgtccaaaatgtaatacccatttttcccactgcataaacgcaacgttggccagcgattgctaattaattttagttgtagccaatttgtttgattaaaaatgcacagacacgaataccgaccatcctggggagcagtccttaatctcttacgtgtgtgagtgtgtgcgcggatgggtcagagtgcaaccattgatattttattaatggcaaaaatttgcagaactctagtatttctccatgtaacatgtacctttcccttgcgttcccttttcagctcttcatgaaatccaatgcgctggtacaagcgcctattttgcgattactttcccaactgctggacttgaatgtgacctatagcatactggactcgaagaatgtaatatttgatcaggtactgagcaatatggatctgattgaaggcggaatagataggtaagtgaatacaagattgaatataaattgaataaaagagtttaaataaatcgattaaatatcccctgccttaattttgatacttttctaacttgtaactatagaaatgcgtttatcatggtgccgcccatgctgagattcctggtgcagctgacgcacaagagcgaccggcagctgatcacgatacccaagatcatcagcatcaccaacaatctgctggccaacggatcggtgcgcgtggtggctctgctggccctgaagaccctaagctacgagctgttttttatgcacagccagctggaggaggcgctggataccgagggccataactcagggcgagacgcgtgccagagtcctttgagtgcagcccccacaccggaaaccagagaggccttgctggcgcagcgacgcgaactggacacccaacgagaagtggtgctgggcatgctggagaagttcatcgaagcacggccgagtcaacaggtcctcgccctactcctgctgttcgagcggagtgtgcagcaactggatacgccaccgtatcgcagtgcccaggatgcggacgccgtgtacgggacgctttgtcgagggctgtgctcccgccaatggcgtctccacaacgctggggatctgcggctcctggagagctgtttccgcaataacggcaaccatgtgctggccgatagcaagagattcctgcagctgttgcagcttttcatcgagcaggtgggttaaatatgcagtggcctaagcttgacaaggcactcagccaattcacagctgcccatcaagccctcaattacggcgtgcattacgactccggcagtcctgtgcctgcactgcttccgcccatcagtccgtccgccctcgactgaactcataaatatgcgagaagcctgcttaaatatagatgcccacacacacttggaggcgtcaagcatattgtaatatttatgaatgcagacagaaacttaaaacccagcccgacatgcaaatgaacgtaaaactgtctatcagccgccggtttggcaggctgccaatgcaaatgacatatgaatgtcctgagtaggtgtcatcgggcgtgcctggcatccacttaataatataattgaagtaatgccacaaattacaacactctcagtttggcaacgatggccgtgcgacttaactggtacttagggccaacgcctgcaattgcattaattgaactcgatgacattaaactgccgactggcagatgttcgattcctaagatgacggcccattgtggccatgtctcatcactttccattcacttctcgggtatccatcgaagattcaatgctcacagggctttgtctgctgagtttaaaagctttttccacccaatatatacaaagccggtagccaaacacctgtaggccctcctcgaccctcgatacccgatgctcatcaacgatttgtcattgccgccttcccgtccgtccatctctccgtccgtccgtccgtccgtccgttcaaccctccgcatttacatacacacgaatgcacttagttgcagttacggggcaattttttattttgccctgctgttgctggtgctgctggtgttgttgctgttgccactgctgttgctgatccatgtggcactgtagttaatgtgccacatgtcgtatacgtgacatttttaatacctacgcttcaacgccgcacattttcaactattaatgcgcatttaagctacacatgcattaactgtcgggtctgtcttccatgcccgtgcagcccgtgccgttagggccagccacgcccccattcgctcatgccatgcccccgccgcccattccgaacccccttcctatagaccagtcaagcgttatgctacagttaaaaccaacttaattacagagtctcactagcacagctgggcgtgtgttggttcagcgagtgttctggggatccaagtggagtacttgtcgtaggcagagtcaattgcatgtgagaactactccactccactactcgactccggtgcatccgcgtgtctaacggctttggccgttggtcacccaactcccatcccaaatcgcccgtattaatggcgaactgacactttactgccgacggcaattcaacttcatttagcttgtaagttatgcgcagagcttaaaaactttaactaattatcgtttatttaatttggacatgcataaaaaagatgaggcgacggttgggcgaattaacagggtttacgcagtctttgccgctcaggtgccatgagtaattaagtctggcctcccactcgttttcgcccgggtgtttatgtgggatgcaggtgaatagtttatggctgcagcattttaattgaaattgaaattgcaccgcaacttaaataacattctgcgtgtaaacattgactcgaggaggcacgcgagctgtttagcaaaaaatattctgtttaaaatgggtagcacagccaatgggaactgcattcgccacatgtgcggaatgggcaggatggttctgtgtcctaattactgccggaaaatatgttgatgttggcactggcaactttgtcacacaaatttatgcaaactttcacactttactgcactggcggtcaacaacgaaaggagtcatcagccagtgtacttacgtctcttctcaaacgaatctctttttacattttctttgcagggcgttgggaactttggtgatttagctctggccatggtaatgctgtccaacgtaatccttaaaacggaggagatttatctagtgaatcacattaaactttatttgaaaaataatccaacggccgagcgtcgtctgcaggccctgatgcccagctccccatcggcagctcctcattggcaggacgaggcaccatcgacgtcttcggcggcggcagctgccagagcggccgccgcatccttttccgccggccgttcctccatcagtgaaattaactatttcgccaaagttctctgcgagaagctgctcgcctgtttggaggtcctcctgggcttggaaccgagctcatccagccacgcctactgccagctgaccgggcgcttcatggatgccctgctcaacgtctgctgtcgctcacggcacaaggatgcacttcaatcagttttccgtttggttttggccgagtctgaatttctctgcaaatactatagcctgctgttgatgagtgccgctggcctggtcggatcctacttactggatgccgtgttgctggcctgcctgaggttggtgctcgccatgcggctggaggaaccggtggctcttttggaacaggccgcccagctgccgctgaagaccaacttgcagagggcgttgctacgcgaagtttgtcgtgcaagtgcggtaagtgaactaagacaaaaatcgatgttagaattataaattaactaataagtaatggttaaacacagaattattatgcctggtgttattaatacacatggtttaaaatatttttctgacacttgaggctttgtctctcaacttttttgcgaacaaatttctcccagtgtagctaagtaaagagacggcagcggagtaatggcgaatcagacacattagtttaatttgaatttggcagacgacagcgttgccgggccgccaacacccccaatccccaccgcccgtcctccggatgccccaaccatatacgacaatgcgaatttttccagctgacagttgtcgcactcgcaattttgcggttcaccgcatcgggtttttggtttcggctttcggttcaccgtcccgccggcgacagtgagcctttaaacggttggcttactttaagcacagttcattggcgggcataattttaaatgattgccactcgagcatgcgccacttgttggataatggcacaatcccaattcccatccccatccccaggacaatccccattatttgcctgtgacccgaacacatcacgattgtccactaattgcagggctgcgattggagtgcgcaacaagtgcgccgactgttcgaaggcaggtatctgaatttcctaattgctgaccacttggaatttatttgcgagctatgccaagagcgtcccgagtgcggctcattactgcaggtggccttgttccggaatgcccatcgattgagcagggtaagttgccagagacttttgcataacaaagcccagttgcctgcttttgtgttcgtcctttcatcttgtgtcccccattccccgcccagcaatccgttcgcatcgtccttcggctattgggacgtctttgcgagcccgctgaacgggaagcctccggagacgttggcagcgatgcggatccaaccctgcaggccatgcaactcctgagtcgcctgcaccagctttatgaaggagaacgctcgctgcagttgcccatcgagcggatggcccggcggctgagcgcccagagtgggcagccggccaggaacgtcatctacgagcgtctggtggaaggagacctggccggcggagaggaccaggacgccctgcgaacccttctgtaagtaattcccctccaattattcatcccgggcaatggcaatttatattcatttcattacattgctgcacgttagggtgggtcagttaagtaagcataagaaaacttaaaaaattcatgtggtttgttacattttgcgaaacatttttataaaaatagatcagatcaagaagtatctgaagatctatactgacattatcatcacatttttgaatatacaactcgatccaccctcgtcaaagtcgtttccctttcttaaccaacgagtacccactgaaaacaaaccgaagagtactcaaagttcggatcagaagactctcattatcctccatgcttttatttatgtttcattgcttcgcatcgcagactgaaggacttggagtgccgccaggacaatgagactgcaacgccgtcgcgcataattgatgagagctggctctttgcgcaggtaaatgggacaagcacttggccattatggcactgccacagctaatttgttgttatttttccccttccccactgccgctccattactcatcctcgatgcctttgacaacatttttccaccatcatccaccgacagctaatcaaattcgccacccagcatgccgatgccccgcagcagcagaagcaactaatgctgctgctcctggagatccagtcggagccgaagctgcaacgtctgctccgaagtctgggcaccgagcatgaggcaaagctactgcgccatgccatcgctggttccctggctgccatgatgtccgccttccggcagaagtgcatccagcatgcaccgcacatcaactacatgcaaccaacgccactggcgcgcgtatcctgcgccctgctcatgtcaagggtggcttccacagaggccacaaaatgccgaaacccacccaccggggagcaactggatgtggcgcgggcggtgggcgccctgatggcctgcattcggaatgcggagcaaacagcactcatctacatcgatgcccggctgatggagaagttcgtggtcgagcacctgctgcgccgcgagcatctgccgcaattgctggcctaccttggctggctggccggagcagcaaaacagattttggccatgccaacacgacaggagtcggaacaagacgctctgggcgtgctgctggccaccgtgaatacacttttgcagcagccccgcgtctggcgggagcttaatgccagttcggatccctcactgcgttgcgaactgctcgacctgctggactcagtggctcgttgcattctgcaggacaccattttctatcgaaggcaccgccgggacagaaacaaggccaaaggaccggcaccgcaagcgattttcctggccaaattgattgaaacccaaattgaaatcgagtccctggccagcggcagggtcttggcaggcgtcgaggaagcccgactgcagttcgcaggtcaggatctggcccgattccaagtggcattggtaagtgacaatcggctagtcatttgtcagtacgacccaggagcactttccattttctcgattcgattctcctcccttcctccagtcgctggtcacctctatcggcatctcgctgctgcgaacgcaccagttttatgcctacgcggtcacaccccacgagctcatccagcagccaggcgaccagcagcaggagcaacaggcagatggcaagctgccctccattcctgtggacagcctgagcgatgtggatgtcctccgtcaatttgtcaagaggtgagtgtaagtccggatgaaatatgaatggcttttttaagttaaaagggctgtctttcacaacaagttaagtttcagttcgacgcttaaattgtgttccaaaaaaagtttacaaaattaattagaaaagcattatatccatccatctgattatgctgaccacttatatatttagactatatggtactgggccgactgctaattaaatccgcttatctttcggtgctcaccttaaaccagtcaagttgacaccttgcctgtaggctccattgtccgctttccttatcaatcgagcaggctctgttgcattgtcctggctgctgccgttgctgttggtgtcactcctgtcgttgtcactgtgtccggcaacagcaaccggggagcgggagcaacaaccaagttgctgacaatgctctgacagcggtgacgagcgcatggcagctacatggagcgatgatgaggacgttggcagcggctaaaccgcaactggaaacatcaacatcctgttgttctattacaagcacaagcacaaatccaaacatccacacatatgcgagagtgcgggccgtaagacttcattgtcatcgtcattgtccttggcttgtttgcctcgtccttgtcacttgacaggctccccaagccgttatagctattgctccattgtttcgatggcagtcgtcatcattacgctgtcagccgaatggcgaaagctgaattgtcatcagccaggaattgggcggaataattgtgcacggctagatgtctgtggcagtggttgttggttggctggttgttgggttgtttggttgtttgcctgtccggagcctaaaacttaacttccccccagaagtatgcatacttgcactccgctcgcactttgtcgccccaaccgggcggcaaagccaatccagttctggctttgcccaaccgacaagcgcacaaacatcataaccacatcagcacgtgaactggggaactgggaaccgggcaaccagcggagctgctccagcggcagcgaggaaagctgcgaggatgataacgacaaaatccccaaagggctgacggagcggaacatcaacaactctattagacgaaactccgcgcaggatcagcatcagcatcgccggcatagacatgcatttcggccaggaggagcaatgggtatgcggctgaggggatgtggggctggagagaggatgcagagatgtggggataaaagctgtctaaaagacacagcgctgcaggaagagccgccgacgaggcagcgagcgatataaacaaattatgagcagcaaagtgagataaatgcatgtgtgcgtgttgcagatggctgccaacaaaaggcacgtcatgccaggatgcggatgcggatgcggacggctgcctctgctccagaaacattgttgctaattgcacagaaaccaccacgatgcacagcagaacaccatcaccccgggctccactgcaagtgatgggtgtgatgcctgatgcctgatggctgatggatggtggatggagctgccgcttcaccgactgcccaaagtaatcgaagactaattgacattttaggcctgctcacattttactacacatggcatatgcatatgtatatacatatgtgtataggcatatggtggcatgtatattgcatattttaaatatttgaagaggacaggactaattgaattaaaatttcaagcattggctgaaaacattttatgcagaaatttgcaattttcaattaattacttacacacacgcacagcagacgactatcggtaattaaattgacactcatagccactttgaattctggattccaggctctccatcttcggattcaccacccggcagcagttcgaggagtacttcatgacttgcctgctgctgatcaacaagctgtacgacgagcacatggtcgatcagcaggagcagttccagatcaagcaggtctgcctccaggccatcctcgaacttttaatgacgtacaaaacttttcccattgtgggcctggccaacggacagttccatcacaccactcgctggcagcgcatcacttgtgacagcattaggtgagtcccagttccacttccacatccagcagcttcagttccagcttgggtatgggtgcgggtgcgggttcgggttcggtgtggaaatttatgaaaattaaaattcacagagcagtggataaagtttttaatgtgtaaatggcaaaaagtacaaattaaatgccagcaaagttgagtctgcgaatgagcgtgtatatcctgtgattttcctgtggcacatattatatcgtcccccattacgaaaaaatccttcaactttaaatgcacaactaatttgttaacatgggagcggtgcggccaaaaacaatttggtaaacaagttttcggatgcttttacaatgtctgcgtttttaattaaaagcgacaaaaagtctttgtcgatgggaccacggatattgcatatatgtagtaaagtatagtatgttatactattgttatagcgtggcgtgacgtgagcacatgaattatgaaaaagttaacaagtgccaaactcttttttcatgtctcctgctcgtcgacgcgattcaattgcctggaatggcaaatggcaaaaacatgagagccaaagctgaaatatcaaaaactctgttgacaacccctaggaaattttcaaaatacatattttccgtattagctggccagcaatggcttttaaatgtgttctgtttgctcttctgggtctgggtaacacgaaactctgacaaatccttgtcgcccgatgttgactttataaattagtttttaattacaagcaaatagtttttactttccattccgtctgctctgtcaacagggcgtatgcgccatttagttgatagcagttggcagcaataaacgtacatacacatacgcaccttatcgccaccgacaacccgaacatttcccacacatccatcactatcgaatttatatatatgtcatatatttcagcctgaagaaactgcacaaggtgcaattgctggtggatgcgtgcaatgtcttctatcagcccaatctggagcggcagctggcctacgacaatgtgattggcacacgcacctttgcgcccaatcagtacgatctcaatttcagttgggcccaaatggaggaccaggcggcggcgggagtgggcgtgggtgtgggagtgggcctatctggcggggagcaggcaaacacggcggacattaagcagtcctgcgatgcggatgtgcccgacatggcaatgcgcaactatcgccattttacgcagctgtcgggaattgactttcgcagcagcacgcagctggtctttgacgtactgcagcagatgatcgaggtaagtcctgtcaaacttttacgggcagtcacgtcctgtgcattgccagcattcgcacatcgcatgctggccgggccattcgatgggttttaatttgattatgcaagccgcttcgcggacattacgatgcagccgggtactcagtttttgggcgatccttggggctttgagttgccagtgatttcatttgcagctgcaacttgccataactcttttgcaattccctccatccttcgacagctgaatcacatcctggtgctgcccaatttggtaaagttttgcgagatctgcgagagtcgcgaccacatcaaatggattaaggaacgctgcctcaaactgcaggagcaggtggccatggacgacaccatttcgcatcaggtaagttaccatactgaaaactctagctttttcgtttaagagtaaaagaatttctgaaatatatgtgtctcacattatacccctactgaattcatatttactaagcattatttcagattttatcttaagtttaactttgatgtttctgtttcctggcaccactccgccagtctattgtttttcatcctaatgttctctgcactttacagcacataatctacttactgtgccgcagccaggcccttctgatccccagcctgggcgagctgcaggtcctgtgctccttgattggcaacgtctacttgaagagcacgcacagctttatacgcattgccacgttgcaggggctgctctgcctgctggagtgctgcagcaagaccaacacgacaatgggacggctcagtgaggagctggcattgttgcgatccctaattgtgggctacatcaatcgtcatggcatcattgatgagaggtgagtcccgaccctttatgcaggttgaaggaaatgggagttgggaaataggaagccggaatacgaaataccgaatccgcaatccagaatccagcagaatccggctgctgtccataatttgcctcgcaattaacagcccctcatccagctggtccgtcggtattatcagcctgtttgcagtacacccggattcaattggaagtgtgtcttacccgaacggcgaaagttggaggccatatctggtaccatcttcaattgaaactcatcaactcgacttgactgagttccccgggtctcaaactcctgcgactacatgccagcagtctgtatatatatatctgttccacagatccactcactaatggcaaaagttctcatttcgcattagttacctcggctcatcggcatctggtctctgtggtctgatgttctgctgctggatccacctggccgccaccccttttgtttagggtgttatcaaaaagttttcaaggactgcgccggaagcagccgaacacccgttcccctcccttggtaagggatatgctggcagaggaagttgccataactcgacaacgtgcagaacatcgatgaaccacggccattgaaactttactgctgctttcgatagattttccaaagtcaaaaccagcctccgatcaatggagccggggcgttgttcgtgtttgccttgcatttgcttgtttatgctcgccagtaaattctaattattggctgagcagctgccttctcgttcgcggcttttgggaaggaatttcttgagctgcacctccgccgcacttgagtgggtttttgtcgtctgattaggtttgggaaagcgcgcgaatttgagctttaatttgggcgaaggaataagagtacggaggcgcatagcgggtatgcccccatttcgttttaaagggcaaacaacttttattgcgcatacgcagcgtatgccaaaccaatatgccaaaacctcagcgaaaattgcagctcctaaagcggcagaggaactggtcataaaatcaatggatggtcctgcgtttgggaggcacgaccatggcaactaatcagcgagccggcggagctcgcccgaactaattattttgtaattttacgcgcaaaaagcaataagggagtgcaatagggggtggtggccattttggccattgcccacggcatcggcggatgcaattctgcggtcgtcagacttctaattaatttagatggaaacatgcccggcacagcagctgcagcagtagcagctcgttctgtgtacaatgagtaaacatttctgggttatctttgcagccccctgccgttcagcgtggagcacacgaagctggtctggacgctcaattacagtctgatcgagtggacatcgaaattcgtgccgcagtgtcatctgttgtcaaatacaataattgcggccaacaatttcctgaagacgaccgccgacgaggagctctatctgtgcgttctgcatgtgagtacaaactggaatggagatgggaggatgggataggatagccgcgtggaaaggacttagcatgccacttaaatggttgtcagccttgtctagccgccatcaggccacttactaactgtcagccgactagcgggccagcaaatctgactgccattgaccggggcaaacgttccctgggctgtgatggaaacctcgatcccttgactggtgtggcttagtcctgggcagcccacgttgcgcttaattggttttttgattgacaattttcaaacggcaacggaactgtcaggcggacgggtgaaaagccacgcgaaaggaccgcagccagtgctgtcataactgacgcaggagctggaacaggaacaggagcaggagcaggaagagcagccaatggcagtagccaaatgtttattggccttggcggaacactcacacatggcccgttggtcaatgggagcccgtttgcaaattgagcgtaataaaaaaagagtagagcattttgcattttgtttaagcgttgtacacatacgtctgctacataaagaaattcctcagttggcgaacgtaatttgcaagcatttaatatagagttgagattttaattgcagtttacgagtacatggcgagcggcaagtaattaaaaactgtttttgcactgcatatttccgggcgacgttcggtcgaaaattaaattcgactttttaagcaatttatgaaatttgcacgcaattcaattgtcccattttgttgcttttgctggccatgatgtccttgttgttgccgctgccttttgctttgatggccgccactcggaatccaaatcggcattggaatcagaatcatcatcatcgtagcgaagagaaagcgggagaaagcgcaatggggcgcagcgacaacagcggccataacaataacaatttgccactcaattagcgtggccattactgaaaaacccacttaagtatgcaatgataaaaattcaaaagcgagtcgagagccgccgcattgctatttctatgagcgctgtcctttttcattgcctttattttgctactttttatatacgtgtatatgttgcttattgtatttatttatctctttgtcattgacagggcctggagcgcatggtggtcaatagtggagtgccgcctcctggcattcagcctactggaaaggatgccgctgctggagaaccgggcgccgaaggatccaaggcgggagttggcgtcgtggtcacaccgcagatgcgacataaaattgaaaaacttgcactcgaattgctgaaaatggaaaatgagaaattttcgattccggcattgaaattgcttttgtcctgcatgtatgtgggtgagtatgcggggtctggcctcaaagaaaataacaaaagtaataccaagatcaaatggggtagcaaagcgatgggaaaacgaacgagcagaggggggtacggaaatatttcgtaatttcatttaataccgcatgggccgcgaacgggtttccactgttgttataagaaaattgagcaaagggcgagtgcgttgggggatggaaattcccaatttcggaatggaagcgtgagaagcaaacaattttaaagggaagcatcccgtcacagggcggcattaggcggcaggacactctggcaaagtgaacttcactccccttacgcgcccaatgtcctttatttggatgctgccatgttccattttaaatgcgctcgctgggatggcgcactttgtgtgtttgcgggtcaacagtttggcgctgatcattatggccatgaatgcattgcgagtgcgaatgcgagtgtgtgtccttgccagagaaaggctaattgctgtcgccggccaacatcaggacattccgccgactgttgcgtatctctgccgtctctgctggccaacaattatccctgttgctgttattagcgccattccaggacaattattatcgtttcaactgtcatgcgctcatttcgcctgtgctaaaacgttagttcagtggtttttcgggggcacaagttcaatttttggcattcaatgctcataaataggtattcgtttaagcacaaactgtgaaaggcatttgcataaagtttatctggtagcgtcctagaaagctttggccaataattttgacactagacaattttacatacagagtatctatggcttactggaacctgtgatttatcctatacagctctaaaagcccagaaaaactgcagattagaatgcagaaattcgccagcttactcagcatgggctttcgttctcgttcagtttattagaagatactatagctttaaggtacatggctgcctatggaaatcgtctcgatgcgggtcaatcgtaatccgctcagtctcgtttcattaaccaaccctagcccatcgatttctttactccatcgtgttctcttttccattctctaacgagaaaaaataacagccgtcaagcattttaagcatagcaaaagaaataaaagacaactaccttcattttttcctacactggctttgggatgcgcccggccaacctgctgtgcgtggtaacttagcacagctttcgactgggccactcctggccagaaattatgcaactcgctccacaaatatgtcgaagaatgcccgcggcagaatggggagtatgtgtggatgtgggcgaaattggaagtggagcgttgcgtatttgccttgcactttgtcagtgcacgggattgccgactgcccactgctgagtcccttttgccatggccacagcacgcaaatcctttgagaaacgtcaatgtttgtgaagcaggccattcgcgatgcttacttctgccactaaatggcagcaactgcctcgattttgggccctactgccgcacacaccgcacacactccgcacactccacacacacgccactcacaaatctcgaatatggccaaccgggcaggatcctggcttgggacccagagaacgaccgtaccgaaacgcatcctggcggaagttggctattgctgggcacgcttttttgctctttttccgcctgcttgcctttttaaagcgttgtgggctccacgcgaaaataaacaaaagaccgcgtcgccgaagacaatacaggttgcccagctaccacaaaaagcatggaaaaaattggagagtgaagggttaaacaaaaaaggagcgaaacggcaaaacagggaaagtcgagaaaaaacgtatatacatttgccctcaaagttgcaaaacgcaataataaatatttgcggcaatattggtcacccagttggtggaaaatgcttgtaaggcaaaggacagcgaacccttcccacaaaaggacactctttaaaaaatgggattagcagagcttgtttctgtttcgtttcgttggcttagtttgaaattaaacaaaagctttaaatatttattttatgatatttaagccgttaacaagtgcgataaaataacgctaatgtcatgaataatgaataatgaataatgtatgaaccatatattcatcagggtagaatctataatgcagaccaccggtcttttttcgctgcttttcgccgtgcttaaactaattttagagtttgttagatttttcttatttttccgtgcattgcctgcggcattcgtggcgcgcataattgtggccaggcgccgggaagcacccccaaccaccccacgcctaccaaccgcctgcccggccacttggccatacttcatgcccgttcaaagcctgcaacaacaatgccaaaattggcaacagccagccaaacaagctgcccgcaggccaacagccccgaccaacaatgttaagctgcaaaacaaaggccaaagccaaagttggcgcggccagaaggcggctgagttgggttacgggtggttacgggtggctctgggttaggcgttagggggtggccaagctggccaggtggatcagctaccgctccactcgcattgtaaataattcgatgccgctaagccacagtaagcagcacacgggctgtggctttcagcggtctctggtctctggttcctggtctctgttcaccatcatttttcacctggccaaaggaacgcacatttattgttggtgaccttctccaccagttgcgggcttaatcgaacaactctaatctatgccctgtgtatggccaattctgctcagcttcaacttttggttccgcttttttgtttagctttcaatttgatgctttggccatgggagaaagttttggctaaaagcatcggtgctggaaaaaatccataaaatttaaatgcaaatttatgtacgtgtgtgtcctggggaatcagtgggcgagtgtataagtgtagtgtggggaaatggaaaaatggagggcagtgacagcactggcgtgtgaaggaccccgagcatgtgaataatggccatcggcatttggcttaaaggctgccttgttaattagaaagtttcactttcttccctttttctgcattctgcgaatgacttacatattttccatttcattccattctcaggctcggctgcccagctggagaacacggagctgtcgaacggaattgtccaggatgacccggagataatcgcccagcaaaacgataaagtcgatatacttttgcattgtattaaatcatcgactcgagatgccgcctggatttatggacaagtgctgtgccaaattattcgtgatttagtgccaccgaatgaaatattgacgaaggtcataaaggagtttctggccataaatcacccgcactgcgatgttattgccatgattgtatatcaggtgagtgctgttggccaaagatctagcaaaggtaaagacgttggccattcgtgcgtggttgcttcgaacacacacacggattcccatgctgggtggcattttacgagtcccggatccaggacctcgtccttgtctggagaccggaacggaatggggccaatgcagcgctaatgtttgccctggccacaagtcgaaagggtaaaacacttgccaactccatacccactgcccacatgagtgtgcgtgtgcgactgtggaattttggcagcttgaaaattaatggaattcatggctacagcttggcctccgtccaggtgcgtgggtcaatgcgaggagccgaagccatcgcctactggcgtccactgtggggccataaaaatgtttcattaggttcaaggttagccagtgcggtgggcgcgtgcatggaaattaataaaaacaagctcggaagccaacggggcatcccgggatcccaaagcggcacaattcgcactgtcattcgcagggccggattccccggctgcggaatttcattagccaactttctgccacaaagtatgctgctgactgcagtcgacttttgcggcccgccgacgaggcacctttcgagcagcacaataaaatttaatttccgtattgtcggcttggtttttatttaagcatttcgttggcagctcttaacccgctccccaatctgctctgctcctttactccgcaggtctttcgctccgccatcgactcgtcgtacctgcagatgctccaggactggctgatctgcaccctgccaacgttcctggaccagccggagcagcagggtgtctggggcctcagcgtcatctttttatccgcctccataaatctgcatttgattaaactatttccgctagtgctcggcatcggggcatccaactctgcggcagcagcaacaacagcgacaacggcaacaactgaggcagaggcagcagctccggcgatggcccgaaaattgggtcaacacgaaattgcattgttcgtgacagctgcacaagatttccatgcgaaattgagtggcgagcagcggcagcgtttccgcgaggccttcggcagcttcaagcgaagtcaagtctatggccggatgttgcagtgcctgtgatatgatacgcagataccataccatacgatacgatgcgatgactaggtatcgggtcccagccgtagggaaacccaactatttatcttgcgtttaattcccaatcgcagctaaaaataaaaagaaaggaacgccgagtttggcaggcggctaaacttgctgcaaagacaagcgcaagcgtgaataactaattgccccaagctgcggagaaagtttaagcggatgtccctcttccttgcgtttgtactacttcatcaactcgaaggacccttgcagaccccagcgaatggaaagttttttaatagttggcgaatacaaaattaatttatgctttacattatgtgtaactaatatttaaattattgcaaacgaatgtccgccaccacggcccgcaattcctaatctggtcgaaagtttaacgaggccagcagcgagcgacccgcaattaattcctgcggctttcgacaaggacccagaacacggaaattatgttcttctcagttttcggctaaagttgatcatttatttattatgacgctgcctgctgggcaagaaatagaataccggccgaaggacgctagtgggcattagtatgcgccttagccaattgccggctaattcccaatcaaaattacttaaaaattccattatgcaaacgcaagccccacgctttgtactcctactgtaatcaaaataataaccatattgtttaatgaaataaaaattgctattaaaacgagtgcggaactgtgtcgtcagctacttggggcgtatggaaatggaatgtttgatttttgaaatgcataaaagctgagccaagtactttgccaactaaccgagaaattcgttttttggattaccgagctgtatgcaaatcggttcgaacttttgcgctcttacctgccatcctggcacatgtaacgtggatccggctcctgagcgttttctacgttctaccgtcttaacaacaaagcgcattaaagttgacaaaatgtttcgtcctcaaactatcgccgaagtgctggactggaaaaaaagtttaactatccgaattttgcgtgaatatctgatgccctgggaagtaggcaagcttatagtttgtcatttgtttttatcttataaagttttctttcgttataacataattttggtcgttcttactaactagtattttgttatcctgcctaaaatcacaataaaaatgcaaagataaatggaaatagtaattaattacaaatttactgagggaaggtttataacaatgagtcatggataaaatttatatcgagggtattataacttggatgtagagtatgcaaatcctctcaatgcgtaacggttttgccgcctgcgtatgattgtgtttgtgtaccgaaattgacagataaactttagcttccactgtgtgtgtgcatgtgtgcgtgcgacaaggacggaagatggcttttgtgtgcatgcaaagcttgccggaaatttgccagttcaacgcgaaacgacaaaaagccggtagagaaaaaaatggagaagggaagttgcagcacacaccgaaatgaactgcaaagctgttcaaagttgtttttctgttttggcgcgaccgcattatgcaatcgagcggaggtgggcgtgtgcgtatgtctgtatgtttatgtgtctgcccccctctaactcccacgcgctggtgctctctcgctctggcgcactgattcgatgtcaag

SEQ ID NO: 21233 - DNA, 11528 bp, DROSOPHILA
agcaatgttttcctgtgttgtttatgcttaaaaagcgattttaggcgttattaaggacgcgaaaatggacaaatccaggtccagtgcgtacgacaagttcgttggcttcgtggaacaactgcgaaatacggaatgcagccaaaagcagaagatcacctgctttcagcagattgccgagtgcatcatgtcgccctcgctggcgggccacatcaactatgccgcccactgcggcacggccacgaatgttctgctgctgttctgcgaggatgtggattccgtggttcggatgagcgccgaggaaaacctaaataaaatactgaggtcactcgagaaaacccgggtcagtcgcattcttatggatctgtatggtgaaattaagcgtaatggtaaccagagatccctgaggatttgcctaaaccttttctcctactatgctccacaaataaaggagaaacacatcaagtggtatgccgtgagattgctccaatgtatgaccaccatttcccagcgcaaggagacgttgctccaggagactctttgcgacttcgtcaagcactttagccgccatatacaacagggtctcagcgatagcgaatcctgcaaactgttcgagacttttctggaccaaattagctccgattgtgccgtcaagcgtcgttgctctgcccaaaactgcatgagtctgattgagaatgcacgcaataggagcctcatggccagacatggggtcaacaaagtgatggagctcctgctgacggatcagcaagcgaacagcgtgctaggagccttggggctgctgcgcctcctgctgccacagcttatacgcggctaccccggcgatagccacgaggattccgagtccttggccggcaagaagcagcaacagcagcagacgacgacctccgactgtcggcaaattattgaaatttatgattattgtttgcacctgctgagcacgcagcacaccgcgaatcacgccatcataaatgccaccctggaggtcatcaacggcatactccaggctgtggacgccgcatccgatggccaatgtagccagagtctgggccaaagtttgcgccaactgttgtgcaatcaacaactgcagcacaatgagtatttgcggcgaaggaaatcattaaagaatcaaatattccaattgaaaaattacgaagtggcgacaagtcaacaccagctcgaggatgaggatgagaacgaggatgtggatgagctggtggttggggccactgcaatgcaaatgaaaaagaattcaaatgcaaaactgcagcaggcgaagtgtcgagagcagcagcagcatcagcatcagcagcaactcgaggttgacaacagctcgctgggaattaatgctggggaagatgccccgaccgaggctccaagttccgtcgctgatgaagggggagagccggagtcaacgaagctgcgctgccacattaggaatgccgcacgcagcatcagcgaatgcgttgcctcggatgaggacaagcaggggcaaggacaccggcagcagcgggacgaggatggtgtcgtagtggcggaggatgatgatgatgatgatgatgatgatgacgacgacgacgacatggagctgctgagtgccgagtgtgatgactttacaaccctgtcgcaactaaatgaacaacaacaggcgctgtcagcggcattgaaattgcccacaacaacagcagcatcatcaggcggagcagcaacatcgcaggacgataaactgattgatgttgatgccgatgttggggggctgcctaaaccgcagcatcagtcatctttgcagaatctgctcgccggcagcgatgacaaatcccagcatttgagtgacatcgacaatgaatctttcaacagcatcgatttcgatgccgaaatcacaattgccggcagcaaagagcagcagcagcaacatccaccggcggatgattcggtggaatccggcgatgcaacagcaattggcacattcttcaacaatctgctgtcgcattccaatgcagcttcggagtcggtcagtaagctctttcgtcaatcaagcggctctaagtccacgccctccaagtccgcttccactccggctcccgccgacaaatcggatgccatctcggccgcctcgcttacgctttcgcttacctccttggccagcagtaacctggagccgccggaacggcagcccttgattgcggagacgcccacgccagtggaagattcctgctcaataaccgcctcgcacacggcctccacagccctcatgatggatgctccagccgtggaagtggcagcctctaagcccgaaacaccgcagctgcgtggcacgcccaatgctaatccctttctagtggagaactcgccgctccgacagacagttgtcggtcgtgccctgatcaccgtgaaaattggcagcatcctggagcagtcgttggtctactatacggctcgcttggtggcagctcggtttctgctcagtggacaagcggcgggattgcagcccgatagcatcagcagagtgtctatcaagagcctctccttggccgtgattgcccaatgtgtgcgtttggctccgaagattcttcaactcagcctggagattagcgagcaggaactgcagctgctggaggaggccacctctcagattggaagtggtgatagcactcaagtttcgagtccccagagcagcgacaattcccaggtgggcggagagaagccacccctggatagtagtctcgttccgactagcctggaagagaacctgcttctgctagacattaaggatgatcatttcgggccgagcacatgtccagcatacttgcagtcagcgacacccaccctaagccgcagtgcagacgcttcagttctcctacttgaaggcggcactacttcatcgcggtctgccaagaaatcggaagagatgctctccaagtccgagatcattgaaagttcgtacaggcccacagtggcagttgaggatgtgcctccattgagcatgcctccacgtccacccaagcgcacaaagtcaacgcgtagtcgagtaggagttcttggaacctcctctaccactgagagttcttcacctcaaagccgtcagaagctttcggatatcctgctcttccatgaccactgcgatcccatcttgcggggtggcgtccagcaggttgtgggtaacttcctacaatctagtggggctggactgtttctggatctgcaacgtggtcttggtctgcaacacttgttggccattttgctgaagggctttgaggacgagatccacacagtggttatacaagcgttgaatgcattcgataagatatttccgaatgtggtgtccaaatatttgacagagccgccatgtcattatcatgctcatcagcagcagcagcagcagcagaaggagcaacagcaacaagagcaggacaaccagaagctggagcaggacctgcaacgacattcaagtggacaacaaaagcgttcgggccaggcgcaaacatttggccaacaaacttttgcaaaggaccaggataatgccttaagcagtcaacggcagcaacaaaggcgtcctaacgatgccgggacatgtgccaactcctcggccactgataatgatgagctactggctgctcttttgaatgatttccaattgcaatcgactggcatgcggcagcagccaaagaataatagcaccgacaccgggcagtcgggtaatgagcccgatctcgaacccaatcccaatgccgcagtggagcctttctgtgtgtttgccatctcaccgaaattgctcttgagcaaactccggctctgccatcacaataaatattggctggtccagaataaatacgccgaagttatttcgaatttaaattacgtgctgctgcggtcgtactacgcaaattttcgttgtgccatcgacaacaaaaacagcggcgccaggaagcaggactccaagtggccaccgatggatgccagcagtgtctgccactctgtacgggacgcggagggcgaggacattgtctgcacttatgaggcgcagtttctggctgaacttttacatctgctcggcgacgatgatgcgcgggtgcgggaacatgccgcctgctgtctttgccgctttataatgcaaacggcgcgccaggacccatcgcaggaccaaggagcaggaggcggaggtggggacgatatcgaaggcaatggcaacgtcaacgttgaaactcaacaaactaatttcaatttgctgtgggattttttcgactatcgcatatttggcagcatgtccgtgacgttgcgtaatttattccgggccagttcgacgattgtgccgcctctggctgagctggatgcattggccacctcgaattccgcgccatcttaccccgacactggcagcacgtccggctcctccacatcgacatctgcctcatccggaggatccgcagcggcagtctccgcggcgtcggcctacttcgaggcaagttacggtatcggcatcgccgaggggcatgtttttgcgctggcatccgcgtcccaacgtcaaatcgcgcaggaggaaaaagttttggccaaagttttgtatcgcttgacaaataaattgatgacgctgaatgataaaaatgtgcagtttggcataatttacgcgctgcgcctcctgctgaggcacttcaatttcgtggactatcaacaggtctggctggaattcaatttcgttgaaatttgcattagctatgcctactacaacaatgcaacagctgcggacctcggctgccagaacgatttgattgatgtgatgggcaaattaatggcaggtgccatgctgagctcaggtgagccaaacaccgcccacctggactttctgctgcgtcacagcgtcaagatgctgaacatctactatcacctggtcaccaatcagcgcccacccaccgcgggatcacagtcgggaagcagcagctccaagcagcccaagagcgagctctttgcccgcgaacagccagcggcaacccttcaggctctgggttactttgccggcgattacgtttacatgaaactttacaacattttaagaggtgctaatgacagctacaagataaccataaatcaggaggccggcagcttattaatttgtctcctgaaaacctgcctccacgcagtgagcctctgcctggagggcatggcgagtgcttcgcccccggagctgaaattaatcgaagaaatactccactatttgaccaggctcataaattatgcgcccgccgagtgcgttgcatgtctgcggcaactgttgaaatatttattcgcccaaaattatgccagccaagtacggctgcagccatcggccatcggtggaaatggcagtgaaattggccaccatgccgccttcatgcgtccctactttgcggccaagggcaggggtcacggcgccagctccacattgttgccaacaataaattcaaaaccagcggtggcggtgggatcccagcgaggggcaccaaccgacgctcgccagccaattgatgccggcccactccaggacatgggcatgctctttgtgcacggcctgcagccacccactccgccggcgggcgactgtgtccggcttataaagctattcgagccgatggtcatatactgtctgacgctcttcatgaaatccaatgcgctggtacaagcgcctattttgcgattactttcccaactgctggacttgaatgtgacctatagcatactggactcgaagaatgtaatatttgatcaggtactgagcaatatggatctgattgaaggcggaatagatagaaatgcgtttatcatggtgccgcccatgctgagattcctggtgcagctgacgcacaagagcgaccggcagctgatcacgatacccaagatcatcagcatcaccaacaatctgctggccaacggatcggtgcgcgtggtggctctgctggccctgaagaccctaagctacgagctgttttttatgcacagccagctggaggaggcgctggataccgagggccataactcagggcgagacgcgtgccagagtcctttgagtgcagcccccacaccggaaaccagagaggccttgctggcgcagcgacgcgaactggacacccaacgagaagtggtgctgggcatgctggagaagttcatcgaagcacggccgagtcaacaggtcctcgccctactcctgctgttcgagcggagtgtgcagcaactggatacgccaccgtatcgcagtgcccaggatgcggacgccgtgtacgggacgctttgtcgagggctgtgctcccgccaatggcgtctccacaacgctggggatctgcggctcctggagagctgtttccgcaataacggcaaccatgtgctggccgatagcaagagattcctgcagctgttgcagcttttcatcgagcagggcgttgggaactttggtgatttagctctggccatggtaatgctgtccaacgtaatccttaaaacggaggagatttatctagtgaatcacattaaactttatttgaaaaataatccaacggccgagcgtcgtctgcaggccctgatgcccagctccccatcggcagctcctcattggcaggacgaggcaccatcgacgtcttcggcggcggcagctgccagagcggccgccgcatccttttccgccggccgttcctccatcagtgaaattaactatttcgccaaagttctctgcgagaagctgctcgcctgtttggaggtcctcctgggcttggaaccgagctcatccagccacgcctactgccagctgaccgggcgcttcatggatgccctgctcaacgtctgctgtcgctcacggcacaaggatgcacttcaatcagttttccgtttggttttggccgagtctgaatttctctgcaaatactatagcctgctgttgatgagtgccgctggcctggtcggatcctacttactggatgccgtgttgctggcctgcctgaggttggtgctcgccatgcggctggaggaaccggtggctcttttggaacaggccgcccagctgccgctgaagaccaacttgcagagggcgttgctacgcgaagtttgtcgtgcaagtgcgggctgcgattggagtgcgcaacaagtgcgccgactgttcgaaggcaggtatctgaatttcctaattgctgaccacttggaatttatttgcgagctatgccaagagcgtcccgagtgcggctcattactgcaggtggccttgttccggaatgcccatcgattgagcaggcaatccgttcgcatcgtccttcggctattgggacgtctttgcgagcccgctgaacgggaagcctccggagacgttggcagcgatgcggatccaaccctgcaggccatgcaactcctgagtcgcctgcaccagctttatgaaggagaacgctcgctgcagttgcccatcgagcggatggcccggcggctgagcgcccagagtgggcagccggccaggaacgtcatctacgagcgtctggtggaaggagacctggccggcggagaggaccaggacgccctgcgaacccttctactgaaggacttggagtgccgccaggacaatgagactgcaacgccgtcgcgcataattgatgagagctggctctttgcgcagctaatcaaattcgccacccagcatgccgatgccccgcagcagcagaagcaactaatgctgctgctcctggagatccagtcggagccgaagctgcaacgtctgctccgaagtctgggcaccgagcatgaggcaaagctactgcgccatgccatcgctggttccctggctgccatgatgtccgccttccggcagaagtgcatccagcatgcaccgcacatcaactacatgcaaccaacgccactggcgcgcgtatcctgcgccctgctcatgtcaagggtggcttccacagaggccacaaaatgccgaaacccacccaccggggagcaactggatgtggcgcgggcggtgggcgccctgatggcctgcattcggaatgcggagcaaacagcactcatctacatcgatgcccggctgatggagaagttcgtggtcgagcacctgctgcgccgcgagcatctgccgcaattgctggcctaccttggctggctggccggagcagcaaaacagattttggccatgccaacacgacaggagtcggaacaagacgctctgggcgtgctgctggccaccgtgaatacacttttgcagcagccccgcgtctggcgggagcttaatgccagttcggatccctcactgcgttgcgaactgctcgacctgctggactcagtggctcgttgcattctgcaggacaccattttctatcgaaggcaccgccgggacagaaacaaggccaaaggaccggcaccgcaagcgattttcctggccaaattgattgaaacccaaattgaaatcgagtccctggccagcggcagggtcttggcaggcgtcgaggaagcccgactgcagttcgcaggtcaggatctggcccgattccaagtggcattgtcgctggtcacctctatcggcatctcgctgctgcgaacgcaccagttttatgcctacgcggtcacaccccacgagctcatccagcagccaggcgaccagcagcaggagcaacaggcagatggcaagctgccctccattcctgtggacagcctgagcgatgtggatgtcctccgtcaatttgtcaagaggctctccatcttcggattcaccacccggcagcagttcgaggagtacttcatgacttgcctgctgctgatcaacaagctgtacgacgagcacatggtcgatcagcaggagcagttccagatcaagcaggtctgcctccaggccatcctcgaacttttaatgacgtacaaaacttttcccattgtgggcctggccaacggacagttccatcacaccactcgctggcagcgcatcacttgtgacagcattagcctgaagaaactgcacaaggtgcaattgctggtggatgcgtgcaatgtcttctatcagcccaatctggagcggcagctggcctacgacaatgtgattggcacacgcacctttgcgcccaatcagtacgatctcaatttcagttgggcccaaatggaggaccaggcggcggcgggagtgggcgtgggtgtgggagtgggcctatctggcggggagcaggcaaacacggcggacattaagcagtcctgcgatgcggatgtgcccgacatggcaatgcgcaactatcgccattttacgcagctgtcgggaattgactttcgcagcagcacgcagctggtctttgacgtactgcagcagatgatcgagctgaatcacatcctggtgctgcccaatttggtaaagttttgcgagatctgcgagagtcgcgaccacatcaaatggattaaggaacgctgcctcaaactgcaggagcaggtggccatggacgacaccatttcgcatcagcacataatctacttactgtgccgcagccaggcccttctgatccccagcctgggcgagctgcaggtcctgtgctccttgattggcaacgtctacttgaagagcacgcacagctttatacgcattgccacgttgcaggggctgctctgcctgctggagtgctgcagcaagaccaacacgacaatgggacggctcagtgaggagctggcattgttgcgatccctaattgtgggctacatcaatcgtcatggcatcattgatgagagccccctgccgttcagcgtggagcacacgaagctggtctggacgctcaattacagtctgatcgagtggacatcgaaattcgtgccgcagtgtcatctgttgtcaaatacaataattgcggccaacaatttcctgaagacgaccgccgacgaggagctctatctgtgcgttctgcatggcctggagcgcatggtggtcaatagtggagtgccgcctcctggcattcagcctactggaaaggatgccgctgctggagaaccgggcgccgaaggatccaaggcgggagttggcgtcgtggtcacaccgcagatgcgacataaaattgaaaaacttgcactcgaattgctgaaaatggaaaatgagaaattttcgattccggcattgaaattgcttttgtcctgcatgtatgtgggctcggctgcccagctggagaacacggagctgtcgaacggaattgtccaggatgacccggagataatcgcccagcaaaacgataaagtcgatatacttttgcattgtattaaatcatcgactcgagatgccgcctggatttatggacaagtgctgtgccaaattattcgtgatttagtgccaccgaatgaaatattgacgaaggtcataaaggagtttctggccataaatcacccgcactgcgatgttattgccatgattgtatatcaggtctttcgctccgccatcgactcgtcgtacctgcagatgctccaggactggctgatctgcaccctgccaacgttcctggaccagccggagcagcagggtgtctggggcctcagcgtcatctttttatccgcctccataaatctgcatttgattaaactatttccgctagtgctcggcatcggggcatccaactctgcggcagcagcaacaacagcgacaacggcaacaactgaggcagaggcagcagctccggcgatggcccgaaaattgggtcaacacgaaattgcattgttcgtgacagctgcacaagatttccatgcgaaattgagtggcgagcagcggcagcgtttccgcgaggccttcggcagcttcaagcgaagtcaagtctatggccggatgttgcagtgcctgtgatatgatacgcagataccataccatacgatacgatgcgatgactaggtatcgggtcccagccgtagggaaacccaactatttatcttgcgtttaattcccaatcgcagctaaaaataaaaagaaaggaacgccgagtttggcaggcggctaaacttgctgcaaagacaagcgcaagcgtgaataactaattgccccaagctgcggagaaagtttaagcggatgtccctcttccttgcgtttgtactacttcatcaactcgaaggacccttgcagaccccagcgaatggaaagttttttaatagttggcgaatacaaaattaatttatgctttacattatgtgtaactaatatttaaattattgcaaacgaatgtccgccaccacggcccgcaattcctaatctggtcgaaagtttaacgaggccagcagcgagcgacccgcaattaattcctgcggctttcgacaaggacccagaacacggaaattatgttcttctcagttttcggctaaagttgatcatttatttattatgacgctgcctgctgggcaagaaatagaataccggccgaaggacgctagtgggcattagtatgcgccttagccaattgccggctaattcccaatcaaaattacttaaaaattccattatgcaaacgcaagccccacgctttgtactcctactgtaatcaaaataataaccatattgtttaatg

SEQ ID NO: 21234 - protein, 3583 aa, DROSOPHILA
MDKSRSSAYDKFVGFVEQLRNTECSQKQKITCFQQIAECIMSPSLAGHINYAAHCGTATNVLLLFCEDVDSVVRMSAEENLNKILRSLEKTRVSRILMDLYGEIKRNGNQRSLRICLNLFSYYAPQIKEKHIKWYAVRLLQCMTTISQRKETLLQETLCDFVKHFSRHIQQGLSDSESCKLFETFLDQISSDCAVKRRCSAQNCMSLIENARNRSLMARHGVNKVMELLLTDQQANSVLGALGLLRLLLPQLIRGYPGDSHEDSESLAGKKQQQQQTTTSDCRQIIEIYDYCLHLLSTQHTANHAIINATLEVINGILQAVDAASDGQCSQSLGQSLRQLLCNQQLQHNEYLRRRKSLKNQIFQLKNYEVATSQHQLEDEDENEDVDELVVGATAMQMKKNSNAKLQQAKCREQQQHQHQQQLEVDNSSLGINAGEDAPTEAPSSVADEGGEPESTKLRCHIRNAARSISECVASDEDKQGQGHRQQRDEDGVVVAEDDDDDDDDDDDDDDMELLSAECDDFTTLSQLNEQQQALSAALKLPTTTAASSGGAATSQDDKLIDVDADVGGLPKPQHQSSLQNLLAGSDDKSQHLSDIDNESFNSIDFDAEITIAGSKEQQQQHPPADDSVESGDATAIGTFFNNLLSHSNAASESVSKLFRQSSGSKSTPSKSASTPAPADKSDAISAASLTLSLTSLASSNLEPPERQPLIAETPTPVEDSCSITASHTASTALMMDAPAVEVAASKPETPQLRGTPNANPFLVENSPLRQTVVGRALITVKIGSILEQSLVYYTARLVAARFLLSGQAAGLQPDSISRVSIKSLSLAVIAQCVRLAPKILQLSLEISEQELQLLEEATSQIGSGDSTQVSSPQSSDNSQVGGEKPPLDSSLVPTSLEENLLLLDIKDDHFGPSTCPAYLQSATPTLSRSADASVLLLEGGTTSSRSAKKSEEMLSKSEIIESSYRPTVAVEDVPPLSMPPRPPKRTKSTRSRVGVLGTSSTTESSSPQSRQKLSDILLFHDHCDPILRGGVQQVVGNFLQSSGAGLFLDLQRGLGLQHLLAILLKGFEDEIHTVVIQALNAFDKIFPNVVSKYLTEPPCHYHAHQQQQQQQKEQQQQEQDNQKLEQDLQRHSSGQQKRSGQAQTFGQQTFAKDQDNALSSQRQQQRRPNDAGTCANSSATDNDELLAALLNDFQLQSTGMRQQPKNNSTDTGQSGNEPDLEPNPNAAVEPFCVFAISPKLLLSKLRLCHHNKYWLVQNKYAEVISNLNYVLLRSYYANFRCAIDNKNSGARKQDSKWPPMDASSVCHSVRDAEGEDIVCTYEAQFLAELLHLLGDDDARVREHAACCLCRFIMQTARQDPSQDQGAGGGGGDDIEGNGNVNVETQQTNFNLLWDFFDYRIFGSMSVTLRNLFRASSTIVPPLAELDALATSNSAPSYPDTGSTSGSSTSTSASSGGSAAAVSAASAYFEASYGIGIAEGHVFALASASQRQIAQEEKVLAKVLYRLTNKLMTLNDKNVQFGIIYALRLLLRHFNFVDYQQVWLEFNFVEICISYAYYNNATAADLGCQNDLIDVMGKLMAGAMLSSGEPNTAHLDFLLRHSVKMLNIYYHLVTNQRPPTAGSQSGSSSSKQPKSELFAREQPAATLQALGYFAGDYVYMKLYNILRGANDSYKITINQEAGSLLICLLKTCLHAVSLCLEGMASASPPELKLIEEILHYLTRLINYAPAECVACLRQLLKYLFAQNYASQVRLQPSAIGGNGSEIGHHAAFMRPYFAAKGRGHGASSTLLPTINSKPAVAVGSQRGAPTDARQPIDAGPLQDMGMLFVHGLQPPTPPAGDCVRLIKLFEPMVIYCLTLFMKSNALVQAPILRLLSQLLDLNVTYSILDSKNVIFDQVLSNMDLIEGGIDRNAFIMVPPMLRFLVQLTHKSDRQLITIPKIISITNNLLANGSVRVVALLALKTLSYELFFMHSQLEEALDTEGHNSGRDACQSPLSAAPTPETREALLAQRRELDTQREVVLGMLEKFIEARPSQQVLALLLLFERSVQQLDTPPYRSAQDADAVYGTLCRGLCSRQWRLHNAGDLRLLESCFRNNGNHVLADSKRFLQLLQLFIEQGVGNFGDLALAMVMLSNVILKTEEIYLVNHIKLYLKNNPTAERRLQALMPSSPSAAPHWQDEAPSTSSAAAAARAAAASFSAGRSSISEINYFAKVLCEKLLACLEVLLGLEPSSSSHAYCQLTGRFMDALLNVCCRSRHKDALQSVFRLVLAESEFLCKYYSLLLMSAAGLVGSYLLDAVLLACLRLVLAMRLEEPVALLEQAAQLPLKTNLQRALLREVCRASAGCDWSAQQVRRLFEGRYLNFLIADHLEFICELCQERPECGSLLQVALFRNAHRLSRQSVRIVLRLLGRLCEPAEREASGDVGSDADPTLQAMQLLSRLHQLYEGERSLQLPIERMARRLSAQSGQPARNVIYERLVEGDLAGGEDQDALRTLLLKDLECRQDNETATPSRIIDESWLFAQLIKFATQHADAPQQQKQLMLLLLEIQSEPKLQRLLRSLGTEHEAKLLRHAIAGSLAAMMSAFRQKCIQHAPHINYMQPTPLARVSCALLMSRVASTEATKCRNPPTGEQLDVARAVGALMACIRNAEQTALIYIDARLMEKFVVEHLLRREHLPQLLAYLGWLAGAAKQILAMPTRQESEQDALGVLLATVNTLLQQPRVWRELNASSDPSLRCELLDLLDSVARCILQDTIFYRRHRRDRNKAKGPAPQAIFLAKLIETQIEIESLASGRVLAGVEEARLQFAGQDLARFQVALSLVTSIGISLLRTHQFYAYAVTPHELIQQPGDQQQEQQADGKLPSIPVDSLSDVDVLRQFVKRLSIFGFTTRQQFEEYFMTCLLLINKLYDEHMVDQQEQFQIKQVCLQAILELLMTYKTFPIVGLANGQFHHTTRWQRITCDSISLKKLHKVQLLVDACNVFYQPNLERQLAYDNVIGTRTFAPNQYDLNFSWAQMEDQAAAGVGVGVGVGLSGGEQANTADIKQSCDADVPDMAMRNYRHFTQLSGIDFRSSTQLVFDVLQQMIELNHILVLPNLVKFCEICESRDHIKWIKERCLKLQEQVAMDDTISHQHIIYLLCRSQALLIPSLGELQVLCSLIGNVYLKSTHSFIRIATLQGLLCLLECCSKTNTTMGRLSEELALLRSLIVGYINRHGIIDESPLPFSVEHTKLVWTLNYSLIEWTSKFVPQCHLLSNTIIAANNFLKTTADEELYLCVLHGLERMVVNSGVPPPGIQPTGKDAAAGEPGAEGSKAGVGVVVTPQMRHKIEKLALELLKMENEKFSIPALKLLLSCMYVGSAAQLENTELSNGIVQDDPEIIAQQNDKVDILLHCIKSSTRDAAWIYGQVLCQIIRDLVPPNEILTKVIKEFLAINHPHCDVIAMIVYQVFRSAIDSSYLQMLQDWLICTLPTFLDQPEQQGVWGLSVIFLSASINLHLIKLFPLVLGIGASNSAAAATTATTATTEAEAAAPAMARKLGQHEIALFVTAAQDFHAKLSGEQRQRFREAFGSFKRSQVYGRMLQCL

SEQ ID NO: 21235 - DNA, 3297 bp, DROSOPHILA
ctgcgtgaagaaactgcgaaaatccaaaatcagagtcatattcggcgaccacgatcaagagatcacctcggagtcacaggccatccaacgtgcggttacggctgtgataaagcacaagagctttgaccccgatacatacaacaacgacattgccctgttgcgacttcgcaagcctatatcgttttctaaaattataaagccaatctgcctaccgcgctataattacgaccccgcaggtaaatatttctagcattcctagcaataaatatgtatatattaatatgaaattggatttaggtcgcattggaacggttgtcggctggggacggacatccgagggaggagaactaccatccatagttaatcaagttaaggtgagtaatgctatttggtttcttgagtatattatgaccatctacgacaattgcaggtgccaatcatgtccatcacggaatgccgaaatcaaagatacaaaagtactcgaattacctcatccatgttgtgtgcgggtaggccttccatggactcatgccagggcgacagtggaggaccgctgttgctatccaatggcgttaagtatttcatcgtcggcattgtgtcctggggcgttggttgcggccgcgaaggatatccgggtgtttactccagagtgagcaaattcataccgtggattaagtctaatttagaaaatacctgcctgtgttcatagtcaatgttgtgtgcaaatgcacgaccttatttattgcctagcttagtccgttttaatgcaaagtgtctttgttactccaccaatccatcgaaaataaatataattgtttcatttaaactattgagatattaatctggattagctgaagcacagctttcatatatacatttttattgcgtatataaaaaacgtagttctataaaaactatgactaatgtatatcgggatataagtgctaatcctacactttctaataataacctagtgcattattttacaattactgtactgctagacttccctgtaccttttagttacgactgcgttcgccacttttaagacttcatttgatatttttccacagcttgagttcttgatggatggtatactgagtgctgcatgcaagggcattaggaattcggtgttggcgttggagcccagttggtagttttccatagccccgtagatactcttaaagagtggctgcctgtctgaatggaaataaccacgatttccgtggataaccttaacgccagtttgagacatattgcaaatgctcatgtacatgcagtgatctggacggtagttgtattcgcatggcatgatgtacagcttatcaggatgatagtaaaatagtatgttgattatgtcttgatccccccaaataatgcgtagcttgtactccttatgaatagacacgatatgctgttcccatttcatttctctcatccgtgtgagattcattagcataacgccggaattaacgcccagtcggccatagaatggatgtcgtgcaaatctattgtaccagccaatgttttcgttctcgtgctcgggcgtcagtgcggacatttgcgtctcattgaacttcttaaagaatcgccagatatccgagatgggcgacaaaaacaatatatccgtgtccacatacagcaatgagtccacatgcgttagcaatgactagaaaaataagggtttgttactcttggaattatatggatgtatgaagtaattaccggcaaaaagagacgttgagctgcacatggcttaaagagattcctccactcgacttcattgccactgggaaacttcagtggcaaaatctcaaagtcaaatgtaaacggcttgatatcgcgccagtcggtcaacttttccctgaactcatcacccttcccgtcctccgtgaagatcacaaacttgaggtactcctcgtcgtagttgaacagaatggctgacttaatcataaccagagtctcctgcaccctctgaccgcaggagaccaccacgatgtaaagcgggggtttcccagtctgcctgcaaggtaattttatacttgtttacttggaaagtttaagtgaatcatctgattaaatgcaaacacgccttgtgtatttgcttttccattatgggcctttgtttggcaacagggaaactataacaaccggaatggccgaaatgaaagaggtcataaaaccggaggtgaaagctaaagttttatattccggactaataaaatatatggtttttttttatttctatatgtgatatatattctgatctccacttacaattcgttatagccgagcatctttcccttgttttcggttacccaggaaggtcgctgatggacgaaatatgaaagtatcgctaatgcaattaagcaaagcaaacacatgtgaagatgttgctaaaatggtgccaaaatagtatttacacttaatattactctgagactcttgcaagtcaacttttttatttaccattttcaggttttgcgtaaacaatgttttcgccgcaaattgtttatgttttttaggccgccaaccgacgatgccataattttttaccgcaacgagcaagatatgtgcataactccttatttaaccaatgtaagcaatggatattgcttggtcctgggatttggctacagcgaaacccatgataaatgcatttttgtttaaacaatgcgcaaaaacactaaacaactagcacattttacagtcgtaaatatttgtgttagtcaagatagcggcaaggccctgggctttttaaaatctcatgagtgtcactgataaatattttatatattttgcttattcattacagattactgaataaataataaaacaacatgtttacagcctgcaagtaaatattacttgtattactatttagttttgaaaataaacatatggtatagaattatccaccgtgtttctttccattcgtttcatcagcagctatcgataagttatcggctgtgatccagtggtgtgggtattgttttcatttattttcaacagcacacgtgcaaccagaaatataataacaaataaaaatgctgcgaaaacaagccagacagcgaagggaatacctgtacaataaagcgctcactgagcgcctcaagtccaaacaaaaaatccaggagaccgttgtgaaaagcattaatgaaaacaaagcaattggctccaaaaatgtgaagaaaagtctcaccgcctacaagtcgctgaaatacgcggatgagggtaaatatcaatataacatttattaaataatgtttaaatagtttcaagacagtgcaattatgc

SEQ ID NO: 21236 - DNA, 987 bp, DROSOPHILA
atgctcggctataacgaattgcagactgggaaacccccgctttacatcgtggtggtctcctgcggtcagagggtgcaggagactctggttatgattaagtcagccattctgttcaactacgacgaggagtacctcaagtttgtgatcttcacggaggacgggaagggtgatgagttcagggaaaagttgaccgactggcgcgatatcaagccgtttacatttgactttgagattttgccactgaagtttcccagtggcaatgaagtcgagtggaggaatctctttaagccatgtgcagctcaacgtctctttttgccgtcattgctaacgcatgtggactcattgctgtatgtggacacggatatattgtttttgtcgcccatctcggatatctggcgattctttaagaagttcaatgagacgcaaatgtccgcactgacgcccgagcacgagaacgaaaacattggctggtacaatagatttgcacgacatccattctatggccgactgggcgttaattccggcgttatgctaatgaatctcacacggatgagagaaatgaaatgggaacagcatatcgtgtctattcataaggagtacaagctacgcattatttggggggatcaagacataatcaacatactattttactatcatcctgataagctgtacatcatgccatgcgaatacaactaccgtccagatcactgcatgtacatgagcatttgcaatatgtctcaaactggcgttaaggttatccacggaaatcgtggttatttccattcagacaggcagccactctttaagagtatctacggggctatggaaaactaccaactgggctccaacgccaacaccgaattcctaatgcccttgcatgcagcactcagtataccatccatcaagaactcaagctgtggaaaaatatcaaatgaagtcttaaaagtggcgaacgcagtcgtaactaaaaggtacagggaagtctag

SEQ ID NO: 21237 - protein, 328 aa, DROSOPHILA
MLGYNELQTGKPPLYIVVVSCGQRVQETLVMIKSAILFNYDEEYLKFVIFTEDGKGDEFREKLTDWRDIKPFTFDFEILPLKFPSGNEVEWRNLFKPCAAQRLFLPSLLTHVDSLLYVDTDILFLSPISDIWRFFKKFNETQMSALTPEHENENIGWYNRFARHPFYGRLGVNSGVMLMNLTRMREMKWEQHIVSIHKEYKLRIIWGDQDIINILFYYHPDKLYIMPCEYNYRPDHCMYMSICNMSQTGVKVIHGNRGYFHSDRQPLFKSIYGAMENYQLGSNANTEFLMPLHAALSIPSIKNSSCGKISNEVLKVANAVVTKRYREV

SEQ ID NO: 21238 - DNA, 4271 bp, DROSOPHILA
tttaacaattacgatataccacataattgtgtctatgttatttaaccacgattgttgtagctaatgttacaaaaactaaaagtttgcaaacaatattaaaataaaatgtaattattcaattacatttaaatgaacgtgccttaaaattcgaaatgatcgaaattttaaatgtttgaacgttaactattgaagtacacctgttgctaaaataacaaatatttgaaaaataataatatagctcaaagatatctattttttataaaatcaaagttctaacttagcttcttctctaaactgcgaaatctaaatatctaaagcctaagttcaatagacgtattattactaaatgcattatataatttatatatctagatattcataaaatgcactagtcgatttaagaagtggaaattgtgctccctatgcgaatcatttaggattttaatctgaaactatttgcattccatacgaatgccccactgaaacgatcgatatcatttgtcttgcactcgcatttaattatttaacaaacattctgctgtttccattcgcacaatagttctaatttggacattttgcgcgtttgagcgcattagcaaatcatgcttagtatatatgtatgtgtatatgtacccaaaatgtatttcatttgtacgttccgtttttaagtgatttgtatctgtacgtctaatagatattttcaactgtttttgtaattgccttataattcagtaaacacacaccatacgtatacattcataattatttaatgccaaataaatgtttatccggcgttagctgtctatatatatacaaagttgtttctatatgttggatttctgagaattgaggaagccaccgaatgaagtagttatgttatatacccttaaactcacgtacagtttcaacccattagaagcatttggagttttcgtttccaacttccggctcacaatgaaataagcgactatccctttctatttcatggtatcttcgtattttcgtagtcaaaattttacttttattctgatatttattggacaaatggtgaatgtgagatatatgatttacttgtatctaaaactcgcgtctgtggtatttgtcgggatcgaaatatgatgtgaccacaacgcggtcgctgaatttacgtccagtaagtgcttgctgcgccttctgacagtcgagaaccgagttgaattcgacaaagaccttgccgcaaccgggaacttcgacgccctcgatgggacgtggaatttccacgctccgcacgactccgtatttcgtgcactcctccttgatgtcctccaagatgtcctcgtactcctcctcgtcccgcagttcatcgggcgtgaccatgttgagcaagcaaagaacctcagtcggcggtccagaggtcaccacattggacaggcccggcacttggagcattacggactgcgtggtgttggccgcgttctgggcattcttggcgcccacactggctcgttggacaatcagttttttgtcacccagctgcattccatttaggccagcaatcgactacaaattttattaggaatcgaaagagagttagagttaagattgtgtttgtttgcaattttgaagtagtttcgtacctgatctgtgatgctaagatcgacatattcacagaaagcataacccttactcaacccagtagcggcatccttaaccaggttgaaggctcgtagcttgccaaacgacaaaagcagttccttaacctacagcagcagaagatacaaatgtttatgagaattcgaatggaaacgtttcaatgttgaaccaacctgatcgtcattcagatagtttggtagacctccgatgaagattttgtgaggcgagtccggaaccactgtcgaaataactccactggaaactggaatgtggaatggtggttatttgattagaccgtgtgccaatgaaaattaggatatttgtttacttaccaacagcgggcttaattgccggcgtatctgttatacccggcatgggctggtaatcgtgcggacgcctaatctttaagctctgccccttcaaattgatgccatcgaatgccatggcctgggtggtttcatcaatcgatcggaattcgaggaaagcaaagtttttgtccaagttaatttggcatgccaagacgggactgccggccgcctgggcgagcccaactaaatgcatctgttggttgaagaactccatcatttcctcctcggtgacgccaaacggaatgttgccaacgtacaggcgacgcgcctgtcgggtaattgtcgatccgaccacgggcactgccgtttgtggtgtatccggcacaacgcttgccgggatttgtccggacgcctgcatggctttgtattgcatcggggtgatgtgctcgaatcccggcggcggtacatcccaataaagcgacggcttgcgcctcgagttccggtgatggcgtcgatccctggagcgttcgcgatggcggtcccgagagcgggaacgatgtcggcgtctctcgcgatcgcgttcacggtctgcaaatacgataggaattaaatatgttgattctccaatcgctattttcgcaaatgtgtcccgtccctgtccacctcacccaggaagagcacacaaatttagccatacacacgggcacacgcgcatatgtaagccatgaacaaggacacatttcggtgtatggtgtatggttagaagcatttatggtcataagaactcgcctttattgtcgatattcacatatttatcttcaaaattcatttccatcccgaaatgcactgtattctattaaaaatagactcaaaactcaacgtatgtacgtatgtatgaatgtatgaatgagcgaaacatcgaaatagaaaaaaaaacaaccggtctagaatgaatgcgattattaacaaaaccctaattcaacagaccttttttacatataaaaaaaaatgaaacaaggagcaggctgcgttgccgcgataaacaaattcagttgcacatttttcactttctttgcatacatttatagttgtatgtatgtatgcatacatatatatacataaacatctatttatgcacacttgggcatcaaattcagtgcggccctttacttgctctcttcattgaactcaccatcatatcccattcttgttgctaaataaaattaatatttcttaacacgaaaacaattttaactctttaaaatgccgaagaaaaatgtgtccctctattgcgtatattaacgcaaatataaaagaaacgacttaaaaaagaacacgtgaaaactgagaaacaatggaatggaccaccgatagccgagggctaacagtgcgacactggcagtttcgaagtgtcgttgaacgatttatcgacataaatttcacttgtagggtgtccattactgcaaaatatttatataaattattatacataatcatacataataatataataataataatatacatacatacataaaaatacacgcttaagcgacatctgacatatacgattctgcaactattctgtactccctagtttgttaatcaacaaacggtgacgtcacactcaattgtataccaccttctcaagcatgctgtatttgttttgttttgattgagagaagaaataccggtgtttttgtcagttaatcgattatattatgagcattaagatatatttaccggtcaactattattacctcaataagtcaaccaatttgtacggccaagtgcaaataaatgaagataatgtcgtatcgtattacgtgctggaagcatcagatttggagttcagtgacaaggccataaatcatgaaaagggcaatctgcgtttcctgggctctattctcaacgaggatttcaatgcggaccagaaccaatttcttaagttcaatatgcgattgtgtttcacatacaatagcagtcaggcgaatataacactggtttatttgggcattacgcccgaatatctgaagcacattaaagtgattctctacgacaagcaaatggtacgaaatctgttcgtatctggtgaatctgaaaataggcgatctttggaatacaatgataatgatagcaccgattgcgactttctggagctctctagactgaatcaaccaactgctgacaaccaaaacaaggcaaacaataatgccaacaagagtatccaatatggcttaacactcattgccgattctccaattaagatattcgaatatatggcggaaaatgtatttatcaacagcattatggttcacacaactatttata

SEQ ID NO: 21239 - DNA, 1454 bp, DROSOPHILA
ttttttaagtcgtttcttttatatttgcgttaatatacgcaatagagggacacatttttcttcggcattttaaagagttaaaattgttttcgtgttaagaaatattaattttatttagcaacaagaatgggatatgatgaccgtgaacgcgatcgcgagagacgccgacatcgttcccgctctcgggaccgccatcgcgaacgctccagggatcgacgccatcaccggaactcgaggcgcaagccgtcgctttattgggatgtaccgccgccgggattcgagcacatcaccccgatgcaatacaaagccatgcaggcgtccggacaaatcccggcaagcgttgtgccggatacaccacaaacggcagtgcccgtggtcggatcgacaattacccgacaggcgcgtcgcctgtacgttggcaacattccgtttggcgtcaccgaggaggaaatgatggagttcttcaaccaacagatgcatttagttgggctcgcccaggcggccggcagtcccgtcttggcatgccaaattaacttggacaaaaactttgctttcctcgaattccgatcgattgatgaaaccacccaggccatggcattcgatggcatcaatttgaaggggcagagcttaaagattaggcgtccgcacgattaccagcccatgccgggtataacagatacgccggcaattaagcccgctgttgtttccagtggagttatttcgacagtggttccggactcgcctcacaaaatcttcatcggaggtctaccaaactatctgaatgacgatcaggttaaggaactgcttttgtcgtttggcaagctacgagccttcaacctggttaaggatgccgctactgggttgagtaagggttatgctttctgtgaatatgtcgatcttagcatcacagatcagtcgattgctggcctaaatggaatgcagctgggtgacaaaaaactgattgtccaacgagccagtgtgggcgccaagaatgcccagaacgcggccaacaccacgcagtccgtaatgctccaagtgccgggcctgtccaatgtggtgacctctggaccgccgactgaggttctttgcttgctcaacatggtcacgcccgatgaactgcgggacgaggaggagtacgaggacatcttggaggacatcaaggaggagtgcacgaaatacggagtcgtgcggagcgtggaaattccacgtcccatcgagggcgtcgaagttcccggttgcggcaaggtctttgtcgaattcaactcggttctcgactgtcagaaggcgcagcaagcacttactggacgtaaattcagcgaccgcgttgtggtcacatcatatttcgatcccgacaaataccacagacgcgagttttagatacaagtaaatcatatatctcacattcaccatttgtccaataaatatcagaataaaagtaaaattttgactacgaa

SEQ ID NO: 21240 - protein, 416 aa, DROSOPHILA
MGYDDRERDRERRRHRSRSRDRHRERSRDRRHHRNSRRKPSLYWDVPPPGFEHITPMQYKAMQASGQIPASVVPDTPQTAVPVVGSTITRQARRLYVGNIPFGVTEEEMMEFFNQQMHLVGLAQAAGSPVLACQINLDKNFAFLEFRSIDETTQAMAFDGINLKGQSLKIRRPHDYQPMPGITDTPAIKPAVVSSGVISTVVPDSPHKIFIGGLPNYLNDDQVKELLLSFGKLRAFNLVKDAATGLSKGYAFCEYVDLSITDQSIAGLNGMQLGDKKLIVQRASVGAKNAQNAANTTQSVMLQVPGLSNVVTSGPPTEVLCLLNMVTPDELRDEEEYEDILEDIKEECTKYGVVRSVEIPRPIEGVEVPGCGKVFVEFNSVLDCQKAQQALTGRKFSDRVVVTSYFDPDKYHRREF

SEQ ID NO: 21241 - DNA, 2994 bp, DROSOPHILA
atattgctaagcgtctgcgcgcttcatggttcttgtggggcaactttgatttggcagcggaggcggcggaggcagaaaatttttcattaatttgattgaacctcagtcagccgaacggaaatgaggcagaacaatttaatgtcatatttgcggcgcacaaaaaattgttttcatttgatctccgcaggtctgacctcagtcaggggacagttcaatttaaaagaaacaaattggacaataaataaggcgattacgatattatcatgctgaaaataaactcaccgcatggttctataaatttttcatttgtaaactattgatgttattctgagaacggttatttgtttgtacttcatatgattttttgctgattaatcgaaaaaaaaagtttttttccaaatatgtatttaaattgctcttactttgaggctacacaaataaatctatttactggaaatgtgtcaattttatttcaaacttttataccgctaaattttatacccaacccgtttttcgaatcttttgtgtttgtcaggttaatgaggattcaatggaaaaattgaaagatttatatcggattattattaatgatataacaaatacaattaaattgaattaaggaaagactgaatccagagttcatccgtgcgaacttgcgtagtggcttggcttgtacccgaagtgtggacgccaatcgtcctttatatacctcatcttgtggtgttttactccagaagcgggcaacttttcgctgtggcaaaactggagaaaggccaaaagcaaaattactaccgctttcaacatggcgattgactgactattccccaaatcgccttagctttttaagggcaatttaatacacctcccgactgataattcggatttaacagccaatttggcatggaccttatatgttatagtaactatacttaccaaataagctggataaatatacttttgtgtaaaattgttataatatttaatggattgagccaaccctttacaaaatggtatcttctatgcgggagtttttaatgatttccatgcccattatcgagaaggcgagagcatcgtataccctgatgtatagatccacgcccgtgtaggcgggacagttgtgaccagccacattgatgccgcagatgcgttcgtcgtgaacgaggggattacccatggccaactggcactgggccgtatacttcatgttcttcacgcagatcatagtgtcggtggcgaccatcgcttcgggatccctcatgcggagtcggcacgcctgcatcggtatgatgtacgttgtctgcgagtgaatactgtggcgactcctgatccacagtggcagctcgatgggctcgtatatttctagctccgaatcgcacagcttcacggtgtcaccagtcactttggaattctttggggacttggttagttgaatagcaaccagcatgggatccgctcctttaaggtaggtctggttgagagcgactcttttcccttcgaggacttcgtcatcgtacatcttcatcgtgaccacttcactgctggccaaattaaaacaagtgctagtggtaatcactagcatctcggatatcaccgtgcccatgcagatatatttgttttgctgatagagtctcaccatcagctcgtgcagcggcaccttcttgtccgaattggtcaaggtaactacaggctccttggaatgtccatactgtactgtgtcattattcggattatttggattattgagattattgggattatcgggactatcggaattatttggattattgggattatttggattattgggatcgatagccatttcgtgatcgctccttacagtacggcgtcgtttgtagttcatttgggtttttcgattgtgctgcggcttataggtgtccagcatatagcgatggagatgagtgttcgaggattccgactcgttcgccaggaaagcgagcaaaaggatctgaataatgcacagtggtcgcagcatcgttactcaataagtctctggtactaagcatatcttattattgacttgaccatagtgcttacaaaatcaatttgtgacgccttataatttgacatttacactaattgcaaccataacataatatttttttacactgattaaaatttgaataaaactaataataatcgagaacgctttcaacatgattctcaatggaattcttgacttcccgatctggtcctccattaagaggatcatcgaatgctaattcctctgggggaccaccaacataaacattgggcgacttcttcactatggcctcaagcaggggtgacaatgtagttggatacgattcattgtatggacccgatccagtgaaagccctcagggcatccgtggccgtctggatgaagggtatgaccggcctaatgggtaggtatatgtccatgttggtggagtcgtcatcctcgtcgcagtgctctccatatatattaatggccgccagtttgttgtcaatcagtaagggatcaccaggccgggtgctgcatgtggtcttcttcgagtgtcgcttgtttcgtacgcagataaagtccggctcaaaggtggaaacatggaatacctcctttaggccgtagtggattttgcagcgatctatgtccataacccgcgtgttgtacagtctgatctggaacttgggtggaccatagtaggccatctttacgtcatcccccgcctgtggcttcttacgatgcaggggaatatatcggtatttgtctctgtcgagcttgttagagagggcgagcagagccacgtagttggtaaagcgttcattcttattaaccggcatgaaaaatccgatcacctgatgtggttccggattgtcgtccaattccacgccagtcaatatggacagatgtttggccgtgtactcgtatatcaaatcgaatctccgcggctggaagcagtgcgtcgaggtcacgaccattctgcgggagattagcgcccccgcacagatgacggat

SEQ ID NO: 21242 - DNA, 994 bp, DROSOPHILA
gatgctgcgaccactgtgcattattcagatccttttgctcgctttcctggcgaacgagtcggaatcctcgaacactcatctccatcgctatatgctggacacctataagccgcagcacaatcgaaaaacccaaatgaactacaaacgacgccgtactgtaaggagcgatcacgaaatggctatcgatcccaataatccaaataatcccaataatccaaataattccgatagtcccgataatcccaataatctcaataatccaaataatccgaataatgacacagtacagtatggacattccaaggagcctgtagttaccttgaccaattcggacaagaaggtgccgctgcacgagctgatggtgagactctatcagcaaaacaaatatatctgcatgggcacggtgatatccgagatgctagtgattaccactagcacttgttttaatttggccagcagtgaagtggtcacgatgaagatgtacgatgacgaagtcctcgaagggaaaagagtcgctctcaaccagacctaccttaaaggagcggatcccatgctggttgctattcaactaaccaagtccccaaagaattccaaagtgactggtgacaccgtgaagctgtgcgattcggagctagaaatatacgagcccatcgagctgccactgtggatcaggagtcgccacagtattcactcgcagacaacgtacatcataccgatgcaggcgtgccgactccgcatgagggatcccgaagcgatggtcgccaccgacactatgatctgcgtgaagaacatgaagtatacggcccagtgccagttggccatgggtaatcccctcgttcacgacgaacgcatctgcggcatcaatgtggctggtcacaactgtcccgcctacacgggcgtggatctatacatcagggtatacgatgctctcgccttctcgataatgggcatggaaatcattaaaaactcccgcatagaagataccattttgtaa

SEQ ID NO: 21243 - protein, 330 aa, DROSOPHILA
MLRPLCIIQILLLAFLANESESSNTHLHRYMLDTYKPQHNRKTQMNYKRRRTVRSDHEMAIDPNNPNNPNNPNNSDSPDNPNNLNNPNNPNNDTVQYGHSKEPVVTLTNSDKKVPLHELMVRLYQQNKYICMGTVISEMLVITTSTCFNLASSEVVTMKMYDDEVLEGKRVALNQTYLKGADPMLVAIQLTKSPKNSKVTGDTVKLCDSELEIYEPIELPLWIRSRHSIHSQTTYIIPMQACRLRMRDPEAMVATDTMICVKNMKYTAQCQLAMGNPLVHDERICGINVAGHNCPAYTGVDLYIRVYDALAFSIMGMEIIKNSRIEDTIL

SEQ ID NO: 21244 - DNA, 3195 bp, DROSOPHILA
caaaaaggaccttcgcggagctgggattggggattcggtggcgaacggtagagagacaaggataatggcagctgcacaggggagctgtgccagccacaaaaggataatgcccattgtgtgtatatatgcatgtgcctgtctgtgtacttgtgtgtgtgtgtgtgtggcacaaactttgcaggcaaaaggaagagcatcctgggcagagactctctctgtgtgtgtgtgggtgtggctgaatgcccgactaaatgtgactttatgtgctttaataaagtataattttgggcgcttaaatggcgttcggcggcgactttcagaccagagcctcgtaaactgttgcaagctggcagaaggatgccccatgccatccgaaatccgaaatccaaatgtccgttgcggttgtgtgcaacacaagtgaaatgtcatgtcgctccaaaaacgaactgagcccgatattccgacagctacgaccactgacaactgtcgagccgcaggacaaaccacgcaaatttagttgatacagtgaaagaaaagatggtttttcaggtaggatcaatgtactcacagctgctgacgaaagttcgttaacaggaaatttaataattataactaaacggtcaaaaggaacaggcctatatttggattgcaatgattgaaaataaatagtcgaaatggtaagtgaaatgtcctcaatattacaagctattaaggcagcttttcttcatgtgaaaatccaaactaatggaaaagtgagcattgaaatagaggcctcagtgtcacattgtctaatattgactgcaatcaatgcaacaagccaattgatgcatgacaggatatttagccatgtccttgcatacatgagcatgaatataaacaaaacctaatagtctattggaattaaaactctgatgcatatgtatgttttaagccctattttgaggcgatttcacgctttttactttttacctatctttcttgcgaagaacaaggattaactcacctgaacgcgggactcagtgaggccaatccgcatggcgatctcctcgcgcatgaagatgtccggatagtgcgtcttcgagaagcagcgctccagctcgttcaactgggcgggcgtgaagcgggtgcggtggcgcttctgcttgtttttgtccaggtgctggaagacagacacgaccagaggtgaaaggataatgagaggattgacctgaacgggtggacgggtcttacaacagtgacgaactaccatactagaaatgcaagctacgcactacgttagggtatacgaattacggtctacagaagttacagttagagtgggtaatagtagtgggttaggagttctacggttctaagtatgaaaatcaaagtacacttacttttgtttatagtttacgtaatacgtatatgattcataaggtacgaatatgattcatggcacatttaattaggttcattacacaattcagaacacacacattcacgtttttggaaacagattttcattggcagattttcgtttcagatttcgaatttcggatcgaattggtttggattgtatttgattttggattttttttttttttttggcatagcagagtagaatttgaaggaaaaaataaacatcgaaaagaacatggattattaaaaaagtttcatattaactaggcgctatgacgcatcctctctcctgccacaaggacactctccctctctcgctctctctctctctcgccttctctttctatatagcgctggcctgctcacctgatcctgttgctgcatgctgttgttgttgttgccgttgccgttgttgttgttgccgtttccgttgccactgcttccgtttccgccgttcagcgcattggaattgtcgcacagaccgccggatatgtgcaggcgtgccacgcccccgcccactggcactccgccggaggatccaccacctcccgctccgccgccaagatcggccaagttggggcccacaggcagttggccaaaactattgacgcccgcgtgcagtgctgtcagcgcggccttgggcagatcacaatccttggggcctgaaatggaaacatgaagttcatacatataatgctatataatcgcagaagactacgacaaaacttatacattaacccatactttaagcttacaaagacatgaccgacggcctttttagacgcacttatcattgaatttatcattaatcgcaccctaatatcgaaatcaattgagcactgtttaactttagatttcaatttcagctggctgggacaaatatctcaataggcctaataaaacttgacttgtcttagattctgcaaacatcgatttatatttttttcacagaataatgatttcctacgtctcgggttggttactggctctgattttcggcaacatactctttttgttgttttcgaatgtattgaaaatgattctgctgcaattggcaatagttattccaccgatctttgcctgtacatacgtttggtatcaatccgcaggtgcaactcgtagcaattcccaattaaacggatacaatgtgcgccgcaaaagagcgagaatgtttccaaatcgtccgatgtcaaatgtgaatgtaagtttgattggcttaatgatttgaaacacgttgcatatgcatatatccacaatatttcgcagatggatttggactaaagcacgcacgcacacgagtttggcaaatgttttgttaaactgttgttgaatttttaaaactgtttcacaattgagatccgcattcgtatatcccgctcaaacggaaaacgtttgtcttttaattaatttcttgattggcgaccgtcgagctaacgaactagaggattgctcacaacgaactgcggcgatcggataaattgaatttttcaacaacctgtcattcagaaggcgaaagatgccaaaaacagtaacgaacgtgagagagcgaagctgagtagaagaaaccgaggtgcgagatatacacagatatggccagaagttgagatacgcacacagtcgccagacttccagatatacatatacaggtaaagatacagatacaaatacaaattaaaagcgagagagagagccgccaagtgctaaccccttttctaccttcaggcctcacttgactacgtaacgtatttgttatttttgtttccatactatttgtacgtgtatatcgctggatgg

SEQ ID NO: 21245 - DNA, 475 bp, DROSOPHILA
atgataagtgcgtctaaaaaggccgtcggccccaaggattgtgatctgcccaaggccgcgctgacagcactgcacgcgggcgtcaatagttttggccaactgcctgtgggccccaacttggccgatcttggcggcggagcgggaggtggtggatcctccggcggagtgccagtgggcgggggcgtggcacgcctgcacatatccggcggtctgtgcgacaattccaatgcgctgaacggcggaaacggaagcagtggcaacggaaacggcaacaacaacaacggcaacggcaacaacaacaacagcatgcagcaacaggatcagcaaaaacaagcagaagcgccaccgcacccgcttcacgcccgcccagttgaacgagctggagcgctgcttctcgaagacgcactatccggacatcttcatgcgcgaggagatcgccatgcggattggcctcactgagtcccgcgttcaggtg

SEQ ID NO: 21246 - protein, 152 aa, DROSOPHILA
MISASKKAVGPKDCDLPKAALTALHAGVNSFGQLPVGPNLADLGGGAGGGGSSGGVPVGGGVARLHISGGLCDNSNALNGGNGSSGNGNGNNNNGNGNNNNSMQQQDQQKQAEAPPHPLHARPVERAGALLLEDALSGHLHARGDRHADWPH

SEQ ID NO: 21247 - DNA, 3954 bp, DROSOPHILA
tgccaaagcaactgcaacttgttagacttccgccttccgtttccctggtcacccaaggcttttttgtttttattaacttccgtgagaaatgcgatttttacgcgcatctggcgctattgtgagggaaatgttgcagaagctgcaggatctgcaggacacacttgttgccattgttgagatacaaaattaacttttacgctttattaccgcaagaatggtgaaacaaaacaaatcttaagttgcaactgcactttggaaattctccaacggcagccacaccatgaacttctgttttctgctggcattttctgctactgttgctctaactgccactgtctctgttttatttggacttgtttccggagtcgccgctttttgtcgccggcatccggaggccatcaaaattgccggaagcgcgagccgggcagtcagtggcattgtcatcaactcaattacatttgcgactgactccttgcagccgaaggatgcctcgcttttgttcgctgactgatgacaggaccgcctaaacaagccgcacaatacgcacggcgtcgctggcttttatctggccacgccccccacatctacccccaactcccgccccaccccacgaaaccattgtgtcctgtctcgtgtgacggatgcgacaggaagcgctgcgagtcttgatagtccgactccggcaacaaaggctgcggagcgggaaaaaaagagcgactgaagttgggtgcagaagcaccttttcgtatatccatggcgccataatttactgtttcccctcaaccggagcctccgtaatctatgggcatgccgctccggcagcggaaatgtttcacagagattagcacaacatgtcagcgttttgatttacctgcatgcccagagattcggcccacaaactcagccacctgaactccgggaactaacaggctcaggttcatcgaatcagtatcagtatcgttgccgttatcggattcagtttcagtatcattagccaagtttatgtctgcccctccatttccaatgcaaattgaaacgactgcgatacggcatgcgaacggcaagtgctcatctccaatcggtccttgagcggattatctaggcacaggtgcgattcggcgtgcaggagatgggtgcccaggcgcacccatcgctgcgatctcctcacggtctcattccgcccgcacggctccaatgctattcgcatcccgaaccccacagccaggcaaagctcccgatgggtgctcaactgtccactctggcgcagcatgctccactgggtgatgtcgctgaggtagcagctcgccaggattggctgggagtccttttgtctagcgtgcacacaccgatcctcattccgcaacgttcccgtagccgacagctcatcgaagtgcatcctgcgaattgattgagggcaagttatttttcaatgaacaataactcagatagctgaccacacagctcataaaagtataacttttagagctacataaaaatgtgtaagatatattaaaccaaaagatgccatcattactgaatattaaatatatctatagcatagtcatcccttttacatgcaatttgaaatgtatacatttcttatgcacttaacgtttttttttttttttcagtgcactgaccttagttcggggctgacatgccgtagataccattcgaagggatggcaccgccgttccttccgcatccgttgcagctcatcataggtgtgatccagtggaattcgcctggccgccggtctcagtgcgtagaacatatttttatactcgtccagccaggactcggctatgatttttgagttgctggtgacggagagggaagagagttcaatcagcatgtgattggaatgtttatattaaacgaaagccggtctgcaatgaaattgaaaaataccagaggcggtgcggccatttcacacctaatccccgacctcggactcactgcagataggtttcctgggccgggctcaactgacggtcggattgcggtggaaagtcgaaggcgtggcggcggcgaaagatgtgtccgattcgactgcagggcacgatctcaatttgtccaccgcaaagccacaatttaatggccagctcgatggactcaccgccccagatctacaaagggatgaatgtggacaactgagtgtatttgctagaaaatgtgacagaggagagcggcattcttggcgttcgacattagcaattagagctcttgacaccggctaattgggttttctcaccttcagatacgggttgaagctgcccagcttaaggaaccattcgcgtgacatcatcagtacgccgccagcgaaggcaggactctggtagggcatctccaggctctcctggttggtcagctgtcgtttcagccagtgaaagtgtagggaccagtcaaatccgcccttcagcaactcgttgcccttccggtagctcagggtggtcgggtcaatgggatcaagtagtggactaactgccagattggtattgagtgcaagccgttccagcagtggctccagccagccctcgttcacctcgcagtggctgtccagaaagagcacataacgtccactggccaaggaggcgcccctgttgcgcgaccaaatcaggcccatgcgctcctggttcctgaggaaggtgagcccaaggcgatatctcgacccgaacaccccgcccatccatcgcttgaggtcatccagcagggtcactgttaattgagcgataagagcgacccttttgcgtaagtgggttcaatggcctaccatctcgctgactgccatcgtccacaaggattagctcatgcagatagtcctccggcgagcgactcagcagggacacaatggtacgcagcagcatagaacgcgcttcattgtggaaactaatcaccacactcacattggcctccaaaggggcaggaagtatagaattacgtgtagtacaactaaaaacatattaattattatttcataaagtgaatcaaagtttgtctttcttttccatacctatgatgccttgttacgggcaacttacgtataagacccaaagcattactcaaatgaatattgtattggtaaaaatcctccgatgtttctggtgtatgggatatgaatacgcgccaatccaggtggtcactctcctcactctcattcatgaaagataacagctaaacaaaaaaacactttaatgatttatcacataaaaggcgggcttaatcaactcacttcattggcgcttgaagcatcatcattccgtataaatatgactaagaaaaacaactgacagataaggaatgctatgatatagaaactacaatgccgaggaccgcaatattttccacctgcgtgcatgacgaatatatctcgagcaactgaagctattccgctttggaatccacatggcgctccaagtggtcacaagtcgggccgaaaagcaaaactaaatcgctgcgattccgccttcacgctctgcattataacttctgttcggccgcctttcatattatcaccttcgatgaaaaaacttgtttttatacttaatttcgcccagcttttttacttagctggctctggttgtgtcgtcacatgcagaatgctccaatcgaagctcccccaacgccatatcatcggtatatgtcacacttgtcattgataaatgctcgataagtctggcaaatatttgtgtgcagctcgcaaggtgttaattgcagccaaacgaaactatctattacccatgagctgtcagtttttcggtagatttgggaggtttgggtgctacgggggcaatggggctatagagaatggacaggtgagcaagagcatgttatcgatgatatttcattcatggcccttggcgcaattcgctatcaaacatttacaagtttttatgcagctgattgtgattgaatgttattgatatacgagcaatgtgtagctgaaaagcaaaa

SEQ ID NO: 21248 - DNA, 1392 bp, DROSOPHILA
agttgtactacacgtaattctatacttcctgcccctttggaggccaatgtgagtgtggtgattagtttccacaatgaagcgcgttctatgctgctgcgtaccattgtgtccctgctgagtcgctcgccggaggactatctgcatgagctaatccttgtggacgatggcagtcagcgagatgtgaccctgctggatgacctcaagcgatggatgggcggggtgttcgggtcgagatatcgccttgggctcaccttcctcaggaaccaggagcgcatgggcctgatttggtcgcgcaacaggggcgcctccttggccagtggacgttatgtgctctttctggacagccactgcgaggtgaacgagggctggctggagccactgctggaacggcttgcactcaataccaatctggcagttagtccactacttgatcccattgacccgaccaccctgagctaccggaagggcaacgagttgctgaagggcggatttgactggtccctacactttcactggctgaaacgacagctgaccaaccaggagagcctggagatgccctaccagagtcctgccttcgctggcggcgtactgatgatgtcacgcgaatggttccttaagctgggcagcttcaacccgtatctgaagatctggggcggtgagtccatcgagctggccattaaattgtggctttgcggtggacaaattgagatcgtgccctgcagtcgaatcggacacatctttcgccgccgccacgccttcgactttccaccgcaatccgaccgtcagttgagcccggcccaggaaacctatctgcacaactcaaaaatcatagccgagtcctggctggacgagtataaaaatatgttctacgcactgagaccggcggccaggcgaattccactggatcacacctatgatgagctgcaacggatgcggaaggaacggcggtgccatcccttcgaatggtatctacggcatgtcagccccgaactaaggatgcacttcgatgagctgtcggctacgggaacgttgcggaatgaggatcggtgtgtgcacgctagacaaaaggactcccagccaatcctggcgagctgctacctcagcgacatcacccagtggagcatgctgcgccagagtggacagttgagcacccatcgggagctttgcctggctgtggggttcgggatgcgaatagcattggagccgtgcgggcggaatgagaccgtgaggagatcgcagcgatgggtgcgcctgggcacccatctcctgcacgccgaatcgcacctgtgcctagataatccgctcaaggaccgattggagatgagcacttgccgttcgcatgccgtatcgcagtcgtttcaatttgcattggaaatggaggggcagacataa

SEQ ID NO: 21249 - protein, 434 aa, DROSOPHILA
MLLRTIVSLLSRSPEDYLHELILVDDGSQRDVTLLDDLKRWMGGVFGSRYRLGLTFLRNQERMGLIWSRNRGASLASGRYVLFLDSHCEVNEGWLEPLLERLALNTNLAVSPLLDPIDPTTLSYRKGNELLKGGFDWSLHFHWLKRQLTNQESLEMPYQSPAFAGGVLMMSREWFLKLGSFNPYLKIWGGESIELAIKLWLCGGQIEIVPCSRIGHIFRRRHAFDFPPQSDRQLSPAQETYLHNSKIIAESWLDEYKNMFYALRPAARRIPLDHTYDELQRMRKERRCHPFEWYLRHVSPELRMHFDELSATGTLRNEDRCVHARQKDSQPILASCYLSDITQWSMLRQSGQLSTHRELCLAVGFGMRIALEPCGRNETVRRSQRWVRLGTHLLHAESHLCLDNPLKDRLEMSTCRSHAVSQSFQFALEMEGQT

SEQ ID NO: 21250 - DNA, 5927 bp, DROSOPHILA
ttaagccacaaaatgattgaaaggaaatgttgtggggtaaaagtaaaattctcagatcgatgagtacaatgtactatgtacttccctcggcagctcctgctgtgttccttcagccgtttgtgtctgtttgtccctaaagtaattaaaagtaagtaaagcaaagtcaccccctcgtcggtgggcgtggctgtccagtgatttgccacccgcaacgatttttttttccagtactttcctttttttcttttttttgcgtttatgcaaatggccgctgaccaaaagaattaatgcgtcccgaaagtgagttgaattggaatgagccgcaattctcggagtccaaaaactgcgggcagcctgtcagccgtctgttttcacttcttttgcgggcgggacgaaacatcaacgaatgtcaatgaatttacaggggaatgctataaaaagcccgaccaaacaaaaaatgtaaagcccgtaattccccattgtctcagtgcgttgctaatttggccatatctttaaatagccagccgaacggaaaggaatcatttgtaatttaaagtccaattattgtgccatttgaggggaaaactgtggcatgccagggaatggaatgcctcgtaagccacatcgctgcacttcattaaattgacgagacaaaagatctctacacatacaataatggaaaatatttgttccacaataaaaggggttgaggaggcactttgtgttaatgcccaacagctgcaaatctcggtctgcggcggccttaaaaatagagaaatgaagatggacggtccgatgatgatccgcttggctgaaattattctgtaaattctacctatttatatcgtaaatatagattttgatgctgatgccgatgctgcgcgagtaaaaccaaattcggcccacgcggcgtatgcgcgtttttcgcacttaactcattaaaacgtttgccgctggcccattgaaatttaatgggaaaacacgcgctgtttttttttttttagaaattcgcctcaatagattaagctcgtaaattatttaattgcattcttgatttttgatttgaaatcaaaacattccctcatttaaaaactcattaggaatagcaatggaaacgtggttgagcggatgtttatattgtagaaaaaaaaaatatatatatatcaaatatatgaaaaaggttttgaagtttgtcagtcaataaatcaatataaagccccacttaaaattacgacacaaaagtttccatcaaacgaaatgcaaacgaaaacaatgctctgaaaatatttcatcgatatattgaccgagcactcagatgtcgtcacttgaaggacccttctcgtccagcccccgagtgcaccaaccccactcaccttgtagaaggccttccggaaattctcggagaggaaggcgtagagcagcggattgatacacgagctgctgtaggccagagtctgggcggtgacctggatgactagcttggtgagggtgttcgtctcgatgacatccagtgacttgagcagcaggatgagctgttcaatcaaacgaaagaatatgtttgattatttaaaatatatgtgggtttcatatgtattattgcgtctcacctggacaggcagccagagcgaggcgaaggcgatgaccaccacgacgacgagtcgggtgacccgcttgcgaccgcgctgcgactccttggacatgcggacgccggttccctggcgccagagccgcatgatcatgcgcatgtagagaccgctgatgatcatcaggggcagcaggtaggagctgatgaagaaggtgacctggtaggtgcgcggaccaaggaagtcgttcgtcgtgaaggtgcacatgccgtaggtgatgttcttctttgcatcgtaatccacctgcggatatcgatgagaatgtggttgtgggaactatgaagaaacgtgtgcggtgtgggaatcgaatattgcgcatacgtcatgttggcggtgacagttgcatggcagccaagcaacgtcaaacggccaacagccagacatcgtaaataaaactaaactgtcatacgaatagttcggacgtcgacaactaactcgcaatctcactttgtttctctgtcgctgacatttggctgacaaattgttcagccggagttttggatttggataaaagcgcaatgggtatgggcaatcgggctttcgaggcttgttgtttgggggatggagaatctattggtctgttggctagacgagactggtttgctgacgcttaggagggtcgtaaactgcccggtgaatcgtaaaaatattcgcagccttttgtttacatttttgtttacaatctccgccccttcaccgcgctttcaatcgatgaatgcgtgtggaaaattgcatttaaaaaatcttcccattaatgccggcatgaattgcttacaaaaatgtttgtttatggcccgcccttgttttcgttacactgagcgagcgatgttggcccacaaattgagttcgaactctgaatctgcgcagcgtcaagtggccaaggccacagaagtagacaaatcatggccagaccctccgctgatttatgggttcatttcgctggcatgttctccgcaaaacccaacgacttcatagacttgacaagccattaatgccctttcctcgttcgcgagaaatcagccaacagctgtcaatcaatgccatgacctggagatcgcatatctagttacgcagtcggacatatgtgcatttatgattattatttgatatcgatttctaataaaaagataatggcacacgctctcacaggctcatttgatatgcatataccaagcatgtagctgggcaatgtaatatggaaataattaatagcaaactgttaattaacatgttgatcaaacatgacttaattatgcctttttatcgcctgttcctttgtatttgcacacgcagacaccagataacaaagcaaagcacacatatgagcattcaatgtgggctctatttttccagcttaatccttagacaaagcaaagcaaacacataaacaaacaataatgccacccattggagcactctccccaatgcgaacaaaaaccgaacgagacaaaaataacaatataacgaagcgtgaaatgccatttaataaaatattaggttacaataacaacaccgggagcaacagtgggccattgccatctcacagataaaaaaagttcatcatccgtgtgaagatgagattcgtttaattaaccgcgactgtcgcttttggccaaggaaaaggggaaacacaacggcacaaacaaaaagttggtcatgtgtgatgtgggaatcgctttattggcactgggaaatcagtggaaaaagcccgcgggccatttatgagtatcaacagaaattggaaccaatgtccgaccataattacgtgtagttgatactcgcaatgaaaaaatatgatagatattcagtattaaatagcactcaacaattgtttgaactgtaccggaaaattgaatattagttaataatcccagtgttttcttgcgaataaaaacttaaggttaaagtctgcaaatacaaatacattgtatatcctcaaaatcgccggtaaattccccttttcatttttgatatcacccgctgatctcgagcaaaacaattccgatcttcgtcgattattccgcaattaaattgtttctcgcacttttcgcatcgatcataaaagcctaatgtccaagatgagcatttcaaggtcgccacccgcgaagacatttatcatacgcagtgtgcgcccaaagttcgcaagtgcaaagtttccataatggccgcttgttacgacttacgactgcccatgatttacgcgcttttggatcaacagttgaatttgaaattttgcaagccacacggagaggaggtgggcagatatgggcagataccgcccagttggcaagtgtttctcgctggctatctggtctataattaaaaatttatgaattcaaaatagcaaattagtaacaaaaacaaatcgggcgccgcgcatcgcgaaattttcaatataaacacaaaacagaaaataagataaaatggggatactttaataggggcatatagtaaaaacaaatgagttgtatcaggatcagtcgattggacgatcgctggtttgtgcggggtcttcgctttctggattacgatctggcagaaggcagaccatctatctaggtatctatagctacattagaaccaggcagtcggcaccattgacgtgcagcgagaggaatctaacgaggtgacgatgatggaaagcaataaatttgcctggcccgtgttcttcacagcaaattcaggcacagcaggcccacttatagcattctacccactcctcccactcttccactcccacttaccaccacgtcgtgggtgaaggccactggcaccgaaacgaccagcaccacgatccacagagtcacgatggcaatcagggtaatgttctccgtcctcatcatccgcgagcgaatgggatgaaccaccgccaggaaccgatcgatggacatcagcaccagcgtgtaaatggaggcgaaggcggtcaccacaatcaggtactggacactgcggcaccagaaccttccatatggccagtagtacaccatgtaatcggtggccgtgaagggaatgcagaggattacgaacatcagatcagcggcagccagattgacaatcatcaggttggtggtggagcgcatgttgttgttgaagaccaccaccaggatgaccagcaggttgccgaagaatcccgtgatggcgatgacgccgaagaagaatcccactatccacggcaaagtgccattgatggccagccactcttcgtcggtgaagaatgaggtgatattctcctcatttctggttgcatttaggctaatattagccagcattgtggtgttctccatgttttctcagctttagtgcacaactttccggttcactttgtactggctattggcgatttcgcttgattgtcacgggacattttcaattttgggctctttttcgctcacagttcatcgaacgcaaataacaaatttccaattaggagagtttcacaaagcagccgccacaaaaattcaattatcatgcggaatactacgaccgttgagcttcggagacctcaaaaacgtttcgcatacgccgtgtggtatcgaactcgaccggaattgttcgcaacgtggcgggggcaaaagcaatttggtccttccacgataacggtaattgtaggtgggtagcacaggtaagacaacaataaaggacagcacacaaggatcacggtgaggcgaaaggcaagagagtgagtttaaaggtgagggcacgtgcaaacgacaccgacacagccaaactgtgccgagtcacaccctgacgacaaggacaccggggtgtccttaggttcgaggaccacgttgctgcacctacaccataaattcaatatgatgtcttcctttcgctgcgtttctgtttacatttctcgtttgcttttttattgacaaacgaacggcataaattttggggctataaggctatggccaaaaaaccacgttcctattgttgctaccgactgctgcgccgcggtacgctatatattttcgattttatactgctgcttttggccaattcgatagtccacactgctcgcgtccgtatccagcgcccaactgattgctggctgagcttgttgaggaatacttcgatgcctcggcggcggcaaaacgccggcagcgacgccagccatcccagcaagaataatggcaacaatagcaacaaccagcgcagctggcatctgtgcgtgtgatggttttgggtggccgccggagccacctcttcctcctcatcctcctcatccgatcccaatccccatcagctgggctggaatgtttgctcttgttgctcccaccgcta

SEQ ID NO: 21251 - DNA, 990 bp, DROSOPHILA
atggagaacaccacaatgctggctaatattagcctaaatgcaaccagaaatgaggagaatatcacctcattcttcaccgacgaagagtggctggccatcaatggcactttgccgtggatagtgggattcttcttcggcgtcatcgccatcacgggattcttcggcaacctgctggtcatcctggtggtggtcttcaacaacaacatgcgctccaccaccaacctgatgattgtcaatctggctgccgctgatctgatgttcgtaatcctctgcattcccttcacggccaccgattacatggtgtactactggccatatggaaggttctggtgccgcagtgtccagtacctgattgtggtgaccgccttcgcctccatttacacgctggtgctgatgtccatcgatcggttcctggcggtggttcatcccattcgctcgcggatgatgaggacggagaacattaccctgattgccatcgtgactctgtggatcgtggtgctggtcgtttcggtgccagtggccttcacccacgacgtggtggtggattacgatgcaaagaagaacatcacctacggcatgtgcaccttcacgacgaacgacttccttggtccgcgcacctaccaggtcaccttcttcatcagctcctacctgctgcccctgatgatcatcagcggtctctacatgcgcatgatcatgcggctctggcgccagggaaccggcgtccgcatgtccaaggagtcgcagcgcggtcgcaagcgggtcacccgactcgtcgtcgtggtggtcatcgccttcgcctcgctctggctgcctgtccagctcatcctgctgctcaagtcactggatgtcatcgagacgaacaccctcaccaagctagtcatccaggtcaccgcccagactctggcctacagcagctcgtgtatcaatccgctgctctacgccttcctctccgagaatttccggaaggccttctacaaggcgaatttctaa

SEQ ID NO: 21252 - protein, 329 aa, DROSOPHILA
MENTTMLANISLNATRNEENITSFFTDEEWLAINGTLPWIVGFFFGVIAITGFFGNLLVILVVVFNNNMRSTTNLMIVNLAAADLMFVILCIPFTATDYMVYYWPYGRFWCRSVQYLIVVTAFASIYTLVLMSIDRFLAVVHPIRSRMMRTENITLIAIVTLWIVVLVVSVPVAFTHDVVVDYDAKKNITYGMCTFTTNDFLGPRTYQVTFFISSYLLPLMIISGLYMRMIMRLWRQGTGVRMSKESQRGRKRVTRLVVVVVIAFASLWLPVQLILLLKSLDVIETNTLTKLVIQVTAQTLAYSSSCINPLLYAFLSENFRKAFYKANF

SEQ ID NO: 21253 - DNA, 3533 bp, DROSOPHILA
tcaaattttcagttataaccgctttgattgttattgcttgtttcgaaacaacgaaaacaaatggcacggaattattattttgtatttgtattagcaaaacgtaaaattgttaacaaaagttctgctgcacttacaactacatcacggtttctttcgctcctcctcctcctgctctatgtcgatttaataaccccccggaacagaatctatataatctacaatatatagtactggaactgaacaacacaaaaggcagcgctctcgatcggctcttcataggtatctctatatgtacaagtgcgagttgcggcccaagactcacgtgctcaaaggatgaggatgcgagtgcggatgcggatgcggccaggtgctaaaagccaccgccactgcactcgctaattggcaggcccgctacaaagccgctgcctgtggagatcgggatctatagctatagctacagaagattctgcagagcggcggctccattgaaagccaggccgtgattccaatttctgtagcctgccgccgcggcatactgctgatagttgttgtacaactgctgctgggcggcctgatgctgctgcagttgctcctcgctcagatcgctggtgatgttcgatgagtcctcctgcagttcctgcagcagttgttgctgctgctggtggtgttgctgctgcgccgccgcctgctgttgttgctgctgctggtgctgctgttgcagcttctgtgagtagttagagcccgatcctgaacccgatcctgacccagatcccgaggccgaagccgatcccgccttgccgctggcctttgctgatgttgctggtgtattggaagcggatgtcagttgctgcgccgactgctgcatctgctgctgctgctgatgcagctggtgctgctgctgttgctgctggtgttgctggtgctgctgctgcaagtgctgttgctgctgcgagcgcagcatctgctccgcgcgtccttaagccagcgggtattggtgatgtcacaagctcgtggttccggcgggcgcatggtagccaagactctggtagtaggagtcctggcctaaggcagcgtgtgagttggtcagcggactgagggcgttgtagccggcgtactggctcatgtcgtacatcttgatgtccgccttggactccgtgggcagcaggcggttgatggagaacggatggctggagggcgtgtagccagagggctcctgcttcagcggatgcatcgacgagtggtagtcggtgatcagcgacggatggcaccgattggccatcatcgccgacagctcctcctgctgcaactggtggtgctgatggtggtgatgtgtgggcacatgctgcggctgctggctgaggcacagttcggcattggcatgcaacatggccagggcctccgcgtccttgctgtgcgctgcactcaggacatttacgccggcgatcgatgctccgcccgcctccttgtggtgctgatgatggtccagccggctgtggtggtggtggtgcatgtggtgcgagtcctcgtgatccttcttgcccggactggtggcctccaggctgctgtgcgacggactcttgtgcagctgcctaatggcctccttcttctcgtccttgaaacgcttctgtcgccgcaaatagcacccgttctcgaacatattccccgaatccggatgcagagtccaaaacgatccctttcctggcttgtccggcgtcctgggaatctttacgaagcaatcgttgaagctcagcgaatgtcgaatggagttctgccagcgctgctgattctgcctgtagaacggaaacagatccatgatgaactgatagatctccgagagcgtcaacattctggtggggttattctgaatggccatggtgatcagtgagatgtagctgtatggcggcttggcatgcgtgtagctccttctgtacgtagttggtttgtccacccgcgatctgcctagggaattcggcgatcccgtctccatttcccgggatcccggcggcatggcgccataggtgccgctcaatcccgccgccgacatactcgctgccgacatggccatgcagccacccatgttcccgagcggtgatcccatgctggcgtagctcatcgagctgggggtcatgcagttgccgcccattgagttcatggccgccgcacccatgctgccgttcatgctggcattcatgctggcgctcatactggcactcatgctggcgctcatgctggcgaccgccgccgccgagtccaggacgctggagctgaatgtggccgccgcctgaggggaaaccgatgacatgccacccaccggcaggcccatgctgttcattgtgtaggcggatcgagccaggggactcatgctgccgccgttgctcgtcggattcgggttgttattgctgggcggtgggggcccaccgcctcctcctccgccgccgcctccaccgccgcccgacggaggaccaccgccacccgagctggccatgctcaccggagcactgctcggaggcggctccgcgtagagcttctgcatgatgtcaatggtggtctggtgggggctacccttcagaaagctgttcaatagttgcgccgttatgttgccggctttcggaggcgctgccctctggtggatcgatggaaaaggcaacgcgttctgcaacgcgttagttaaaacgaaaatcaaaaaggaggtctttaaaacgtggctttactctgatatattgtatatcaactgtgatttcagtgcactatcactgcttcaatcggtttgcatatatctggcattttatcgagagcacttcggcacttgtcacttgttggctggaaggttctgattccgtttgcgattctgattctgattctaagctttgtttgtaaacacacaccgtggtttaattatttgtgcgggataatcatataaaatatatatttattttctgttatgattcgattctttttgtattttctttgtatttttgtatggggatttttgttgtctgccgcaccgagcggccacaaaacaccgacgcacgaacgtgaatatctagctggctgttggccactgaagtctgaagctgggagttgtgctgtgctgtgctgctgcttttgctgctgctgcttttgcttttgctgctttggctgatgctgctgttgccgttgccgctttagctgctggtccgctcgagtgtctctttggcttgagctcttgaatgtgactgtttgcagaggggaacgcttgtctactatttggcttgcgcttgctgccaacaaatattgttcgagccgcgctcaagtgcctcggccgacgtcggcgtcgacagcggcggcagcggcagcagcgacgcgcccgggcagcaccagctccgactcgttctcgccaatggcccggcggtatagtgcgtctcaccaccaccctggcggagttaccaatgacaggcggcggttctcttacgtacacagtggtgctgcggcgcaagcgcattggtcggttggcctcttgtatcaacagagcagggccggttgccaggcaactg

SEQ ID NO: 21254 - DNA, 1533 bp, DROSOPHILA
atgcagaagctctacgcggagccgcctccgagcagtgctccggtgagcatggccagctcgggtggcggtggtcctccgtcgggcggcggtggaggcggcggcggaggaggaggcggtgggcccccaccgcccagcaataacaacccgaatccgacgagcaacggcggcagcatgagtcccctggctcgatccgcctacacaatgaacagcatgggcctgccggtgggtggcatgtcatcggtttcccctcaggcggcggccacattcagctccagcgtcctggactcggcggcggcggtcgccagcatgagcgccagcatgagtgccagtatgagcgccagcatgaatgccagcatgaacggcagcatgggtgcggcggccatgaactcaatgggcggcaactgcatgacccccagctcgatgagctacgccagcatgggatcaccgctcgggaacatgggtggctgcatggccatgtcggcagcgagtatgtcggcggcgggattgagcggcacctatggcgccatgccgccgggatcccgggaaatggagacgggatcgccgaattccctaggcagatcgcgggtggacaaaccaactacgtacagaaggagctacacgcatgccaagccgccatacagctacatctcactgatcaccatggccattcagaataaccccaccagaatgttgacgctctcggagatctatcagttcatcatggatctgtttccgttctacaggcagaatcagcagcgctggcagaactccattcgacattcgctgagcttcaacgattgcttcgtaaagattcccaggacgccggacaagccaggaaagggatcgttttggactctgcatccggattcggggaatatgttcgagaacgggtgctatttgcggcgacagaagcgtttcaaggacgagaagaaggaggccattaggcagctgcacaagagtccgtcgcacagcagcctggaggccaccagtccgggcaagaaggatcacgaggactcgcaccacatgcaccaccaccaccacagccggctggaccatcatcagcaccacaaggaggcgggcggagcatcgatcgccggcgtaaatgtcctgagtgcagcgcacagcaaggacgcggaggccctggccatgttgcatgccaatgccgaactgtgcctcagccagcagccgcagcatgtgcccacacatcaccaccatcagcaccaccagttgcagcaggaggagctgtcggcgatgatggccaatcggtgccatccgtcgctgatcaccgactaccactcgtcgatgcatccgctgaagcaggagccctctggctacacgccctccagccatccgttctccatcaaccgcctgctgcccacggagtccaaggcggacatcaagatgtacgacatgagccagtacgccggctacaacgccctcagtccgctgaccaactcacacgctgccttaggccaggactcctactaccagagtcttggctaccatgcgcccgccggaaccacgagcttgtga

SEQ ID NO: 21255 - protein, 510 aa, DROSOPHILA
MQKLYAEPPPSSAPVSMASSGGGGPPSGGGGGGGGGGGGGPPPPSNNNPNPTSNGGSMSPLARSAYTMNSMGLPVGGMSSVSPQAAATFSSSVLDSAAAVASMSASMSASMSASMNASMNGSMGAAAMNSMGGNCMTPSSMSYASMGSPLGNMGGCMAMSAASMSAAGLSGTYGAMPPGSREMETGSPNSLGRSRVDKPTTYRRSYTHAKPPYSYISLITMAIQNNPTRMLTLSEIYQFIMDLFPFYRQNQQRWQNSIRHSLSFNDCFVKIPRTPDKPGKGSFWTLHPDSGNMFENGCYLRRQKRFKDEKKEAIRQLHKSPSHSSLEATSPGKKDHEDSHHMHHHHHSRLDHHQHHKEAGGASIAGVNVLSAAHSKDAEALAMLHANAELCLSQQPQHVPTHHHHQHHQLQQEELSAMMANRCHPSLITDYHSSMHPLKQEPSGYTPSSHPFSINRLLPTESKADIKMYDMSQYAGYNALSPLTNSHAALGQDSYYQSLGYHAPAGTTSL

SEQ ID NO: 21256 - DNA, 3222 bp, DROSOPHILA
ggaatagacaggccattttgattgaaatgcagacacaaatgctggcaggcggccattaagctgctccgatctatacataagtatggtcgtgtaagtaaccacagcagggggtatcttagcaaggctaattacacattataccaaggatatggtaggtatcaatccatctttaaagttcgtagggaaaaatataagtgaagagaaatcttgctttaaatgtttaatattagctactatagagaccggattatgttttaaatcaaaggactattgttcccaccgcgactgtatgtgcatcccatatcctctcacactaatctgtattatgtacacagttgatttgcctgccactcatgccacccagtccccgaccccatgcgtccacatcctcgcccaggactcgcctacataagtaacgccacatatgatttcattcatatgcagaagaactatgctcctcccttatatcaggccgctcattgatttgcaatgcctaaaatgtttcagactgatgatgggtcgaaccctgcccacatcccgtgccccacatggcccagcaaccatcgcccatctacccattgctgttgctgttccgctctgcctaactgacaaacattcccaaatgccgaagtgcgtgtctttcgcttggtgtgtgtggtgtgtttgccatcgtttttggaaatattatatgctcatacctccgttttcgagtaaattgtgtaaatatttgcgctcgtaagtggattggagatggatgagtctatcagcagagaagttggcgctggcagagccgttggcatcgccatcatcatatgcgtacgggttggccctgctgctcctccctgcccagggccattatttccaatccgcacccgcagttccccagttatcctcccttgtggaatttggattcgcattcgcttgcgcatttacctttcgactttcgcccacagtccacttgcagcttgttgcattttataaaatggctacttggaaactctacaatttgacaaagaatttatttccctattacatcgagagaaacgactgcacagccgagaattcattcgcacacttagagggactaacaaaaggccatttacgagtatataaacaattcagccttatttggtggcctttttgtcggtttccttctccggttcactttctgtggtctcgtcctcttcctcatcatcatcatcgtcttcatcgctttcatcatcgtagtctccatcggactcatcttcatcgtcatcacccccgtaggagtagcccccactggcggcgccaccataatagccactgccaccggctccatagtatccaccgtatccctcctcgtcgtcgctgttgcctccttgttgctgtcgcccgaatttgtgcgaccgcgtggacatgctgaggtccttggtcaccgaggtatcgtagttgcacttggggcatggaattggcttgttcttgtcgtacttgaagcccttgcgacgcacgtgatcctcgcagtaacaggtcttgcagcgcaggcaggagtattgacccagcttgttgcacgattgacacttgtagttctccgactccagcacctggaaccgaatggattgcattaccaaaaggcgtcatatgaatctcaaaatgaagttcggaacaagcttaatgagtatttttggttacccacctgacagctggcctggtgctcgaactgatcgtcctcgcacaggaatccgttgcagaaggagcacttgaagatgcgcccaccgtgctcccagacaccgcgttcgcactccaggcaggtcgcattctgcagcggacacgtgcaggcgtggttttggagacacttgcgtccgtggcaaacccaagcctcgcagaagtcgcagatggcgcccaccattccgaggcccgtggtgtagacgcccggatgtttgaccacgcagtcgccggtctttagcatgcacttgattttcccgcactgggcgcaaatgggtaatctctgaatgctctggcagaaatagcagaaggctctcgacttctgcttcttctcgcacttgtcgcactccattggtgcattgcagggcaaatccgcaagaggcacctctctgctgcggatctccttgaggcgaagcttctgcttctcggccttcttacgctgcccagtcttctttttcggcatttttgaaatcaaggaattagaaaacttatttccttacgtgtgcggcagtgtggctgctgcgggtgcgccgaaaaataccacaaaaagctttcgaatattccgctaaatatgtagctacatcttgaaaatagctacaaaaaatgcgttaaattagcatcgtggagttagcggcgacggcggagccgagtaatttaacacatcatttttctggccagcgtgcattttggaatatgctctgcgagtggagatattccttgaaaagtagctagccgatttttttattgcatattttatatactttctgagtcctataaactttagtcgtacatagatagttagatctcttaaatagttcgatttattaagatttttgcatttgtattttttttggaatttacctataaatagcgaaaaattaaataaataaataagattctcattttccatatttcaccgttctgccatagacgctaatttgacccacatagattttcagtggaaacaagtggaagcaacaaccgattagtgtaaccaaatacctttgcttttatttaggtctagtatttttgtaaggtctgtctacggctttcctttccacaggaaaatatattttcagttttagggaaggggtgctacagtgagcgtctttcgttcccagtgtcgttatttctatagtattgctgagatatatatcagagcagtaaagatatttaaatataagttcttcgaaatgggtggtcacgacaactggaacaatggtcaaaatgaggagcaagatgtaagtagcacacaaaaccgcgactgcacagggaaaaaactcagttcggccataatcccaatatatatatattttggtgatcaacgcgcttttacccatgcggcaactaaagttgatgtgctaaagcatttcgttgcggttttgttacttaagactaagactaacagtagttgtatcttaatagtgctagggagtacgatgctgtcggtattggtttctcttttagctttttagtgcaaaaggcgtgatcaagaatacacatgttacacacattttttaa

SEQ ID NO: 21257 - DNA, 1130 bp, DROSOPHILA
agcagccacactgccgcacacgtaaggaaataagttttctaattccttgatttcaaaaatgccgaaaaagaagactgggcagcgtaagaaggccgagaagcagaagcttcgcctcaaggagatccgcagcagagaggtgcctcttgcggatttgccctgcaatgcaccaatggagtgcgacaagtgcgagaagaagcagaagtcgagagccttctgctatttctgccagagcattcagagattacccatttgcgcccagtgcgggaaaatcaagtgcatgctaaagaccggcgactgcgtggtcaaacatccgggcgtctacaccacgggcctcggaatggtgggcgccatctgcgacttctgcgaggcttgggtttgccacggacgcaagtgtctccaaaaccacgcctgcacgtgtccgctgcagaatgcgacctgcctggagtgcgaacgcggtgtctgggagcacggtgggcgcatcttcaagtgctccttctgcaacggattcctgtgcgaggacgatcagttcgagcaccaggccagctgtcaggtgctggagtcggagaactacaagtgtcaatcgtgcaacaagctgggtcaatactcctgcctgcgctgcaagacctgttactgcgaggatcacgtgcgtcgcaagggcttcaagtacgacaagaacaagccaattccatgccccaagtgcaactacgatacctcggtgaccaaggacctcagcatgtccacgcggtcgcacaaattcgggcgacagcaacaaggaggcaacagcgacgacgaggagggatacggtggatactatggagccggtggcagtggctattatggtggcgccgccagtgggggctactcctacgggggtgatgacgatgaagatgagtccgatggagactacgatgatgaaagcgatgaagacgatgatgatgatgaggaagaggacgagaccacagaaagtgaaccggagaaggaaaccgacaaaaaggccaccaaataaggctgaattgtttatatactcgtaaatggccttttgttagtccctctaagtgtgcgaatgaattctcggctgtgcagtcgtttctctcgatgtaatagggaaataaattctttgtcaaattgta

SEQ ID NO: 21258 - protein, 315 aa, DROSOPHILA
MPKKKTGQRKKAEKQKLRLKEIRSREVPLADLPCNAPMECDKCEKKQKSRAFCYFCQSIQRLPICAQCGKIKCMLKTGDCVVKHPGVYTTGLGMVGAICDFCEAWVCHGRKCLQNHACTCPLQNATCLECERGVWEHGGRIFKCSFCNGFLCEDDQFEHQASCQVLESENYKCQSCNKLGQYSCLRCKTCYCEDHVRRKGFKYDKNKPIPCPKCNYDTSVTKDLSMSTRSHKFGRQQQGGNSDDEEGYGGYYGAGGSGYYGGAASGGYSYGGDDDEDESDGDYDDESDEDDDDDEEEDETTESEPEKETDKKATK

SEQ ID NO: 21259 - DNA, 8632 bp, DROSOPHILA
taggtttgttaacaataattcggttttttctgttcattaacatttcgctgttcaactatgcttcgttttattctttttggatttagcccagtgcgttgtttgttgtgtctgtgatttgctgctttgcagtgggagtagagtttcagaaaatatttaattaatgcttcagttgtttatgtgtatttgattggtttgtccggcttaagggttacataaaattagtgacaagtgttaaggtacaggaacggaccgctttgagtttttaggtgcgagcaatataatacacatatatcgtatctctgggatctttcttgtgcctttaaaagcacaaagtgggagtggataatcggtttttggtactttggaaactggttttaaagaattgacataaacagcgtaattaattggtaaagtagctcgtataaataaattacgtttctatagccgattgccaataaatgcgcattggagtagtatggccttcagagcacgatcccttgtctttgggaagcctgttccagcataaattatattttatagttaaattataagccgatgctctgacttacgcaatgtgatttaataaatactttaaaattaattctgagaacagtgctgagtctgagctctcttaagtatacattcgtgtcgtgatctatttaaatttcgttagtttttgctacattgaagaagaatctgctacagttcgcatgccaaaaatgtaatgaagtattctatatatgggattttagcttaatacctggcgcatgccttaaactacgtcgtatgggtagtatgcctaaatatatttagttaaatcagaacatattcaaaagtttactaaaattgaaactatcacaaaaaacaaatactttctgaaaagtactaaggtatataaactcaaataagttacgatttaagggttgagtatgcaagtgggtgttttgatgccttaaggagtgagtttttggggagcacattaatatttaatccggtgcgtttacatttgactctccttgcgccactggaaggtgcccgacttgacgccaatgctggaggagccctgattgctgctggaagagagtatgttgttggtgcgccggatcaactgggaggcggcatcaaagcgactgcggatgagccgcattgctggattgctggatactccgctgcgcttgcttttgctgttggagaaacataaaaatccatgagttctttgattttaaattattcagttttagcttttcttaccccgacgagctgggctggttttccttgaggttgcccagaataatacgcatgtgcgtatctcgcgcgaaatgattatccggcagcttggcacctccgccactgctggttccggccctctcatcgtccacgaaggcattcagacccggaagttgcccgggtgaactcaattcgctgctgggcgagtgagggggcgtggcgtacagcggcgacatgcactccatgtcgtacatgtccgcctcgttggtcatgttggatgctatatggagaccaataatgtaagctggaagctgggctatagaaacactgttgaacttaccaagctgatgctcgctgagatcgggcagaacttgagagtgccgctgagcccctccgcctccaccactggacttgtgtcctgctgctcctgagctggaagcgtgcttcgagttgaccatcagattattgcgtgagcttagtttgctttgtcgctgcaattgctgtgtaaaggtaagcggcgcttgctgttgaggattccaagggattagcaatgggataacatgacattactcttaaaggatactcacatcattgctgctgcccgtggactgactagagatgacgctcttgcgcttatgcaaactgctcgtgtccgactgcatggtgttctgataaaagttgttagagctgtgcgtggaactggaggcattgaggacgtgcaggtggctgccattgtgcacggtggccgttgtggctgctgagcagaccgacgaggcggaggcatgtgccggatacggagccaggttctggtgaagcggcagagccggtggctgatccggagatctcagcatgctggcatgggcgtggaacttgggttcgttgggattgctagcttcatctacgttcggaaatgggaaaaggattaaagggaaagcattagtaacagagcaagaggcttttcctgcgtgatgaactcttacttttggtgtagctttcgaagatcttcaggatactggtgcgacttgacttggctgccagcttaatgggcgttcgtccgcagtggtctgacttgtagggattagctccgaactggagaagggcaattacacacttttcatgtccctcctgggccgatatacccaaggcagtggctccctgcttgcaggcatgatctgccagagctccgtagtacagtaggatgttcatcacgtcgtggttgccttgccaggcgcacgagtgcagtggcgtccgagcctccaggtccatggagttcacatccgctccagcctcgatcagggtcttgaccatgtcagcatgtccttgccaggcggccacatgcagagccgtccgcccttcgctgtccggaatgttgacatccacgttggtcatgtccagcaggtatttcacaatctccagtttgttttccagcgctagaatgtagagggtggtgcgcgagtccgcgtccttggagttcacatcgcagcagaacttcagcaaaaactccacagtgtccatgtgaccctccaggcaagccagtcggaaggcagtctttccatcgtgggccttttggtcgacgaaacttgagtggatgtccagtagagcctgcacgcaatggaggcgtccctcctgagcggccaagtgcaaggcggtctttccctcgttgtcgcactcgtcaattttggctcccgactcaagcagttgtaggcacacctcgtggaaaccctcaaaggcggcataatgcagtggtgtccatccggcattatcccgatgcgtttcatctagcccccgatcgagcagttgccttaccgtctccacatttccctgggcggcaccaatgcttagcaccgttcgtccctcagagtccatacaatcaattccgcagccccagaagagcagcaacttcactacggtggcgtgtcctgcagtacaggctgcccacagtggcgtgcgacccatgaaatcggcgagatccggatctgcagcgttctccagaagcaactcgcacacttcggcgttgccctcgaaggagctgaccagaagtggcgacatgccatcgttgtccaactgatccgtattggcaccatgatccagcagcgtagatataaccttactatatcctgaggaaccacacagggcggctacgcacagagcactgcgtccatcaaggtccaagtgattgacattagcaccgttctccagcagaatttccacgatgtcatagtgacccatgtaggaggcagcaatcaaagaagtgcgtccctgccggtccactgaattcacatcagcacccgactcaatcagcagcttgaggatatcctcgtgtccactccacgcagcggctcttaaggcggtgcgtccctccttgtccgcgagatcaatcttacaggctggttgagctatgagtaaacgcacaacctcactgtgaccaccccaggaggcggatctcagtggagtccaaccatcgcgatcggcatggttgacatccaccctcttcatccgtccagttccatcgttgcaaggctgggagaagcttaggagcagtttcaccacctctaggtgaccgttcctcgcggctatattcagggctgtctgaccattgtaatcctcaatctccagatcgattggactcttgcaggcgttgagggccctctccagcaactgatgattgccatcgttggccaggatgtggatcagagccttgcccttgtgcagctctatgtgatgcgaatcggagagctggtgcaacgtgctcgaggcgttctcatcctgactctcggctggtggctcactgtgctctgagggactaccagcccgctgggtctccatcaggcaactcttctcgctggacaacaggagatcggccagctcgaagtcaatgttttgcgacttttcagagagttccggcgacatgagcgacgactcgcatgagttttgggattcggcattgttgatgcccgtctcaataagcaacttcagcatcttggcgtctgtgggcaggctgggcttaaagaaatcgcaaaggaactgggcgaagggttcgctcagctcgctggccaagaagcgctccaacatggcccgcgtcttgggcaggaaattgacgtcgtacttgaaatcgtgctcgcactgggcacagcagttcatttggttggtgtagaagcagtcgcttaaattgagcctcgattccagcaacatcagaataagatccaggtccacgtgccgactggtgagatactcccctgatcttatgaggtggtaggcaaatcttcgaactgtgttcgcacatagggtatccgcaactagtaggtagtacatggagatcatcacatgaccctcgttcacatcgcagatgaatttcttggtggcgaacttgacgtccaccaaccaatcggcaaaggagttgtggaagatcttcaggcgctgggcattggaatcgtaggccagaatgttgcgcatcaactgcaaccgcttctcgaactcctggcaatcgatagtgtagttgtgtgtgcggagacagttgaacaggaagagcttgtccacgtagccggaagaagctagcaggacatttagcagtggtcggatcttcatatactgcttcttgttgaatgacttctggcagatgtacaagtacagaccgttcagagtgcaggggatcagcttgatttcccggaaactaaagaagttatccttgatgccgtgaaggaccttctcgaggtacagaatgcagccattcgacttgatgtacagctgatgaagcgactcgattatctccttggtcagcatgatgctatccttaaagtcagaattcagccggttaatgatgtactcctggacgtccttgacgacgtgggacttgcgcaaatcatccagcgtgattttcttaaagccggtgaacatcttggtgatctgcttggtctgcttcttggtggtgcacacaaggaatagccatttgggaaacagatggatgtgattcgacagcagctcggcaacattgcgactcttgtggttggtgacagtgccccttcctccctttaaagtagagatgaggttcccctcgttaatgtagttctcatcgattgaatcaatcagcaggagtaatgccgtctttggaggcgtgagttccagcaggggaaacaagaaggcctttttaaagcactcatccggattcttttcgatgttgtccacactcaagcactcaaggatctccggattggatagcagcagttcatagtagccatccgctataatggtacgacagcttttcgttttaggcagcggcgggggaagggtgttggtgctaatccttggcttctctcctggaactggtggtttcagctgcggttcctcctgtttgccattaacgttgctttctgtgaaatcaatgaggggttccgcactggaatccgctgtagcttcttccttggtctcctcttccttgggctcctggctggatttatccaactcctctttaagttggtcattcagttctttatctgcttcgggcttatcttccttcttgtcttcgttgttggcttgtggttcctccactttgtcatccttgatggcagcttcgatttcgtgcttttcttggtcagtgtttagatcggctatatcctcgccaccgccttgctgaatagactggccaccattgctgatagtggctagcttagagggcgatagcacaccgctgccagaacgaccccgcttgacgggaatctttgacttgctcttcgcaggactcgacttgggcgtctccttgggttcctgagattgcttctgctccttttcgctgcccatgtccttatcctgttcggtatcaccgcgttcccgggaggcccttttcggtggatgtgtgccgtagttactgccagtcttctcgtccgaattcactgcatccatggcctgcaacggagccggctccgactgctggcgcgtgagggtcgtcctggctgccttgttgactgtggaggtccgctgcgactggaagttgtccaactccttggtgtcgcactcgctggctcccctcttgagctcctcgatcagcagttcctcggcattctcactcagactgatgttgttcatggcctcgtccagcttgaactcttgctgctgggcttcatcgcgcagaaaggagaatccctcgtcgatgatccgctggctctcgtcccgactgatcagcgaggcatggctaagcagctgcagcacgatttttcgcataaaaagcgaaaggctgtggcactctggattctgagactcgatgaggtagcaggccagcagcttccggttcagtatgcccttggttccagagttgcccttcatgattgcctggcaaatggaggtcttgccggagccattcgaacctagcactaggcagccattgtagcttgagctcgatatagccgcagccttggcccgggcagatacgtaactggaggaagctgctcctcccagagccacgggacctgacttctttcccgccgttcgttgctccaggcaaagggcaatcttttttagcacccactcgcggtggatgtaaacggtgctcacgatgcgattgtttggctccacgcctgcactgtgaaccagtccattgacctccttgtccggggacaccttgcgttgcataagagcctccaggttgccatcggtatcctcagttggctgggtcttcaatccaccagctgcctcttggccatcttcctctggcgctgatccgccattggtttcaccatttgcatggtgggccacgtcctggggaaagttttgctgcaccagattggcgaagtgctcctcacgtgccaaattcgaaaaactggcgttgggacagtcgcgtccggtgatctccaacttcttctgcaactgcgtggtgtccttgagaaagttgaggatgcgccgatcctctagatgctggttggcagtgccagctgatggctgactgctgtacttggacccaccgactagtgcactggtggagccgcacccatctacaccgtcaccctgagcatcgtcctcgtccgcatctagatcggtgacctgaacgggattaccgttgcgagcactggccaaacgatttgagtcccggaagttgaacagcttcgtctccgcattcccagtggccacgtggcgagtcctatcgccgctcttgtagcgatcggactttcgcagcggtgtggcatacagcatctccttgggcatgttgttgactggcggcggatgattcttgttgattacagacgtggagtcgcagttcccaatggagttggcattggggttgtggttgctgctgactgtctgcgtcgatgatttctgctgctgcatcttgcgcaccgaatcgttgtacatcgcctgacagggcagattttcgtagatgtcattgcgcagattatcgttgtccgtgtgcttagacattgtggcttggctgctggctgtagggggccctgcaggatgtgcgtaatccgtttgccgactgtctgctcacagaagcgggttcgttagcttctgctgactatatgtgtctgtctgcctttcacttaagccgctcctcggttgactgcaaaaggagagggagacatggaaatgggtttagttttatcactttaatatgcaggcaactcttaaaactaatcgttgcaagcgaatgccaaatggtttaattgcattttatggggagatcagttgctgttgggtaacccgttgggtagttcggtgcattgcattttgatttgatttccaattggtaatttatttgattgagtttcatggacttttatactcttgggtaacgaaagcattgatttacctagccattttaatgaatccagtagatccagctaaactaatgtaaaaggttttgaaatttaaatttgaaaacagaggagagtactcaaatacagtgggatttgattatctttaaagcataattttaacgaatcattaaagttattaggacttcttcatccttgtaatctccttcctcgttagtttcattatatccttaagataactgaaattaccttttcccattcttacacattttagcttttatgtgtcattacttgaacttaactagcactttcttctgccatgttttccactggcttcacttttttaacatcctgcaaacaattgacctgattcttatacatttttaaccctttggcagcactggtcccatcccgcaaccagccattcacctcatccacatccacgcccacatccacatccacatcatccacgcccactggctgtgcacacaaaaatacatatacttgtcatcatttttcctgcgcttgtctttacgcgcagtgtcttttgttcttagggcttttgcttctgcttctgcttttttgttgctgttgccatatctaagcttatatgccatttatgtgcgtcgttgaggaggtgctcc

SEQ ID NO: 21260 - DNA, 6360 bp, DROSOPHILA
atgtctaagcacacggacaacgataatctgcgcaatgacatctacgaaaatctgccctgtcaggcgatgtacaacgattcggtgcgcaagatgcagcagcagaaatcatcgacgcagacagtcagcagcaaccacaaccccaatgccaactccattgggaactgcgactccacgtctgtaatcaacaagaatcatccgccgccagtcaacaacatgcccaaggagatgctgtatgccacaccgctgcgaaagtccgatcgctacaagagcggcgataggactcgccacgtggccactgggaatgcggagacgaagctgttcaacttccgggactcaaatcgtttggccagtgctcgcaacggtaatcccgttcaggtcaccgatctagatgcggacgaggacgatgctcagggtgacggtgtagatgggtgcggctccaccagtgcactagtcggtgggtccaagtacagcagtcagccatcagctggcactgccaaccagcatctagaggatcggcgcatcctcaactttctcaaggacaccacgcagttgcagaagaagttggagatcaccggacgcgactgtcccaacgccagtttttcgaatttggcacgtgaggagcacttcgccaatctggtgcagcaaaactttccccaggacgtggcccaccatgcaaatggtgaaaccaatggcggatcagcgccagaggaagatggccaagaggcagctggtggattgaagacccagccaactgaggataccgatggcaacctggaggctcttatgcaacgcaaggtgtccccggacaaggaggtcaatggactggttcacagtgcaggcgtggagccaaacaatcgcatcgtgagcaccgtttacatccaccgcgagtgggtgctaaaaaagattgccctttgcctggagcaacgaacggcgggaaagaagtcaggtcccgtggctctgggaggagcagcttcctccagttacgtatctgcccgggccaaggctgcggctatatcgagctcaagctacaatggctgcctagtgctaggttcgaatggctccggcaagacctccatttgccaggcaatcatgaagggcaactctggaaccaagggcatactgaaccggaagctgctggcctgctacctcatcgagtctcagaatccagagtgccacagcctttcgctttttatgcgaaaaatcgtgctgcagctgcttagccatgcctcgctgatcagtcgggacgagagccagcggatcatcgacgagggattctcctttctgcgcgatgaagcccagcagcaagagttcaagctggacgaggccatgaacaacatcagtctgagtgagaatgccgaggaactgctgatcgaggagctcaagaggggagccagcgagtgcgacaccaaggagttggacaacttccagtcgcagcggacctccacagtcaacaaggcagccaggacgaccctcacgcgccagcagtcggagccggctccgttgcaggccatggatgcagtgaattcggacgagaagactggcagtaactacggcacacatccaccgaaaagggcctcccgggaacgcggtgataccgaacaggataaggacatgggcagcgaaaaggagcagaagcaatctcaggaacccaaggagacgcccaagtcgagtcctgcgaagagcaagtcaaagattcccgtcaagcggggtcgttctggcagcggtgtgctatcgccctctaagctagccactatcagcaatggtggccagtctattcagcaaggcggtggcgaggatatagccgatctaaacactgaccaagaaaagcacgaaatcgaagctgccatcaaggatgacaaagtggaggaaccacaagccaacaacgaagacaagaaggaagataagcccgaagcagataaagaactgaatgaccaacttaaagaggagttggataaatccagccaggagcccaaggaagaggagaccaaggaagaagctacagcggattccagtgcggaacccctcattgatttcacagaaagcaacgttaatggcaaacaggaggaaccgcagctgaaaccaccagttccaggagagaagccaaggattagcaccaacacccttcccccgccgctgcctaaaacgaaaagctgtcgtaccattatagcggatggctactatgaactgctgctatccaatccggagatccttgagtgcttgagtgtggacaacatcgaaaagaatccggatgagtgctttaaaaaggccttcttgtttcccctgctggaactcacgcctccaaagacggcattactcctgctgattgattcaatcgatgagaactacattaacgaggggaacctcatctctactttaaagggaggaaggggcactgtcaccaaccacaagagtcgcaatgttgccgagctgctgtcgaatcacatccatctgtttcccaaatggctattccttgtgtgcaccaccaagaagcagaccaagcagatcaccaagatgttcaccggctttaagaaaatcacgctggatgatttgcgcaagtcccacgtcgtcaaggacgtccaggagtacatcattaaccggctgaattctgactttaaggatagcatcatgctgaccaaggagataatcgagtcgcttcatcagctgtacatcaagtcgaatggctgcattctgtacctcgagaaggtccttcacggcatcaaggataacttctttagtttccgggaaatcaagctgatcccctgcactctgaacggtctgtacttgtacatctgccagaagtcattcaacaagaagcagtatatgaagatccgaccactgctaaatgtcctgctagcttcttccggctacgtggacaagctcttcctgttcaactgtctccgcacacacaactacactatcgattgccaggagttcgagaagcggttgcagttgatgcgcaacattctggcctacgattccaatgcccagcgcctgaagatcttccacaactcctttgccgattggttggtggacgtcaagttcgccaccaagaaattcatctgcgatgtgaacgagggtcatgtgatgatctccatgtactacctactagttgcggataccctatgtgcgaacacagttcgaagatttgcctaccacctcataagatcaggggagtatctcaccagtcggcacgtggacctggatcttattctgatgttgctggaatcgaggctcaatttaagcgactgcttctacaccaaccaaatgaactgctgtgcccagtgcgagcacgatttcaagtacgacgtcaatttcctgcccaagacgcgggccatgttggagcgcttcttggccagcgagctgagcgaacccttcgcccagttcctttgcgatttctttaagcccagcctgcccacagacgccaagatgctgaagttgcttattgagacgggcatcaacaatgccgaatcccaaaactcatgcgagtcgtcgctcatgtcgccggaactctctgaaaagtcgcaaaacattgacttcgagctggccgatctcctgttgtccagcgagaagagttgcctgatggagacccagcgggctggtagtccctcagagcacagtgagccaccagccgagagtcaggatgagaacgcctcgagcacgttgcaccagctctccgattcgcatcacatagagctgcacaagggcaaggctctgatccacatcctggccaacgatggcaatcatcagttgctggagagggccctcaacgcctgcaagagtccaatcgatctggagattgaggattacaatggtcagacagccctgaatatagccgcgaggaacggtcacctagaggtggtgaaactgctcctaagcttctcccagccttgcaacgatggaactggacggatgaagagggtggatgtcaaccatgccgatcgcgatggttggactccactgagatccgcctcctggggtggtcacagtgaggttgtgcgtttactcatagctcaaccagcctgtaagattgatctcgcggacaaggagggacgcaccgccttaagagccgctgcgtggagtggacacgaggatatcctcaagctgctgattgagtcgggtgctgatgtgaattcagtggaccggcagggacgcacttctttgattgctgcctcctacatgggtcactatgacatcgtggaaattctgctggagaacggtgctaatgtcaatcacttggaccttgatggacgcagtgctctgtgcgtagccgccctgtgtggttcctcaggatatagtaaggttatatctacgctgctggatcatggtgccaatacggatcagttggacaacgatggcatgtcgccacttctggtcagctccttcgagggcaacgccgaagtgtgcgagttgcttctggagaacgctgcagatccggatctcgccgatttcatgggtcgcacgccactgtgggcagcctgtactgcaggacacgccaccgtagtgaagttgctgctcttctggggctgcggaattgattgtatggactctgagggacgaacggtgctaagcattggtgccgcccagggaaatgtggagacggtaaggcaactgctcgatcgggggctagatgaaacgcatcgggataatgccggatggacaccactgcattatgccgcctttgagggtttccacgaggtgtgcctacaactgcttgagtcgggagccaaaattgacgagtgcgacaacgagggaaagaccgccttgcacttggccgctcaggagggacgcctccattgcgtgcaggctctactggacatccactcaagtttcgtcgaccaaaaggcccacgatggaaagactgccttccgactggcttgcctggagggtcacatggacactgtggagtttttgctgaagttctgctgcgatgtgaactccaaggacgcggactcgcgcaccaccctctacattctagcgctggaaaacaaactggagattgtgaaatacctgctggacatgaccaacgtggatgtcaacattccggacagcgaagggcggacggctctgcatgtggccgcctggcaaggacatgctgacatggtcaagaccctgatcgaggctggagcggatgtgaactccatggacctggaggctcggacgccactgcactcgtgcgcctggcaaggcaaccacgacgtgatgaacatcctactgtactacggagctctggcagatcatgcctgcaagcagggagccactgccttgggtatatcggcccaggagggacatgaaaagtgtgtaattgcccttctccagttcggagctaatccctacaagtcagaccactgcggacgaacgcccattaagctggcagccaagtcaagtcgcaccagtatcctgaagatcttcgaaagctacaccaaaaatgaagctagcaatcccaacgaacccaagttccacgcccatgccagcatgctgagatctccggatcagccaccggctctgccgcttcaccagaacctggctccgtatccggcacatgcctccgcctcgtcggtctgctcagcagccacaacggccaccgtgcacaatggcagccacctgcacgtcctcaatgcctccagttccacgcacagctctaacaacttttatcagaacaccatgcagtcggacacgagcagtttgcataagcgcaagagcgtcatctctagtcagtccacgggcagcagcaatgatcaagcgccgcttacctttacacagcaattgcagcgacaaagcaaactaagctcacgcaataatctgatggtcaactcgaagcacgcttccagctcaggagcagcaggacacaagtccagtggtggaggcggaggggctcagcggcactctcaagttctgcccgatctcagcgagcatcagcttgcatccaacatgaccaacgaggcggacatgtacgacatggagtgcatgtcgccgctgtacgccacgccccctcactcgcccagcagcgaattgagttcacccgggcaacttccgggtctgaatgccttcgtggacgatgagagggccggaaccagcagtggcggaggtgccaagctgccggataatcatttcgcgcgagatacgcacatgcgtattattctgggcaacctcaaggaaaaccagcccagctcgtcgggcaaaagcaagcgcagcggagtatccagcaatccagcaatgcggctcatccgcagtcgctttgatgccgcctcccagttgatccggcgcaccaacaacatactctcttccagcagcaatcagggctcctccagcattggcgtcaagtcgggcaccttccagtggcgcaaggagagtcaaatgtaa

SEQ ID NO: 21261 - protein, 2119 aa, DROSOPHILA
MSKHTDNDNLRNDIYENLPCQAMYNDSVRKMQQQKSSTQTVSSNHNPNANSIGNCDSTSVINKNHPPPVNNMPKEMLYATPLRKSDRYKSGDRTRHVATGNAETKLFNFRDSNRLASARNGNPVQVTDLDADEDDAQGDGVDGCGSTSALVGGSKYSSQPSAGTANQHLEDRRILNFLKDTTQLQKKLEITGRDCPNASFSNLAREEHFANLVQQNFPQDVAHHANGETNGGSAPEEDGQEAAGGLKTQPTEDTDGNLEALMQRKVSPDKEVNGLVHSAGVEPNNRIVSTVYIHREWVLKKIALCLEQRTAGKKSGPVALGGAASSSYVSARAKAAAISSSSYNGCLVLGSNGSGKTSICQAIMKGNSGTKGILNRKLLACYLIESQNPECHSLSLFMRKIVLQLLSHASLISRDESQRIIDEGFSFLRDEAQQQEFKLDEAMNNISLSENAEELLIEELKRGASECDTKELDNFQSQRTSTVNKAARTTLTRQQSEPAPLQAMDAVNSDEKTGSNYGTHPPKRASRERGDTEQDKDMGSEKEQKQSQEPKETPKSSPAKSKSKIPVKRGRSGSGVLSPSKLATISNGGQSIQQGGGEDIADLNTDQEKHEIEAAIKDDKVEEPQANNEDKKEDKPEADKELNDQLKEELDKSSQEPKEEETKEEATADSSAEPLIDFTESNVNGKQEEPQLKPPVPGEKPRISTNTLPPPLPKTKSCRTIIADGYYELLLSNPEILECLSVDNIEKNPDECFKKAFLFPLLELTPPKTALLLLIDSIDENYINEGNLISTLKGGRGTVTNHKSRNVAELLSNHIHLFPKWLFLVCTTKKQTKQITKMFTGFKKITLDDLRKSHVVKDVQEYIINRLNSDFKDSIMLTKEIIESLHQLYIKSNGCILYLEKVLHGIKDNFFSFREIKLIPCTLNGLYLYICQKSFNKKQYMKIRPLLNVLLASSGYVDKLFLFNCLRTHNYTIDCQEFEKRLQLMRNILAYDSNAQRLKIFHNSFADWLVDVKFATKKFICDVNEGHVMISMYYLLVADTLCANTVRRFAYHLIRSGEYLTSRHVDLDLILMLLESRLNLSDCFYTNQMNCCAQCEHDFKYDVNFLPKTRAMLERFLASELSEPFAQFLCDFFKPSLPTDAKMLKLLIETGINNAESQNSCESSLMSPELSEKSQNIDFELADLLLSSEKSCLMETQRAGSPSEHSEPPAESQDENASSTLHQLSDSHHIELHKGKALIHILANDGNHQLLERALNACKSPIDLEIEDYNGQTALNIAARNGHLEVVKLLLSFSQPCNDGTGRMKRVDVNHADRDGWTPLRSASWGGHSEVVRLLIAQPACKIDLADKEGRTALRAAAWSGHEDILKLLIESGADVNSVDRQGRTSLIAASYMGHYDIVEILLENGANVNHLDLDGRSALCVAALCGSSGYSKVISTLLDHGANTDQLDNDGMSPLLVSSFEGNAEVCELLLENAADPDLADFMGRTPLWAACTAGHATVVKLLLFWGCGIDCMDSEGRTVLSIGAAQGNVETVRQLLDRGLDETHRDNAGWTPLHYAAFEGFHEVCLQLLESGAKIDECDNEGKTALHLAAQEGRLHCVQALLDIHSSFVDQKAHDGKTAFRLACLEGHMDTVEFLLKFCCDVNSKDADSRTTLYILALENKLEIVKYLLDMTNVDVNIPDSEGRTALHVAAWQGHADMVKTLIEAGADVNSMDLEARTPLHSCAWQGNHDVMNILLYYGALADHACKQGATALGISAQEGHEKCVIALLQFGANPYKSDHCGRTPIKLAAKSSRTSILKIFESYTKNEASNPNEPKFHAHASMLRSPDQPPALPLHQNLAPYPAHASASSVCSAATTATVHNGSHLHVLNASSSTHSSNNFYQNTMQSDTSSLHKRKSVISSQSTGSSNDQAPLTFTQQLQRQSKLSSRNNLMVNSKHASSSGAAGHKSSGGGGGAQRHSQVLPDLSEHQLASNMTNEADMYDMECMSPLYATPPHSPSSELSSPGQLPGLNAFVDDERAGTSSGGGAKLPDNHFARDTHMRIILGNLKENQPSSSGKSKRSGVSSNPAMRLIRSRFDAASQLIRRTNNILSSSSNQGSSSIGVKSGTFQWRKESQM

SEQ ID NO: 21262 - DNA, 1805 bp, DROSOPHILA
ttactttatatattgctctgtgtgtggttttatatatatttatatatatgtttatgtggtatttaagcttatcgccaaacacactgactacatctacaaatagaagagagagaaacaaagaaatagagaataattcgtgatgcagcaagtaagttacaattattcatggaaatactagccaaacatttcacactgtcaaaaataaatatatatactgtttttttcgcgggtgtgctgataatgtgtttgagcttttatcaatcaaatgaagcttttcatttgagtatatctatattttctgattggtaggaaataatttatctactgggaggtataatataaatatttgttgactgcaaactgtcgtattaaaagtaaattacagtttacttgaataaaacatttgcataaactactgtgtattgcaaattcaattctaatatattccagggggctttaactttccccagttatctgtatttatcagttaaactcgttaaatcttgtaagaagcttatctcataggggattttctatgtgcaaatataatataatctttcaaagtaaacttttcctagttctggattttccctttaaaccccttcttgatttcgtataaccatcaccaataaatataaccgatttcaaataattatatttagcttaatccatgcattgtatttctttacatatgtatatttacacgcggaaattcataatcatattggatctaatcagtttgacccatattggctgatatgatgatcagtggtatcgaattttcatataatcaataaggtatttcactgtatttataagaatgttcgaatgggaaaatacccattaaagtgatatttaatgaataaaaacaagtttttggctactctgggaaaaaaaacacatatatatactcttagtaagtaaaccatattgtgaaaagttttctgtgcgctgaagatggaatgtatgtatgtatggataggaacttaggatctgcatggttgctggtggcttacctgtgctggcgcagattgtcccgctgcttaaagtacttgccgcacacctcgcacgaataggtgatctcaggggacttgtgggtgcgctcgtggatcatcaggttgtacggcttggtgaatcgccgctggcagtacttgcaaatgaactcgcacttcggacgcatcttgcggcggaaatcggaccggcagtcatcgttgtcgattcgcattacagcaaacattttgacaggcggtatgtgtactggtgcccggcgtttaaggttgagtgcttgagtggggtgctcgaagtgtgacgatgtggcgctgctcggggctctcccgtctgggtgctcccgctctcggcaaatggggattcgttcgtggctgactcccgcctttccggcctctctagcgcgctctttggctcggcaatggggcttttccactcaatggggtctattttctcgcctctaatcgctatctgttcagataacaccgcgcttaattgctgccttcttggctgattggtcggtgaagagcggcaacgtcgcttcctctaccactttcccctgtcctggcggctttatctttttggcccgtatatcgctgttccgtgatttcgcctctccgcccccttctcgtttgccacgggtgaccagtaggtggtgttgcgtttcggtgggcgttatttatttctcctcaccgccgacgtttaggtttggcttttagtttatggcgcactttaaggcagacacctaaaacagagggagacgcaaggtttaaatgaagttagcaacgcctgcgacaact

SEQ ID NO: 21263 - DNA, 754 bp, DROSOPHILA
ttaggtgtctgccttaaagtgcgccataaactaaaagccaaacctaaacgtcggcggtgaggagaaataaataacgcccaccgaaacgcaacaccacctactggtcacccgtggcaaacgagaagggggcggagaggcgaaatcacggaacagcgatatacgggccaaaaagataaagccgccaggacaggggaaagtggtagaggaagcgacgttgccgctcttcaccgaccaatcagccaagaaggcagcaattaagcgcggtgttatctgaacagatagcgattagaggcgagaaaatagaccccattgagtggaaaagccccattgccgagccaaagagcgcgctagagaggccggaaaggcgggagtcagccacgaacgaatccccatttgccgagagcgggagcacccagacgggagagccccgagcagcgccacatcgtcacacttcgagcaccccactcaagcactcaaccttaaacgccgggcaccagtacacataccgcctgtcaaaatgtttgctgtaatgcgaatcgacaacgatgactgccggtccgatttccgccgcaagatgcgtccgaagtgcgagttcatttgcaagtactgccagcggcgattcaccaagccgtacaacctgatgatccacgagcgcacccacaagtcccctgagatcacctattcgtgcgaggtgtgcggcaagtactttaagcagcgggacaatctgcgccagcacaggtaagccaccagcaac

SEQ ID NO: 21264 - protein, 74 aa, DROSOPHILA
MFAVMRIDNDDCRSDFRRKMRPKCEFICKYCQRRFTKPYNLMIHERTHKSPEITYSCEVCGKYFKQRDNLRQHR

SEQ ID NO: 21265 - DNA, 3469 bp, DROSOPHILA
gaaaaaccgtaagtaataacggagaaagcgatcaaatttatagctactaggctttactagcatgaggtacagaatggtctcgctgtgttgtgctaaaaatggtgcttcaatttgaacttgcagcaatctgtggcgaggagtttggcgtcaagggtacttgccgttccctgcaacccatgtggacctatcgcccagatacgaacgagtgcttcaccttcaattactccggctgccacggaaacaataatctattccacaaaaagttggagtgcgaagaaaaatgcaaaatataagtgcccatttggttgtgaataaagttggaagttcggttttgttatcctaatgtgatcatctttattgttttctttatgaactcgtttaatatttattaatattggtttggcggttactatacttagttttcgattcagtgtcataggctaggctatatgtgttcgattcgtcgttagctatatctatatgctgtagtttataggtatgtatatatattgcattagattttgtatatatgttcatatgcatttgcgtgttaattaatattgttaatcattggagttgtcctcggctgttgctgattatgttgggttcaatcgggggttatcttttcgcaatctaactgccacaaacaaacaacagctaattatcattctaacgtacctaagattttattcgagtgcatctgtttaattgtttttttttcataaatttttttttccttttgtgtttacttggttcaattaaagttaggctagagcttattctactattaaactttaaaatgttttcattgtttattgttacaaacgcgctggtttgggtatttcattttaaagattttctcggactttgtttggagaccaaagaaaatggcgtggaaataagatggcctgaagtttgtacaaatttataaatctgaaaaataaaatacccagccttttcattgcacactctgttcgttttttcctcggccaactattgtttattccattttggtcagcaccacgtttccattcaatgaacccgatcctgcaatcgctcctgatcctggagagccctccgttgctgccacgcccccggatgattgctgcgtgggcgtggttggtggcgacaatgtggcatgttgctgctgctgatatgcaactgccgattcggccagatccaaaagagcggccgatgatgtgccgcctcctgccgaacctgatcccgaaccagatcctgagccggggcccagaccattcatggtcatgtcctgagcctcgtgcttcattctcatcgtgttgttattgttgtgattgaccacatgctgccccaaggccggatggtgggcgaaggacaggggtggcaagtggaggcccggaaaagccaagcctgcagcagctgccgcgtgcagcgattgcaaaagtgccgccgaatgctcctgcgccttccgccgcagttcggccaccgaattggaccgcggatcatgaacggatccctggccggaggactttggcgattccggcgaactggccgccgagctgctgctgaccggaatgctcagtggagccaccaccgatgagcccggtggcggcgggggcttcagggagcagcatgagcacaggctctggaatggagagacgcctaaaaaaaagaagaaatttatatattatttacttcagactaagtagaattttctctttcaagaattaaattagcaagagtgtctcgaatgcaagtattattaatggttactacagattgattattgaaaaaaaattaattttattaatcgcactcaaatgcctttaattggattagctgattttcaattctatttatcttgtcctaaattcacgttgtactacgcaatgttttattaaattaacattttgtcaagccagcagatttgattttgatgtatctccttacactccgtctaatttgattagactgaagtgattcggattgactttgccactgatcgattggccagactcacctttcaggcccgggaaaagcggctgatgggtaaactgggcggccaagtggggtggcaggaaaagcggtgggtggttggcgctccgctgggccgctgctgccgccgccgcagctgccacggcgctctgctcactcagaacgggacgaaagccgcagttgctgcaagtaaataaataagagaaacaagttattaaaaatgatataacatagcttttgaaaacttggaaccatttgaacacccttccgcagtttatttgcggagatcaaaggcgtaaatataatatataaaaactgtaaataaaacaccacacagcacacaaggcaaacaaaaacagcaaacacagttttaattaacgcttaattgaaataaattaaaacatttttatgcgtaattgcattattattaatgaacccaaatattttgtatgagcgtgggcgggggcgggggcataatcaacacccagttgtcatttttgtgatcgttttaattgaatgaaatattacgcttagtcgcatgtcaaggcaaatgggaatgaataaaaaaacgaaacagacacacatacaccccagccaaacaataaaaagcatttaatgcaatttaaaaattttaattgataagtgagacaacgtttgtggaactggtaaattcctatgactcgcataatctccattaataaaattatggaacaaaatatatgtacatacatttttattagaaataattgcgtttaatcaacgagagcgaaatttcagtaagtgaaaaaaaatgcaatttccatttgttcaaatttacattagggctgcggcagccgagggaaaagtgtctaaaatttgataattcctgcaaaaaaaaaagatggggctgctctgtggtcataacaaatctgtggaaatgctaatcgagttggaggacttacgaggattttccagcgcggaaaatgacaggcagacctcgcgaatggcgaccgcaaccaccgagagaaacggaccacaaacgtcgcggccactgtcgcttttaattctcttcgcatttcacttttcatttgtcctcctgccataacagttttcccctccattttcctaagcttctcatgtttctgactttcccttagccacccacagtttgtcgtgatttttgtcgagtttttctcgtttccactggccttgcttttttcggcagttggaaaaacgcaaaacgcttggccgcttgaaacggaattttcaatgagataattgaattttttgctgtgttccacaatgatggttttgtcaattttcaatttttgttttcattttgagttagaacttcaaaaaaggcacaaatatagcgctctttgagattggaacctaagcacaagttaagtttaagtttatgttctgctgattaaaacaaactcaaaagctcaaaatagctataatatttctaaagtaacaaatggagtttttggaagaaatatccgttttattggaa

SEQ ID NO: 21266 - DNA, 810 bp, DROSOPHILA
atgacaactggcaactgcggctttcgtcccgttctgagtgagcagagcgccgtggcagctgcggcggcggcagcagcggcccagcggagcgccaaccacccaccgcttttcctgccaccccacttggccgcccagtttacccatcagccgcttttcccgggcctgaaaggcgtctctccattccagagcctgtgctcatgctgctccctgaagcccccgccgccaccgggctcatcggtggtggctccactgagcattccggtcagcagcagctcggcggccagttcgccggaatcgccaaagtcctccggccagggatccgttcatgatccgcggtccaattcggtggccgaactgcggcggaaggcgcaggagcattcggcggcacttttgcaatcgctgcacgcggcagctgctgcaggcttggcttttccgggcctccacttgccacccctgtccttcgcccaccatccggccttggggcagcatgtggtcaatcacaacaataacaacacgatgagaatgaagcacgaggctcaggacatgaccatgaatggtctgggccccggctcaggatctggttcgggatcaggttcggcaggaggcggcacatcatcggccgctcttttggatctggccgaatcggcagttgcatatcagcagcagcaacatgccacattgtcgccaccaaccacgcccacgcagcaatcatccgggggcgtggcagcaacggagggctctccaggatcaggagcgattgcaggatcgggttcattgaatggaaacgtggtgctgaccaaaatggaataa

SEQ ID NO: 21267 - protein, 269 aa, DROSOPHILA
MTTGNCGFRPVLSEQSAVAAAAAAAAAQRSANHPPLFLPPHLAAQFTHQPLFPGLKGVSPFQSLCSCCSLKPPPPPGSSVVAPLSIPVSSSSAASSPESPKSSGQGSVHDPRSNSVAELRRKAQEHSAALLQSLHAAAAAGLAFPGLHLPPLSFAHHPALGQHVVNHNNNNTMRMKHEAQDMTMNGLGPGSGSGSGSGSAGGGTSSAALLDLAESAVAYQQQQHATLSPPTTPTQQSSGGVAATEGSPGSGAIAGSGSLNGNVVLTKME

SEQ ID NO: 21268 - DNA, 8499 bp, DROSOPHILA
taattatgcaatatataattgttattgaaaaataaagtagttcgccgacacgaaaactcgtcactgaggacctctcagcgttttcctttgggaaaagagtcatttaattggatcgacttcatgtgccggcgttcattgtcttttgtttgtctgtatatatcggtaatcggttttcggtggttaaattgtatgcacgtttataaaatggaccattcaagaagtttgtttgtttccgttttcattgcgtctgttcttcgctcgattgaattatctcataaatatttatgtattggccacaagttgaatactttttgcttgagacaaagataaagcttttcgtctgtccgtaatctctataatatattaatatgctaatgagtaaaatttccatcctagcttatgcatgcgtgtgtgtaaaagttgagtgtggattttttttatgaaaaattcattgagtttccttctttgtttggttgttgtgggacttcattcggttggttggtgtttttaactttacatttctaatagagctacgacaaaagactagaagagatctgacaaattgtgcatgcgattcacgtagccgtgtgtgtgtgggtgggaccataataccaaaatataagttttatagcacccaattgctacggggtatcttcgattttccttattcttttggcttcgatcacactcgaagaaaatgttgccgaatcttatttactaatgacagtataaatgtggaaaagtctgcgatttgcaatttgtaagggggtctacgtgtatgcttcgaaatattctgagcccggaactccctgggagatacgacaacctttgtgtaaagcatactaatagacctcatttggggtgtttaaaaatcactcgagatatagttggaaacccgaaatatatataatcataagctttctagtgttctccaaagacaagtgttttatctgcttgcgctgaaacttttctcccagtgctattgccacataccatattcctacacggacgtggtgatttgctccacgaactgaacggcattgggtcggcatagggattgggatcttttcagccggcattgtggattgtttcgcaatgctgagtttcccggccccggacccgaacccgcaccctggctgtggcgatggggggttctttgcagggaggcataggcgtgcggcacgtagatgaactcccgcgtgggggccgcaaaagtggcaggaccctgacgacagttacactgctgcgacatcgtggataaaccctctggaacactgcggctgcgggtggaactgggtgggccaggtggtccggttggtccgggtggtccggttggtccgtgagttccataggtgaccggattcctatttggactgctgcaggtgcatatcaatggctgacggtccgccgatcccgggttcctgcaaaatggcaagtcaatttccatggtttaagcggagtgtcaacacagttttcggcatgcggcaaaatggtacgagtatctcaggctggcatcgcaaatgccaaagtggcaaattggcaaaatggcaaatttgcggcctgcatgagcaacgaaggacgccaaattgattgtcttcctagggcttctagcctgattgccattgattgtttggttcgacgggaaatctcttaattggttttggattcaattcagatgttggcttccgttttggctactacgattttgaatcgataaattgattgaagtcttctacaattgcacttaagcacttattagataagtccacttgacaataaaatattactttcctggttataacaaaaatatagtgaatctgacgattaaaccacgttaattagcaaataaatttaagaatgtgaaacgtaaagccctgataattgcgataaacgcttgtaaatttgcttctcgctttaacaatgtaaaagcttgtgataaataacattaaataattattgttcgggaattaaaaaagcatttccacacaattcgcatgttgcaaatgtgcatcactgctcttaatttaatacttttcccgtgcaattgtaatccctttgacttttagcaatttactcgatgtatgctgtcaatagctagctacttaggctgtaaaattggcagacaatttcccacagatctttgatttgccattcaattgcatataaaggaagccggttcattgcacacgtcggtatgattacaagtcgctttccatccatcctactcacttgttgctcttgtgacagcccagttcgtaggtgctgtgccagctgcagtacatttggccatcgcagcagttgctgtgctgttggatgaaggacaaactccgctgcagccgcttgcccatcttggcaccaatgctcccctggcccaactggtaggcttcacgcccctgcacggtttgaaaaatatgtaaaatgttaacaatgtctgaatgataaatgcaacgattgtttctcccagtgtgacattacctgatgcggctgcaaatctagattgtgacaggccaactgctgcaggtgggaatgttgctgctgctgctgctgttgttgctgctgctgcaacatgtgcctttggcagaagttcgcctgcagatagggctccatttgattgagactaatgcagctccgactgaggagatcgggtgcggggtactccccgtatccatagtccatcggcaaatgtgggcgatgctggcgggcggaggcgtggcgcatcagcgtgggagtcgccaaatgaccatttcgctgctgataatgatggtgcaactgctgctgctgttgctgatgctgctgctgcggttcgcttatgaaaaatattataattcccgagatggcagccgccgcggagcatatgtaatagcccgcccttccgtatttaagggagtaatcatttagaaacgaggtaagtggcacgcttatcagcacaggaactgactcaaccccccgaatgaaacctgccaaggagaaagagcccaaagtcaaatccacaatttaaatatttaaaaagtctgaactcaccccaggccttggagaaatgtttcagcttgatgcgttcgagtgccaaaatctttagggagtattgaaagccacccagaccaatgccatacaaccagcttagtatacaaaggcccgtgtagcccatgacgaaggatagaaagaggatagccaaggccacaattgataggaacagctgggggaatacattaaagtttggtatgaacagggttaaacttcaatattagcacaatggctcaaattaaattgttttttagtcaatatcagctaacaacacttgacccacctgcgtgacaatcttggtattgatcacaaagtgcctgatcacaaaacaacgtctcagcagagctccagctataaccacacccagggccatggaaattcccagaaatgtttgcaacagaaccaattcttgcacatcagagccctgctcggcggcattgagtgcctgtaaaataaaatacaaattttgtgcacctttaaatttataaattatgcgaattttttttttttttttttgtaacatctcctaaaaacctctcagattagctaatggaaacctggcatgcaataggttagagaaattaggaaaagcacttaccattaggaacatgggtgtataaatgccaaaggaggccacgctggaggtcatgagtaaaattttaacagtcaccgatttcagtgatgatatgtccagaaaaaagtacttcggtgtgctctccacatcctggctgagaatcggctttttctccctcatctgaaaatggaaaatggttgtggccgcggggcggtgggcggtgggcggtggcaaatcaaaactgaaactttgcacaacacacaatttcctacctttttgcgctgatttttgagatgctggatggcccgacgctggggatgatagagggaggcgggtcggtacattaggcccatgaaaaagctgagtgccgtcaaagcagcgacaatctgtaggcctaggcgccagccggccttgcccacgccctccttcaaaatgacggagaacaaagcgatgccaactccctcgccggacatggccaccatttcgacgaattgacggcgccgcttaaagtaattgcccagcatcacggttgatgcctcccgcaccatggcgaccccaactccgaagacgatgcctgcggaagtgtttcgaatggtgttttgagtacagtgagagaaaatagtagccattgtacaaatattgatacatttgcagctgtattaaaagtatgcaactataaacacgaataagatgttgcatacttttaggcacctgattttctctcagtgcaaatgataagcgacttccggtgccgtcaagctggcatctgtcaggttatttatttatatacaaaccatatacccggactatacgcaccataactgaaaacaacctggccaaattccgtggcaaatgaggtgaacaatatgcccaggggcatcaccagcccgcccacgatggacaggaggcggatggagcgtttacggcacagcgacaccacaaacgatgtggccaccatggaaactgaccagctcaaagcgcccagcagttctgtaaggagaaattaagaccgtgagtgataatgttcaacttgacgaaggtcacaaggtgaggttgtggaaaggtaagttgtgggtgttaatgcctctaaaaatatgcggggttattgctttaaacaaattaaagatgccgattaatggggatattgtgagcgaactgaaatgttcataaatcaatagaacgcattagcaaaatggcattctgatgtttacacatgttttacacttagtaaatcataattcaattcgatgctgtacactttaattgaatcgattgaattgacaaggcgattgcattacataactttattagaatattaatttggtcattcaagcaaagaatttggtttgttaaagatttttattattatttctccaatttatataaaattatttttttttttcaaaataaaattttatcttcgcttctataaataaagatatgaattacgcagccaattaacttgaaaatagcattgttttatagccaaaagcaatgcacacacagctgccatagtattaacactttatttttacgatttatggttggcttttagagtgctgaacacatttggcaatagacaatattcacactgctcttaaatgatgtccgcagtgtcaagagtaaatgaaatttatgcaaaagcccacacctacaaacatgtattattcacaaacatttgcatttctggtccaaacagtgtgacaaacattttgattactcgaaggggggggggttttgaaaatagaaagcaccacaaatgtgcaggaaaacaagaaaatgactgcgacgaccatgattacacacattcccattaaagaaggattcgtattcgagcgaatatccccttttttccatgacttacctatgccactggtattatgcaaatactggacggcatagaaccacaaaaggccgtagctgagctgcagtccggtggtcaggatgtggaccagaaaggacactccacagatgatccagccccagccgccatcgggataaaagtactgcaagtgcacagaagaaaattaacgtgagcatattaactgaatttaaaaagtaaaataatatttaaatcactgctgaatccttataaagttgctttaaagtaagcaacaaatacttaacccagagacccgtgagtcctttaatttttctagtatactcttagacacctttaaggttcgcaataagtaggggcataatatctagtttctttcagtatacaaagaatatcagaacaaaggttggcaattactgtttgacatgtcctttttgctggacacactttctgtggcactgctcacctgtctgatgcgtgtggtatccactccggttcgtcgcagtgccggaatgttccggtgcagcaggtggaactctcgatcggccagtccggggaatgccgaatcctcctcgtcggttatgtggctgggatgtggggtcgtggcatgcaagctgggatgatgattcgcctcgtagcctgggcgatgaaaaacaattgagagatgattaaatgatggtctggtttgcagcgatacacctaaatgagaacactcatattcttaagggtgttattccgataatattaaaaacaaaaagttaactttattttggcaccaatttcaaatattaaaagttctgcaggacctttaaaagtttctcccttggcagtgcgaaaataaatttcccagcaaaagtaggtggtgggttttctttttcaattagaacctaatttatggccttttcttttgaattctgcatgagtgtacttaccaaaatagcagccgccgttggccatcaggttcttggccctttgttggtggtggtgctgctgctgctgcgtcggcggtggctgatggtaccaattatcgcagaggcagtattgcggcccgtactgatgggggtggtgctgatgctgggccaccgggtggtgctgctgcgcatgatggtggtcatgctgatggtggctctgatgggcgggtggcatgggattgtacatataacagcagccatttatattggggttcgcgtagcggggcggtggtggggcgggcattacactcggcatgccagaaccgacagcaccacccagcccgccaacgcccacaaccccaccaccgccacccccaccgtgtcgactgcagtggggcatcatgggcatggtcatctggtgctcaatggtgggcaatgtggcatagctgccgaaattgtcacaatgccgtttgctcgggaatctgggcagggtgggtggtgtgctggtggtttggggaagagtggtttgagtgccaacgcctccatggcagtgacgtgtgggcgtggtcgtggactgcattttcgtttgctcagcgggtaaataggagagccgtggacatgagacccaccaggctagcggttgattattgaaacgacactcgtagcacagatatcgctggttcgtcgaatccttgtctggtttcgtttgggcggtttggtcggtgttcccgcttcctggatgcccggcagtttgcttgggatgctcacagctgagattgtatcttcgtcacagggcacatttgttgcacagcacgggactgcgttgtttgggcctcaccagactcgagtactgtcgcggattctctgatggattctctgagggattctcttgtggattcttggggattcttagccaggaatgacggttgttggtgctactgctgctgggcaacaactggggacagctgccatagagcgccgatgaggtattcgataggcggcggtagtacggtatcctctgctccatatcatcgccaccgaacgaggatcccaacttgtacggctgactgcgacccggcagcaggcaggatataacgctccggttatctctactatcactgcagttgcaatcacatgtgcactggatgaccattgtactcctccggctccccccgaaaaaatgcttttaaccctgtgctcttaaactcgctgcaccgaagtgttgtcaacttcaataatgcccactccagcagcacattattttcgagtttggggtctcggtttcggttttcggggcttccgtatcggtttcgagcactccaggatttctaggcagctgccgccgccagtgtccgaccaaatccatttggggccatctctacgtttgcaagccaagcgcaaaattctgttgccccactgagaaaaaaagacatagttcacactatcaaataagtaataagaaaagagaaagatttaaagaaaatgttctagatatcatagctcatttattaactattattattaataaccgagaaagttatttcagtatttgatttcaaaactttccactttgattcagttttctaaaatcccaaaacagtcacagagccatatagagatagaattagacgatgtgggaacggaaaaaagcagaacgagagtcgataaataaatcaaatcaaaatcaatttgtttactctacaccagcacacaaaacaaggagcatatgcaatgcataattcaatttgttgttcgaatgcgtgtatttcaattgcctgccagcaatgttagtcgagtgggcgttggaccgtgttgggatgggggcgtgacactcacagaacttgggtaagtgaaactttgcggtcattgtggcagaagaattagggcaaattgcgaccggcacttcgaaataacacatttatgccccatcatatttaatttgcgcttttcaaattatttaatatcctcaatggaaatgaactgaatattgctcaaagaatgtgtcccttttagcgaggaattcgtgcagctcaatgtgttcacattgacctggaaaaatgttctaaatttgtatggatatttacccgccgggaaatgtgaatagagatttggttgttaaatatttaaaatactcgattttgccacattctgca

SEQ ID NO: 21269 - DNA, 3396 bp, DROSOPHILA
atggtcatccagtgcacatgtgattgcaactgcagtgatagtagagataaccggagcgttatatcctgcctgctgccgggtcgcagtcagccgtacaagttgggatcctcgttcggtggcgatgatatggagcagaggataccgtactaccgccgcctatcgaatacctcatcggcgctctatggcagctgtccccagttgttgcccagcagcagtagcaccaacaaccgtcattcctggctaagaatccccaagaatccacaagagaatccctcagagaatccatcagagaatccgcgacagtactcgagtctgcaaactgccgggcatccaggaagcgggaacaccgaccaaaccgcccaaacgaaaccagacaaggattcgacgaaccagcgatatctgtgctacgagtgtcgtttcaataatcaaccgctagcctggtgggtctcatgtccacggctctcctatttacccgctgagcaaacgaaaatgcagtccacgaccacgcccacacgtcactgccatggaggcgttggcactcaaaccactcttccccaaaccaccagcacaccacccaccctgcccagattcccgagcaaacggcattgtgacaatttcggcagctatgccacattgcccaccattgagcaccagatgaccatgcccatgatgccccactgcagtcgacacggtgggggtggcggtggtggggttgtgggcgttggcgggctgggtggtgctgtcggttctggcatgccgagtgtaatgcccgccccaccaccgccccgctacgcgaaccccaatataaatggctgctgttatatgtacaatcccatgccacccgcccatcagagccaccatcagcatgaccaccatcatgcgcagcagcaccacccggtggcccagcatcagcaccacccccatcagtacgggccgcaatactgcctctgcgataattggtaccatcagccaccgccgacgcagcagcagcagcaccaccaccaacaaagggccaagaacctgatggccaacggcggctgctattttggctacgaggcgaatcatcatcccagcttgcatgccacgaccccacatcccagccacataaccgacgaggaggattcggcattccccggactggccgatcgagagttccacctgctgcaccggaacattccggcactgcgacgaaccggagtggataccacacgcatcagacagtacttttatcccgatggcggctggggctggatcatctgtggagtgtcctttctggtccacatcctgaccaccggactgcagctcagctacggccttttgtggttctatgccgtccagtatttgcataataccagtggcatagaactgctgggcgctttgagctggtcagtttccatggtggccacatcgtttgtggtgtcgctgtgccgtaaacgctccatccgcctcctgtccatcgtgggcgggctggtgatgcccctgggcatattgttcacctcatttgccacggaatttggccaggttgttttcagttatggcatcgtcttcggagttggggtcgccatggtgcgggaggcatcaaccgtgatgctgggcaattactttaagcggcgccgtcaattcgtcgaaatggtggccatgtccggcgagggagttggcatcgctttgttctccgtcattttgaaggagggcgtgggcaaggccggctggcgcctaggcctacagattgtcgctgctttgacggcactcagctttttcatgggcctaatgtaccgacccgcctccctctatcatccccagcgtcgggccatccagcatctcaaaaatcagcgcaaaaagatgagggagaaaaagccgattctcagccaggatgtggagagcacaccgaagtacttttttctggacatatcatcactgaaatcggtgactgttaaaattttactcatgacctccagcgtggcctcctttggcatttatacacccatgttcctaatggcactcaatgccgccgagcagggctctgatgtgcaagaattggttctgttgcaaacatttctgggaatttccatggccctgggtgtggttatagctggagctctgctgagacgttgttttgtgatcaggcactttgtgatcaataccaagattgtcacgcagctgttcctatcaattgtggccttggctatcctctttctatccttcgtcatgggctacacgggcctttgtatactaagctggttgtatggcattggtctgggtggctttcaatactccctaaagattttggcactcgaacgcatcaagctgaaacatttctccaaggcctggggtttcattcggggggttgagtcagttcctgtgctgataagcgtgccacttacctcgtttctaaatgattactcccttaaatacggaagggcgggctattacatatgctccgcggcggctgccatctcgggaattataatatttttcataagcgaaccgcagcagcagcatcagcaacagcagcagcagttgcaccatcattatcagcagcgaaatggtcatttggcgactcccacgctgatgcgccacgcctccgcccgccagcatcgcccacatttgccgatggactatggatacggggagtaccccgcacccgatctcctcagtcggagctgcattagtctcaatcaaatggagccctatctgcaggcgaacttctgccaaaggcacatgttgcagcagcagcaacaacagcagcagcagcagcaacattcccacctgcagcagttggcctgtcacaatctagatttgcagccgcatcaggggcgtgaagcctaccagttgggccaggggagcattggtgccaagatgggcaagcggctgcagcggagtttgtccttcatccaacagcacagcaactgctgcgatggccaaatgtactgcagctggcacagcacctacgaactgggctgtcacaagagcaacaagaacccgggatcggcggaccgtcagccattgatatgcacctgcagcagtccaaataggaatccggtcacctatggaactcacggaccaaccggaccacccggaccaaccggaccacctggcccacccagttccacccgcagccgcagtgttccagagggtttatccacgatgtcgcagcagtgtaactgtcgtcagggtcctgccacttttgcggcccccacgcgggagttcatctacgtgccgcacgcctatgcctccctgcaaagaaccccccatcgccacagccagggtgcgggttcgggtccggggccgggaaactcagcattgcgaaacaatccacaatgccggctgaaaagatcccaatccctatgccgacccaatgccgttcagttcgtggagcaaatcaccacgtccgtgtag

SEQ ID NO: 21270 - protein, 1131 aa, DROSOPHILA
MVIQCTCDCNCSDSRDNRSVISCLLPGRSQPYKLGSSFGGDDMEQRIPYYRRLSNTSSALYGSCPQLLPSSSSTNNRHSWLRIPKNPQENPSENPSENPRQYSSLQTAGHPGSGNTDQTAQTKPDKDSTNQRYLCYECRFNNQPLAWWVSCPRLSYLPAEQTKMQSTTTPTRHCHGGVGTQTTLPQTTSTPPTLPRFPSKRHCDNFGSYATLPTIEHQMTMPMMPHCSRHGGGGGGGVVGVGGLGGAVGSGMPSVMPAPPPPRYANPNINGCCYMYNPMPPAHQSHHQHDHHHAQQHHPVAQHQHHPHQYGPQYCLCDNWYHQPPPTQQQQHHHQQRAKNLMANGGCYFGYEANHHPSLHATTPHPSHITDEEDSAFPGLADREFHLLHRNIPALRRTGVDTTRIRQYFYPDGGWGWIICGVSFLVHILTTGLQLSYGLLWFYAVQYLHNTSGIELLGALSWSVSMVATSFVVSLCRKRSIRLLSIVGGLVMPLGILFTSFATEFGQVVFSYGIVFGVGVAMVREASTVMLGNYFKRRRQFVEMVAMSGEGVGIALFSVILKEGVGKAGWRLGLQIVAALTALSFFMGLMYRPASLYHPQRRAIQHLKNQRKKMREKKPILSQDVESTPKYFFLDISSLKSVTVKILLMTSSVASFGIYTPMFLMALNAAEQGSDVQELVLLQTFLGISMALGVVIAGALLRRCFVIRHFVINTKIVTQLFLSIVALAILFLSFVMGYTGLCILSWLYGIGLGGFQYSLKILALERIKLKHFSKAWGFIRGVESVPVLISVPLTSFLNDYSLKYGRAGYYICSAAAAISGIIIFFISEPQQQHQQQQQQLHHHYQQRNGHLATPTLMRHASARQHRPHLPMDYGYGEYPAPDLLSRSCISLNQMEPYLQANFCQRHMLQQQQQQQQQQQHSHLQQLACHNLDLQPHQGREAYQLGQGSIGAKMGKRLQRSLSFIQQHSNCCDGQMYCSWHSTYELGCHKSNKNPGSADRQPLICTCSSPNRNPVTYGTHGPTGPPGPTGPPGPPSSTRSRSVPEGLSTMSQQCNCRQGPATFAAPTREFIYVPHAYASLQRTPHRHSQGAGSGPGPGNSALRNNPQCRLKRSQSLCRPNAVQFVEQITTSV

SEQ ID NO: 21271 - DNA, 12563 bp, DROSOPHILA
aaacaggaaatcagcattttaaagatcatatctttatatgacaaagtaactactggattccgaattaatcgctattatattattgtttgacctactatgaacgttgtaatgtgtgtgtgtatgcttgtgaatgaatgtgtttcctaaaaaaaatccaacatatcaaaaagctaactaatcctggcctatatcgtaatcgcgtctaactaataatcgtttccaataaggacgaaaaccgttgttatttattattcacaaattgttgtgctcaatgcgatggaagcagctatggaaaatgggaataatcttcttcgactttgataacgacttttcgaactgttacactctgataaatctgtaattttggtctcgcttgagctattttcgtactattttattaccctttctgtaaatagacatttatctaaaaaacatttgccttgcctttgcctggatttgagccattgaatacctaatcattgcaatttgaatttggatttagcctagccgaattctatatacattagacaatcaatttggtctgctgtacgatcatttctctcattttttgtgtggctaaatatattctatgtatataagtgacaagacaacctcactaaacataagttttgtatatatatatatatatgtgtatatatatgtatgtatgtatatatgccatttgttgtaagctatataacaagaatacacaccaaaaatgtcctatcgtattcctctatatttgtatatatttgtgtatgtacgccttgttcaaaatagttttaaacccgatttgaatgaccgactaaattccttggactatgcaatcgcctatgcctaaaactaattggtttgcttggcttaagttctaagtgttgttggtagtacccgtactagtgtcgaacaagtcaagtcgtcccctctaatccatgaagtagctaaaactgcgacgcttaagtcggctgctcagagccgatctggagcgtgtctttaaccttagttacccggactttatccagcggtcaatggagtactccagtgcggatatccagctattgacggaatatggtataaatataaataattatttaaaaattattgcgacgtgacataccgcttcttatccatttcgctttcggtgcagaagaaatagtgacgcaatttcgtttctggtggcactatctcgaacgagttcttcttgccggatgcattggcggacatcgaggccactttgtagccgtgcaagcaggccatgcctaaatagagaaatgtcattaattgctggccagtcagtcagtcacctgctttcgtgccagcctcattgtttgagttgactcaccgaatgcactcttgctatttgcatcttggtaaaaatagaggcaggcatcctttagaacgcaatatcgtttcgaccatccgcaccaccttgagcccaatttgagtaagtagccgaagcagtcgggccgctgaatgttgctgggactctggtacaagcaccgtgcactgtgagggaagtgatgtgagagaatggatcagttaaaccgccgtctccgagatcaatgtcccccaaccttttgtccagccactggttgtcctgggaggccgcttgtctgagcagctggagccacctgttcgccatctcatcggagtcggcagccacgtacatgggaataccctcgccggcatccactttgaaggcaaagggcttgcccacatccacaggacacaggtcgacagtgtgcttggccatgatcatagcgccaacgggctgagagtcctgcgaaatgtggaaaaatattttagaaaatgcattgcatatttcataacaaaatctatactcacatcttcagttttgtagtagtacagacaattatcgggacgcagggagaaccaacgtcgcacccatttcttggaattcggtgctcccttggcctgtccactctgccgccacaggtatccactaaatatgggctgacttggcggctccagttgctcgtgcattagtaccccaatggtccgggccacctgaagttccagcttctcgcagccatcgtgtgcgatcttgaccacctcggtgtggtgtttgtccagcacttggacaccattcacggagatgataatgtcgcccacctccaagccagagctctccgccggagtctccggttcgatggcggccactacaacgggctttgagccgtgaatacggaagccgaattcaccggaatcgcttttgaccaccacggttttgtccacgcctatatacaaagtttaaaacatggttaaatagagtatgcttttcaaattattaataattatttaatgctcttgaagatttggtatgctgttattcagtgtttgacaaaactatagtaataatcggacaattttttcttctagttcatggatgattatttttagagaaagagagagaccgtgagagattaaagtgttatttgtgttattttatttccggattttgtccggacatcatttaccatgtgcaccgttgcttagtttggatatcacataactttcgcgtgcccagaccaagagcatcagtttcaagacctcctccaactttcttctaatcgaatccggcgtggaattggacgctattaattctgtttggtaatatgcaaaaaaaagtggaaaataataataatacgaaaactaaaaaaacgtaagcaaaaaacgcttaacggcgacgtttgattttgcactgtttactcaccaatcatttggcctgagtattgtgtaaacaccgcaaaaatattccgaaaacttttcgcacttatttctttacatttggcccaaactgaagtaccgaacgggaagcgttgcggattttttatggtcggcacacaacaaagcacgcacctcaactattctcgataatagagccaaaaaactatgggttgttttttttttgggtctgtctgtacatatctacatatgtatgccaagtgccggtcatgaaaattcggagcgccatgccattcattatctcgaaaaagttctcccacttggcgctttttcccaatctctctctttctctctctatttctcattcaaacgcacgttgtgccaaaattagaattttgtttgggtgttcgaacagggtgctccaaatggggggcattagacttacggaagctgttgtgcttctggcggtggtacatctccagggtgcagcgtcgctggacgagacgatgcaggatcacttgatacttggcatggaagcccttctcggactccgttgaagctctgcgctccctggaacgatctgtagagaaagaatattgttgcctttactcttgaaggttattttattacagttcatgtgattatgttactaacaaaatatgttcatacttctgccagctcctcctggcacaacttctggcagatctcttttgttgcaaatcttctgactaaggtttgacagggatttttgattttgtaacaaatatttcgtgattcactataaccatacaatactagagattcttttgccgatatgcatctattaaccctaggcttcagaccgcaaatggctaaaaaataataattatagctaagaacacgttatagacacccaatgcttacgatccttaagggccaagacattcagaagacgcaatgcgagtgagaggataaaaagatagattttcattcttggaatgggctatagctaagcttttccattgaaatgcggttataagacctgagtaggaacattttcccagtcaactgtgtcgaatgccattagttttgcaaaatgtaatttacacctcccatttccttatcgattgttaatcctatttttactcaccaaaacactgatggtccagttgagtccacaagtcatcatcggttagtcgtgtatagcgtcctgcgtcgtagtgtcccttatagataatgtgctgactctgttccgtatcgggcagtacacaaggactggagccagcaggacgaaggacgggggtattgggaagactgggtatgcgcccacgctcctcgctctgcaaaaaaaaaaatattcatcaaattttcaattcttgattgcttacagtggttttctaaaagttttttttttagcattcttaaacatatttttcttaaagtgcagagccccacctttgccctaatattctcctgcctggttttgtagtgcctgcccctttcgccgtggtatcgctcctcggatcggaaccgcttgtccatctttttgtacaaccgctgggtggtcttggtggtcaccggcgagtcggcaaagtccgacggaggcttgacgatgtcctgctcgatgtagggtatcgactcgaccgagtcaccagccagttcgctgatggtgttgctctgctgcttgccctccatctccttgccgcaatggtgacagtgactctgctcgccactggccgcattgccatcggcttcgctgtagaacacggaatcggaaccaggcgacacagagcgcaaggattcaattgacttggccttgagctgaaaggtgtccgatgtggatttcgactgggtgccgctagttgtgggcagcttgggcgacagcagggatgtgggcgtggcgcaactgtgtggtttcttagccggcaatggagccactactgcctcgggttgtgtggtcactgaggattccgatgttggtaacttggatgcggatgaaggtgcggataccgatgtcacggcagaagtggtggttcctgccacggcgccagttgacatgctggcatctagcagcaactctgtgtctccactgccactgctcaggccgaaaatagtgggcgtggcacgactcctgcgtaccgctgccgccgccaggacatcttcccgtgaactttttctcagctgcctgcgtatcttgggacggaagcgtttcattttgctgggactgctgccattgtccatggttccagaaatcgattgctctggcgatgtgatcttgctggatcccgtgggctttttaatgggactggttagggcacgcatgttctccttctcaatgtccagcttcatgcttgttttgcgccttttcctttcgtcttcctgtcgcaggcggcgcgccttgctcctggtgccctgctcttcgtcatcctcctcgtggggactctcgtaataaccggacgaggagtaccgcacttcgctgcgctcatcctccgatatagaatccggcttgggcttaactccaggcggtatgcattctacggagctgactttcatctgtgaagttaccgaactggccactgtttggggcagactttccttggcaggagatttgatggccgcccccaagacaggacagctgcctgaagaggtggtactgctgatggagtgcgatggcgatttcctggtcagctcagccactgagccaatgggcgattttagttgagccttggtaagagtggtctgcttatcccgctccttctcgtcgtgctggaggagatcctccctcatggagtaaagggaactggcgctttcgaaggaactgccggcgtgcgtcttttccaactgcgagctctgggtggaaactgtcaaataaaaaaggaatggatttacaccttagttaatagggatcattgagaaatgggtattaggcacagctaaagcattgcgggcaaggcatttgatcaggcatcaacaacatttaactagggaggcgagagagatagagaggcagacaaagttgagatgaggtagatgaattctacggtctattagctataggctgtacgtgtataacactatggcgataagcaaggaggcggtgaaagtggcagtggtttttttgcggcaatgtcggtggagtgttggccacgaacacaattcgtttttgttttcttaacactcattcatggatcaagacttggattatgcgttttggtacgagttctacacacagacaggaacacgaacacgaacacacacagcacgagtacgggtacgagtacgtatcggatcggggggcccaaacctggcacttgtgtggtcgacgatgaactggtggtggtcggcggtgtcttaatacctggtgtgcgtttcgaggtgtccgtgcaggtggcatactcatctgtattcgtactgcactccgatatatctgcactcctcgcatagtcagcggcgcccataggcaggaacgaggcatccgagtgtctgccaaggagtaatagatagatatattaaataggtttagtcttgcccaaaaatataggtcaattttagggattactcttccccaagtcagtgcaatcgtgttatatccaatgcatacttttgggcagatactgcatatgagagcttatcaatagaagcactatagtaacctttgtttggtggctccactagtgaacataagctgtcgggcgtccggaaccgatcctctggccaccatgcttctcttgggcagcggtgaacttatgcagctgtccagaatctgatttgtagatggagttacggcgatagctggtggtggcatcattggttgggtggaagtgggcctcgatgtggttggtgtgggtgtcttgatgatcttcggcagtgtttgtaggccataggtgggactctaaagatgacattattgaaataagattcacttagagaatgtcatatacccacttgttcctcaaaatccagggcatcggtgtcaaccgagcttctctgttgatgctgcagcagtaggttcttcctcttcgaggagggtgtcaacagcaagttggaactgtaggagccatcggatatatctctctgttcagctgtcaagacagtaacctgcgactcattccatatgccatcggaatgatcgcgggtattgtcattggccagcgagtctgaggaaggataagttgagacattggccagcagctcatcgcggcaaggactggccggagttgacgggagtctcaggccagttggtgtgggagtttcagatgccttagcctcgtagtcatcatccaagctgacagagcgcttgcggaattgcgagcgtttgtcctggatatcttccgcatccgacgtaggaaccacacggcagccacagggcgtaatgttctcgtacagcggttcctcatcttcctgcagatccgtctcgagcttctgctcatcatcatcgatctcctcaccgtcatcctcctcttcgggctcggaaacttcgtcctcgtcctcctcctcatcgcttggctcaagttcaacttttctcacctcaacttcgactggctgtgacttgggcttgggcagggtcagagctgccgcctgtgccatccgctgctgttgcatctttctcatggcgatctccgccttgtgttgcttacggtgcttcagctgaagcttgggactcggcttgggtgaaatgtgcggcttaaaatctataaatatctcctgttcatcccgaacttcttgtacggctggcggctcatccggaaaacagctgaccttgtcgcgccttcgaaaagagctccttgggccaaagccatcgatgagcttctccgtttgaccataaacgggcatggattgacgcctcagatcatcacgacgaaaaggggagtctatcatttggggcaacatggacatccggcgatgttgggctgcctgctccatgcagacctctgagctatagctttccgtttcatggggatgatcttcatcctcgtcgtagtactcctccacatcctcgtcgtcgtttttgcagtactcacttggtggtggcaataaatgcgattggctaaagtccaagggaacactatcggtcattagttccgagctctcggtgatatgccttctaggcaaactattcgaatagaaatccgtatgcgaggtacacgctcgtcgaggcaaactgttgctctcatagtcgaaactttcattcagagccactgcggcagcattcacattcacatactccacattttgctcggatggcgaaggacgtgtccggctcaggtgctccattcccagtccgtaactgtgggcatccagcaatggtggcggcggtttgtagtacatgatgttgttttgggcatccgaaagggtctgcaaaggggtcacatcctgcgactgagtgcggtagatcatctcatgcgggtatatggaactgtggatgaaaacgaattgtacattcagaaaaactgaacaacaaagtgtatgtggtgctattgtagaaagcaactaacccctgttgataatgatgcgaggatgtgccatccttgccattgggtatttcggagagacttttcgttagttttttgccattctgcaggccgttcgtttgagccccctgggaaaccaccttaatgcgatgtggtggacggggactcaaagccaggacctgggtattgtagcccaattgcccctggcgacgggctgctgcatctgtttgagttgcctgcgttttcatggcattgcggaacttcttctcgacgatgagaacttcgggactgggcagtggaagagccaagggcagaggttggggaatgatcagtccgaccatgttgtctgaaattcaacgagtgattacgataaatacaaagtaatggcaaagattatttgtaaaaaatacatatacgagtaaacttcaattggtttgacagcctgaagtgcctaatcttcggctgcagtgcttttctcatcgtaccttggcttgctggcaattgggtggctaaatcctcacctgaaatgggctggtgcaggtgaatcggggcatggtggtgctggcatggctgcagttgaactggtggtggcagccaggtttttggcagggtagagctctgttgcggctgcatctgttgcggttgctgttggacttggagcggcggctggagggtttcgtacatggagcccgtggcaataatgggcttcttgcccccaattaatctctcctggcttcgggctgttttcaaacgccctgaggatcggaatccggcattcacattgtcgaaacttgtaagtgtgtgcgacctggcaaagctcacgtgtttggttctgcacagaggagttgttaaaagacgattttttcgaggggattatcccaaggacttacctgacatttccgccctgttgttggtggtggtgctgatggtgtgtggttggcattgtggcgtatgtggggcagtgatacgagctgtggagtaagcacattagtggaatgttaagcaaataatcgtggcattattttagcattttcaacactcaagcattttctttaaatttattcattttatttttaactagattgtttttgcttttcggtcacgtgcagacacataacataaataaacgtttttgattagcgcactttttttatcaaagtttgtttttcgcaaattttttgcatacatatcttatttaagtattttgttagattttagatcactttacataccaaacatttagattagcgatttgattggtgtgtgatgttggtggtgtaggatttggtggagcgcaaagctcgacataataattccgtagcaaaacatcctggtaaaaggattcaagtggtgctgtacaacaagttgccctttacacattttgatcatttcatttagtatttggtggggtttttgattgtggcaatatcaattgataaattttggttgatttttatagtcgtttttggttttgaggagagaaggacaggtggatgaataacgaaagagtacacgaaaaagtatttttatacagcatttctagtaggtggtttatcagtggtttttcgagtggtttaagaagaacttggaggcaaaaagcggcattatgcaatggatggagtcgaaaggaaagttcaggcaagcattgcaagcgacttacatatatatacaaaacaatatatatacatatttacatagtaatcgggaaagtcgaggagtttggcgagcgacagagagttagtgactacagatagtgcgacagtaaagcatgatctaagcgacagttggcatagcattttacggtttttgattaggattctttttttggttcatggttatctgtttttgtatcgactttcgatcgccttgccaggcggtccatacctgtggtccgattggtagtcgggattgttgttggtcacctgctgttggccaatccaggtgtagcgtccacccagatccgcttcacccgatttaccagtactcagaatcgaggccggttgacggcgaaaataggaactttccaattcgtgtgtgtccgtatagctgttctggtagctggaaaattgataaaattgctttagttaccacatctttgctgaaatatttttgcacccaccgtggatatttttcaaatggagcataggcggccaaattctcatcggagggcacccgccgacccacacagccgcccaaaaaactgcccgattgcgtttgaccgcgtcgcgaaaggcagccaaaaaatcgttctcgcctaggacgctgctctatgctgtgcaactggcgatctgtgaggcagtactgggaaataaaataattgcatgtataaaatataataccaagggtatcatatatatttcacctgttcccgaatatctccgcgtgagtaaacagaagtgtgaggatgcaactcggtggacagcgtatggcgaagtcttcggcgaccagtgtgttcatcctcggagtcgtagctgcgatccatgtggctggagtaggtggtctatgtgataaatataatacgaaaatcggttaggtgtttgatttcagatatttatatctagacaccctgtcgtatactttatttgtctcacattactattacgtatacgcccagtatacaaaaataatcgaaaaaacttaaagctggcagttcaagatgagactattttacctgaatctgtataactgttccacttccctgcctttatactttgctaatcctggcaaatccctaatttccatcctagttttggctgtcctatcttgagccctaatataccttgctgagttgtcctttcccgctccccagacttgcagcaaaataattgtgtcaatcacttgctatgacagcgcctccttcgcctaacagaaattaattttactcgccgcacactttgtggtgttttgtgtttggcgttttggcgaggtggtctacttatgagtacgaaccttggtggagacctcaatgttgcccaatgacacagcatgatgcagacctgtaaatgaaaaggtcgttgtttcatttgccagcggaataaaagatgtgattatgtgcctttgagccggggatgccaaggactcaccagttccagtcgttgatgttgacgatgctctggtttgtgccacgcaaggcaatatccattttcaaacggcaacaaaagaaataaaatggaaaagaaaataaaagcgaaacaggggcaaacacacacacacacacacacaagagattctactatatatatatatatatatccagggaaatccttcttgctgcctccctttttcgtgtcaattgtttgggccaggctttgaaatccttgactttagctgatccatgatgacttcaatattgatgattaaaaaacttaattactacgagtccggcctgttgttcgttgtcatttgaatcgcttatccagacggtttcgactgcgtttgtatactaatcttcgtggacttatgcaaggcagtcagcaatcgatattcgcgctggccaaaaaagcgatggaaaagccgtaggaaaaacgcaaattcgacgctttttgctggcgcttttccgctgccttttaatttgtgaatgtttttccgtggagttacgctgaagtctcgttaattgttcttaaatttcgctgagttggctgcttttcacaggatttttctccattttttttttttttttggctggggtgtgtgtgtgtgctgcgtggcttgagtaacccgacagttttcacggattttccggtctccaaaacacgctccacactcgacggcgctgatgctggaactgaaactcaggcagcattcgcattttccgacgcaccgagagagcaagagttttccgcaggaattttaagagagtcacgctggaagcgaggcaaacataaaacagatgttcggaatctgctgcgttgggggggtggtgggctagtggattttctggtcctctggctttcggcggattctgcgactgcaaaagcgcaacaatgaaaacgcctggaagttggcagcagcagctgagcatgcgtttgcgcaaagcagctccacaaaaagccagcaggacgtatgtcaacaaggcagacagtcggccaggacatgccatcgccgtcgtcatcgccatcgccacatccttgtgcctcatgcagctatttcggtggcagaaaccgaacaaaaaaaatgcgagcaactgaagaaacagcagcatcgtcacgtagccaagggctaaatttcacttagaacgcgttcgaggcgtccacaaaagttgacttcacacggctttcatgtctggctttaaggcaaaaacatgtctaacaaaatgtacacggtaatacaactttcgtttcacttgattttacatggaatcttcgacaacttgaacatcaacgtttacttagtaacatttttttcagccag

SEQ ID NO: 21272 - DNA, 6305 bp, DROSOPHILA
cgattcaaatgacaacgaacaacaggccggactcgtagtaattaagttttttaatcatcaatattgaagtcatcatggatcagctaaagtcaaggatttcaaagcctggcccaaacaattgacacgaaaaagggaggcagcaagaaggatttccctggatatatatatatatatatagtagaatctcttgtgtgtgtgtgtgtgtgtgtttgcccctgtttcgcttttattttcttttccattttatttcttttgttgccgtttgaaaatggatattgccttgcgtggcacaaaccagagcatcgtcaacatcaacgactggaactggtctgcatcatgctgtgtcattgggcaacattgaggtctccaccaagaccacctactccagccacatggatcgcagctacgactccgaggatgaacacactggtcgccgaagacttcgccatacgctgtccaccgagttgcatcctcacacttctgtttactcacgcggagatattcgggaacagtactgcctcacagatcgccagttgcacagcatagagcagcgtcctaggcgagaacgattttttggctgcctttcgcgacgcggtcaaacgcaatcgggcagttttttgggcggctgtgtgggtcggcgggtgccctccgatgagaatttggccgcctatgctccatttgaaaaatatccacgctaccagaacagctatacggacacacacgaattggaaagttcctattttcgccgtcaaccggcctcgattctgagtactggtaaatcgggtgaagcggatctgggtggacgctacacctggattggccaacagcaggtgaccaacaacaatcccgactaccaatcggaccacagctcgtatcactgccccacatacgccacaatgccaaccacacaccatcagcaccaccaccaacaacagggcggaaatgtcagaaccaaacacgtgagctttgccaggtcgcacacacttacaagtttcgacaatgtgaatgccggattccgatcctcagggcgtttgaaaacagcccgaagccaggagagattaattgggggcaagaagcccattattgccacgggctccatgtacgaaaccctccagccgccgctccaagtccaacagcaaccgcaacagatgcagccgcaacagagctctaccctgccaaaaacctggctgccaccaccagttcaactgcagccatgccagcaccaccatgccccgattcacctgcaccagcccatttcagacaacatggtcggactgatcattccccaacctctgcccttggctcttccactgcccagtcccgaagttctcatcgtcgagaagaagttccgcaatgccatgaaaacgcaggcaactcaaacagatgcagcagcccgtcgccaggggcaattgggctacaatacccaggtcctggctttgagtccccgtccaccacatcgcattaaggtggtttcccagggggctcaaacgaacggcctgcagaatggcaaaaaactaacgaaaagtctctccgaaatacccaatggcaaggatggcacatcctcgcatcattatcaacagggttccatatacccgcatgagatgatctaccgcactcagtcgcaggatgtgacccctttgcagaccctttcggatgcccaaaacaacatcatgtactacaaaccgccgccaccattgctggatgcccacagttacggactgggaatggagcacctgagccggacacgtccttcgccatccgagcaaaatgtggagtatgtgaatgtgaatgctgccgcagtggctctgaatgaaagtttcgactatgagagcaacagtttgcctcgacgagcgtgtacctcgcatacggatttctattcgaatagtttgcctagaaggcatatcaccgagagctcggaactaatgaccgatagtgttcccttggactttagccaatcgcatttattgccaccaccaagtgagtactgcaaaaacgacgacgaggatgtggaggagtactacgacgaggatgaagatcatccccatgaaacggaaagctatagctcagaggtctgcatggagcaggcagcccaacatcgccggatgtccatgttgccccaaatgatagactccccttttcgtcgtgatgatctgaggcgtcaatccatgcccgtttatggtcaaacggagaagctcatcgatggctttggcccaaggagctcttttcgaaggcgcgacaaggtcagctgttttccggatgagccgccagccgtacaagaagttcgggatgaacaggagatatttatagattttaagccgcacatttcacccaagccgagtcccaagcttcagctgaagcaccgtaagcaacacaaggcggagatcgccatgagaaagatgcaacagcagcggatggcacaggcggcagctctgaccctgcccaagcccaagtcacagccagtcgaagttgaggtgagaaaagttgaacttgagccaagcgatgaggaggaggacgaggacgaagtttccgagcccgaagaggaggatgacggtgaggagatcgatgatgatgagcagaagctcgagacggatctgcaggaagatgaggaaccgctgtacgagaacattacgccctgtggctgccgtgtggttcctacgtcggatgcggaagatatccaggacaaacgctcgcaattccgcaagcgctctgtcagcttggatgatgactacgaggctaaggcatctgaaactcccacaccaactggcctgagactcccgtcaactccggccagtccttgccgcgatgagctgctggccaatgtctcaacttatccttcctcagactcgctggccaatgacaatacccgcgatcattccgatggcatatggaatgagtcgcaggttactgtcttgacagctgaacagagagatatatccgatggctcctacagttccaacttgctgttgacaccctcctcgaagaggaagaacctactgctgcagcatcaacagagaagctcggttgacaccgatgccctggattttgaggaacaaagtcccacctatggcctacaaacactgccgaagatcatcaagacacccacaccaaccacatcgaggcccacttccacccaaccaatgatgccaccaccagctatcgccgtaactccatctacaaatcagattctggacagctgcataagttcaccgctgcccaagagaagcatggtggccagaggatcggttccggacgcccgacagcttatgttcactagtggagccaccaaacaaagacactcggatgcctcgttcctgcctatgggcgccgctgactatgcgaggagtgcagatatatcggagtgcagtacgaatacagatgagtatgccacctgcacggacacctcgaaacgcacaccaggtattaagacaccgccgaccaccaccagttcatcgtcgaccacacaagtgccagtttccacccagagctcgcagttggaaaagacgcacgccggcagttccttcgaaagcgccagttccctttactccatgagggaggatctcctccagcacgacgagaaggagcgggataagcagaccactcttaccaaggctcaactaaaatcgcccattggctcagtggctgagctgaccaggaaatcgccatcgcactccatcagcagtaccacctcttcaggcagctgtcctgtcttgggggcggccatcaaatctcctgccaaggaaagtctgccccaaacagtggccagttcggtaacttcacagatgaaagtcagctccgtagaatgcataccgcctggagttaagcccaagccggattctatatcggaggatgagcgcagcgaagtgcggtactcctcgtccggttattacgagagtccccacgaggaggatgacgaagagcagggcaccaggagcaaggcgcgccgcctgcgacaggaagacgaaaggaaaaggcgcaaaacaagcatgaagctggacattgagaaggagaacatgcgtgccctaaccagtcccattaaaaagcccacgggatccagcaagatcacatcgccagagcaatcgatttctggaaccatggacaatggcagcagtcccagcaaaatgaaacgcttccgtcccaagatacgcaggcagctgagaaaaagttcacgggaagatgtcctggcggcggcagcggtacgcaggagtcgtgccacgcccactattttcggcctgagcagtggcagtggagacacagagttgctgctagatgccagcatgtcaactggcgccgtggcaggaaccaccacttctgccgtgacatcggtatccgcaccttcatccgcatccaagttaccaacatcggaatcctcagtgaccacacaacccgaggcagtagtggctccattgccggctaagaaaccacacagttgcgccacgcccacatccctgctgtcgcccaagctgcccacaactagcggcacccagtcgaaatccacatcggacacctttcagctcaaggccaagtcaattgaatccttgcgctctgtgtcgcctggttccgattccgtgttctacagcgaagccgatggcaatgcggccagtggcgagcagagtcactgtcaccattgcggcaaggagatggagggcaagcagcagagcaacaccatcagcgaactggctggtgactcggtcgagtcgataccctacatcgagcaggacatcgtcaagcctccgtcggactttgccgactcgccggtgaccaccaagaccacccagcggttgtacaaaaagatggacaagcggttccgatccgaggagcgataccacggcgaaaggggcaggcactacaaaaccaggcaggagaatattagggcaaagagcgaggagcgtgggcgcatacccagtcttcccaatacccccgtccttcgtcctgctggctccagtccttgtgtactgcccgatacggaacagagtcagcacattatctataagggacactacgacgcaggacgctatacacgactaaccgatgatgacttgtggactcaactggaccatcagtgttttgatcgttccagggagcgcagagcttcaacggagtccgagaagggcttccatgccaagtatcaagtgatcctgcatcgtctcgtccagcgacgctgcaccctggagatgtaccaccgccagaagcacaacagcttccaattaatagcgtccaattccacgccggattcgattagaagaaagttggaggaggtcttgaaactgatgctcttggtctgggcacgcgaaagttatgtgatatccaaactaagcaacggtgcacatggcgtggacaaaaccgtggtggtcaaaagcgattccggtgaattcggcttccgtattcacggctcaaagcccgttgtagtggccgccatcgaaccggagactccggcggagagctctggcttggaggtgggcgacattatcatctccgtgaatggtgtccaagtgctggacaaacaccacaccgaggtggtcaagatcgcacacgatggctgcgagaagctggaacttcaggtggcccggaccattggggtactaatgcacgagcaactggagccgccaagtcagcccatatttagtggatacctgtggcggcagagtggacaggccaagggagcaccgaattccaagaaatgggtgcgacgttggttctccctgcgtcccgataattgtctgtactactacaaaactgaagatgactctcagcccgttggcgctatgatcatggccaagcacactgtcgacctgtgtcctgtggatgtgggcaagccctttgccttcaaagtggatgccggcgagggtattcccatgtacgtggctgccgactccgatgagatggcgaacaggtggctccagctgctcagacaagcggcctcccaggacaaccagtggctggacaaaagtgcacggtgcttgtaccagagtcccagcaacattcagcggcccgactgcttcggctacttactcaaattgggctcaaggtggtgcggatggtcgaaacgatattgcgttctaaaggatgcctgcctctatttttaccaagatgcaaatagcaagagtgcattcggcatggcctgcttgcacggctacaaagtggcctcgatgtccgccaatgcatccggcaagaagaactcgttcgagatagtgccaccagaaacgaaattgcgtcactatttcttctgcaccgaaagcgaaatggataagaagcgctggatatccgcactggagtactccattgaccgctggataaagtccgggtaa

SEQ ID NO: 21273 - protein, 1970 aa, DROSOPHILA
MDRSYDSEDEHTGRRRLRHTLSTELHPHTSVYSRGDIREQYCLTDRQLHSIEQRPRRERFFGCLSRRGQTQSGSFLGGCVGRRVPSDENLAAYAPFEKYPRYQNSYTDTHELESSYFRRQPASILSTGKSGEADLGGRYTWIGQQQVTNNNPDYQSDHSSYHCPTYATMPTTHHQHHHQQQGGNVRTKHVSFARSHTLTSFDNVNAGFRSSGRLKTARSQERLIGGKKPIIATGSMYETLQPPLQVQQQPQQMQPQQSSTLPKTWLPPPVQLQPCQHHHAPIHLHQPISDNMVGLIIPQPLPLALPLPSPEVLIVEKKFRNAMKTQATQTDAAARRQGQLGYNTQVLALSPRPPHRIKVVSQGAQTNGLQNGKKLTKSLSEIPNGKDGTSSHHYQQGSIYPHEMIYRTQSQDVTPLQTLSDAQNNIMYYKPPPPLLDAHSYGLGMEHLSRTRPSPSEQNVEYVNVNAAAVALNESFDYESNSLPRRACTSHTDFYSNSLPRRHITESSELMTDSVPLDFSQSHLLPPPSEYCKNDDEDVEEYYDEDEDHPHETESYSSEVCMEQAAQHRRMSMLPQMIDSPFRRDDLRRQSMPVYGQTEKLIDGFGPRSSFRRRDKVSCFPDEPPAVQEVRDEQEIFIDFKPHISPKPSPKLQLKHRKQHKAEIAMRKMQQQRMAQAAALTLPKPKSQPVEVEVRKVELEPSDEEEDEDEVSEPEEEDDGEEIDDDEQKLETDLQEDEEPLYENITPCGCRVVPTSDAEDIQDKRSQFRKRSVSLDDDYEAKASETPTPTGLRLPSTPASPCRDELLANVSTYPSSDSLANDNTRDHSDGIWNESQVTVLTAEQRDISDGSYSSNLLLTPSSKRKNLLLQHQQRSSVDTDALDFEEQSPTYGLQTLPKIIKTPTPTTSRPTSTQPMMPPPAIAVTPSTNQILDSCISSPLPKRSMVARGSVPDARQLMFTSGATKQRHSDASFLPMGAADYARSADISECSTNTDEYATCTDTSKRTPGIKTPPTTTSSSSTTQVPVSTQSSQLEKTHAGSSFESASSLYSMREDLLQHDEKERDKQTTLTKAQLKSPIGSVAELTRKSPSHSISSTTSSGSCPVLGAAIKSPAKESLPQTVASSVTSQMKVSSVECIPPGVKPKPDSISEDERSEVRYSSSGYYESPHEEDDEEQGTRSKARRLRQEDERKRRKTSMKLDIEKENMRALTSPIKKPTGSSKITSPEQSISGTMDNGSSPSKMKRFRPKIRRQLRKSSREDVLAAAAVRRSRATPTIFGLSSGSGDTELLLDASMSTGAVAGTTTSAVTSVSAPSSASKLPTSESSVTTQPEAVVAPLPAKKPHSCATPTSLLSPKLPTTSGTQSKSTSDTFQLKAKSIESLRSVSPGSDSVFYSEADGNAASGEQSHCHHCGKEMEGKQQSNTISELAGDSVESIPYIEQDIVKPPSDFADSPVTTKTTQRLYKKMDKRFRSEERYHGERGRHYKTRQENIRAKSEERGRIPSLPNTPVLRPAGSSPCVLPDTEQSQHIIYKGHYDAGRYTRLTDDDLWTQLDHQCFDRSRERRASTESEKGFHAKYQVILHRLVQRRCTLEMYHRQKHNSFQLIASNSTPDSIRRKLEEVLKLMLLVWARESYVISKLSNGAHGVDKTVVVKSDSGEFGFRIHGSKPVVVAAIEPETPAESSGLEVGDIIISVNGVQVLDKHHTEVVKIAHDGCEKLELQVARTIGVLMHEQLEPPSQPIFSGYLWRQSGQAKGAPNSKKWVRRWFSLRPDNCLYYYKTEDDSQPVGAMIMAKHTVDLCPVDVGKPFAFKVDAGEGIPMYVAADSDEMANRWLQLLRQAASQDNQWLDKSARCLYQSPSNIQRPDCFGYLLKLGSRWCGWSKRYCVLKDACLYFYQDANSKSAFGMACLHGYKVASMSANASGKKNSFEIVPPETKLRHYFFCTESEMDKKRWISALEYSIDRWIKSG

SEQ ID NO: 21274 - DNA, 3386 bp, DROSOPHILA
cagctattttatggggcgtttgaattttgattttttagcttttcggaagcgacgcttattgcatttaaggcgcggtcagccagcgatcactcacactctgaagaaccgactgtacgtatacgtgacagccaagagaagaaacaacaaagcaccgttgagatcaataagttactacggccaagcgttgtgttttttcccgatcaagcgctcacgtccaacatcgaacaccttctgaaccgaactgagtgccgtcgtaaaacttaaaaactgaataaactgaacgatgagcgacacagagcgcactgagttcacaagagaggaactcaggaactcattcaaagtggccaggtaagcccatctggccccaaagacccaaagcttttggcttttggagcggcgttactgtctctgaaatatctcagttgccttggccgaaatgctaaatgtggcaaatgcagtggccaaagctttgggttcgagccgcacactattccgtgcagaaagttacactcaaatggggataaattactggcttacagctacaatacaattctttataaatataaagtttaaataattaaaaaacaatatttaagcctatttcatatgcatttatgtgtataaaagctttgagactcgagcccaaaagtatagcaaagttatatcctcttttaactttgtttcaagaatctcccagttcctttctagtttccattactacactttcttcggagattccaaggacttatagacaaacttttgttttaactttgatttataaattttattttatttacgaatttctattgagcaatataatgcatataatactactaatacccacgaatcctaataaatataaaaaataaaagtaaggattgaaaggataaaaaggaaagagcgtgcgctcactggcgccacgtgctatttttatgtactacatattcgaggcgccatcaaattcatggcgagatcgtgaactacaaatcgcgattgactgttacagcgccagctgatgttgcgccgaaagttggtactaaaaacgtgatctaaaacagcgccatctagtcagtcgtattgcgaagtcttgggcgcatttattattcgagttcgaaataattcaaatgcctaaaataaaataatccaacaataaaccataaaatattcctttaactgcagtatgattgtaatttagaatgggcgtggtcatcatgttgttggactcctcgaaattgatgtgattatcctgatctaaatcgtactcgcgtatcatctcttccagctcgtcgtcttccaatttttcaccaagtgccataaagacagccctcaactcggtagtggagatgtacccattgttctccttatcaaaaacgcgaaacgcatcgcgcagctcctcctccttatttgtgtcgtgcatcttgcgcagaatcacattgcaaaactcctcctttgcaatggattcattgggctgtcgacctaatgctcggattaccattcccaattccttcgaggtgatggcaccttcgttatccttgtccaataaactatagatattcttgagcaggtcctgctcttcaacagacaattcatccattatgccttatattatgggaacgagaatattattatgctcgtaggtttactttttcgataggattgatactcagttgaggggtgataagctttaaaggagttctacgattgaaaattgttattcaaaacatttaatataaatatttttgaaaaaaaaagtggtactaaagacgtgatctaaaacagcgccccctagtcagtcgtattgcgaagttttgggcgcatttattattcgagttcgaaaaaattcaaatgtctttaaaataaaataatccaacaataagccataaaatattcctttaactgcactatgattgtaatttagaaagcgtgtgcgtgtagattaacgcgtggtcatcatgttggtgaactcctcgaaattgatgtgattatcctgatctaaatcgtactcgcgtatcatctcctccagctcgtcgtcttccaatttttcaccaagtgccataaagacagccctcagctcggtagtggagatgtacccattgttttccttatcaaaaacgcgaaacgcatcgcgcagctcctcctccttatttgtgtcgtgcatcttgcgcagaatcacattgcaaaactcctcctttgcaatggatccgtttccatcagagtccacctcgtttatcatggactgaacctccgattcattgggctgtcgacctaatgctcggattaccattcccaattccttcgaggtgatggcaccttcgttatccttatccaataagctatagatattcttgagcaggtcctgctcttcaacagacaattcatccattatgctttatattatgggaaggagaatattattattatgctagtagatatactttttcgataggattgatactcagttgaggtctgataagctttgaaggagttctacgattgaaaattgttattcaaaacattcaatataaatatttttgaaaaaagccaactaagagttagccttcggtctttaacagatattaaacaatctgcgtgctccatgaagttcataaacttttactgaagataaaggcattaaaagagcattctcacgcacagtttggcaaacaaatcacgtgctttcctggacccaaatgatatcatctggcggagaaactctttggctttacgcgtattattttatagttgaaccagaaattgatgtcatcggtggcggtaaaaaatgggcgcccaatccgcccaatgaggaaattccaggaagccgggcaactccaactgtcggtgatgacaatttgcgtggcattttaattgaactttctacgtgttcgagtggtgtactttgatttgatccccatccaccgatttttcgtcgatttgagtcaatgttaaaggcgttgccacaaaccgcaaactgtcgtgtctaggaggttggggaggggcttggtggctggggcctcgaaacgtgcctgaagtattattaccgccgtctgtgattgatggcctcatgcgagtgagtcagtggatttttataactctacgcagatcccttcctttcaatcaagcggcaaaaaatctggacatcgatctcgccgatattagctaacttcatttcaacttaactgcccggagtgctttgaataaagtggatttgaggcgatgccttgggattcttggccagattaagtcgattttttttttttacttcaatgaaaaaaatggcacgcaattgtttttcattattaatgcatactttatttgaaatcaactaactcgctatggtttgaataaaatcatttaaaattgaaggaagaccatggaattctatgggt

SEQ ID NO: 21275 - DNA, 849 bp, DROSOPHILA
ataatggatgaattgtctgttgaagagcaggacctgctcaagaatatctatagcttattggataaggataacgaaggtgccatcacctcgaaggaattgggaatggtaatccgagcattaggtcgacagcccaatgaatcggaggttcagtccatgataaacgaggtggactctgatggaaacggatccattgcaaaggaggagttttgcaatgtgattctgcgcaagatgcacgacacaaataaggaggaggagctgcgcgatgcgtttcgcgtttttgataaggaaaacaatgggtacatctccactaccgagctgagggctgtctttatggcacttggtgaaaaattggaagacgacgagctggaggagatgatacgcgagtacgatttagatcaggataatcacatcaatttcgaggagttcaccaacatgatgaccacgcagcaggacctgctcaagaatatctatagtttattggacaaggataacgaaggtgccatcacctcgaaggaattgggaatggtaatccgagcattaggtcgacagcccaatgaatccattgcaaaggaggagttttgcaatgtgattctgcgcaagatgcacgacacaaataaggaggaggagctgcgcgatgcgtttcgcgtttttgataaggagaacaatgggtacatctccactaccgagttgagggctgtctttatggcacttggtgaaaaattggaagacgacgagctggaagagatgatacgcgagtacgatttagatcaggataatcacatcaatttcgaggagtccaacaacatgatgacctaccaactttcggcgcaacatcagctggcgctgtaa

SEQ ID NO: 21276 - protein, 281 aa, DROSOPHILA
MDELSVEEQDLLKNIYSLLDKDNEGAITSKELGMVIRALGRQPNESEVQSMINEVDSDGNGSIAKEEFCNVILRKMHDTNKEEELRDAFRVFDKENNGYISTTELRAVFMALGEKLEDDELEEMIREYDLDQDNHINFEEFTNMMTTQQDLLKNIYSLLDKDNEGAITSKELGMVIRALGRQPNESIAKEEFCNVILRKMHDTNKEEELRDAFRVFDKENNGYISTTELRAVFMALGEKLEDDELEEMIREYDLDQDNHINFEESNNMMTYQLSAQHQLAL

SEQ ID NO: 21277 - DNA, 10348 bp, DROSOPHILA
tgccaccgcctggtacctatcaataccaacaggtgggcggcaataccgttgtagttgccgtgcgtcatcagcaacagttgcaacagcagcagcagcaacagcagcaactggctttacatcatcagcatcagcagcagcagcatcagcaacagcagcagcagcatcagcagcagcagcatcagcaacagcagcgtgccactctcgtgcagccaggattcttgttcagctatcgcagcaatcaaccccagcagcaacagcaaccagcgcagcaaatacatcagggccccaaagtgacgcatagcagtggtaagaagatgaaggaagaggaagagcaaaataaggatgaaaggacaagagaccgcaagcaaatcaaaatccagggtctcctcaatcattttccataataaggctaaaatcagaggagaacttgtagattttcgcgaggttcttgtttaaataggagatagtttggcgcttctggccttaaaggaattgacagcacacacacgctctataggaatagggttaattgtggtccgcttaagacgttggtcttttgtgattgtccccgtctagggcaggaacaaattctaatgtgatttgcaaaacagtaacccgaaatctttttatgtggaactcaaaacgaccctgatcgtgagttcactgtacaaattcttggcaattggatccactctttattattggtgctggccgtagtctaggtgataatataacccatactgcactgaaaaaaaaaccacactgtccaaaatactccaacctcccttacatctttcttcgtccctcgctcgctcattcctgcgttgctttgctcgcggtgtctgccgaataatttccataactgaaccgaactgaaacaaaataatagtaaacttaacattgttttgctctgttttctctacctcccgatctctgccttcgtcttcgtctccgtctctttgtctgattagcagcttcggatgctttaacatatagtttgatggcacaacaaccgccaagtggaccgccgcatgcaggtggacagcaaataacgccaggtaaacgtaaaacccaatcgatcagtatatgtacatactcgcaccaattccagcctgtccacatacatattacgcttttgatttgcattgattttatttcaccccgcgccaaacactcctgcgttcaccatccaaaggcatctcaggtggcagcactcaatttttgatcttttgcccaaaacttgtccttattcaaacctagaccttttattttacttcttagatttgctgttttagttttgatttatttctttattacatgtgtactttaaaattatttattatttatttttagttttgactttaacatttaaaaatttatcgtcaataacccttaacaatagtatcagaagctagcaaacgcagtaatgaagacatataaagtttttatattaatgtttatatatatattgatcattatcaccatccgagtcgatataacaaagtccgtatgtccgtttctactttagtattaccatacaatttttgttaactttccgaatattttttaatttgtctaagcttttagtgtcaaatctgcttttctttttgactatttgtttctatgtttttccttaatcattcaatcgctgaaccaattgttttcataagctatgccagattattatattgatgacgagttttgtgactttcttcgtgatgctgctctaggtgcaaactctgcaaatctaagcattgtagcggccgctttgagcgccgctcgtgacgtcgggggaggatccgacggaggaggatcagcgggaggcgcaacgccagctactggagcatcggcttcatccgtaggaaacaccagcgccgtgggcgcgtcgagcagcagcaacagcagtgccggccaagcagccagcagcaacagcaacaatgtgactgcaacaggatcggggtcggctcctggcggaggacccacgagtaccgggacgaccagtggcactcagcatggtagtggatcgggggcagctgcagccgttgattcggaaagcgatgacagtgaggtcggtcgactacaggctttgctcgaagcccgaggactgccgccccatttattcggtgcccttggcccaagggtgacacatattctccaccgaaccattggtaacagcagcagttccaaggccaatcaacttctgcaaggattacaatcccacgacgaatcccagcagctgcaggctgccattgaaatgtgccagatgctcgtgatgggcaatgaggacaccctagccggttttccaatcaagcaagtggtacctgctctaatacaactccttcgtatggagcacaactttgatataatgaacaatgcatgtagggcattggcatacatgctagaagctttgccccgctcgtcaggcaccgtggtggaggcggttccagtctttctagagaaacttcaggtcatccaatgcatggatgtggctgagcaaagtttatcggccttggagattctgtcacggcgtcacaacaaggccatcctgcaggcaaacggaatttcggcctgcctcacctatttggacttcttttcgattgtggctcagcgggcagcattggcgattgcggctaattgctgcctaaacatgcatccggaggaattccactttgtggcggaaagcttgcctctactagctcgcttgctctcccagcaagataaaaaatgcattgaaagcgtttgttctgcattctgtcgtctagtagagagtttccagcacgacggtcagcgcttgcagcaaatcgctagtccggacctgttgaagaactgccagcaattactgctggtaacaccagccatcctgaatacaggaaccttcacagccgtcgttcggatgctaagtctaatgtgttgcagctgtccagacttggcaatttctttactaaggaacgatatagcggccaccctgctttatttgctcaccggaaatgcagagccggctgctgccagtgctacccacgtggagctgatctcacgctcgccttcagagctgtacgaacttacctgcctcattggggagttaatgccgcgcctacctttggatggaatctttgctgtggactcactgctggacagaccaacgcttaatacccaggaccaggtgcattggcagtggcgcgatgatcgcggctcctggcacaactattctacaattgattcgcgcctgatcgaggccgccaaccagagcagcgaggacgagataagcctaagcacctttggacgcacctacactgtcgattttcatgccatgcagcagataaatgaggacacgggcactacacgacccgttcaacgtcgtcttaaccataactatgtggctcccatgtctgcgggccaggacttgactacaacatcggctggatcggcggccgcgggaggagcttccacgtccgctgcagcagcggcagcgtcctccaacaacaataacaataataataataatccaccaggcaatagtgtcaacctcaatcaagtaaagcgccgtccatctctggatgctagaatcgcatgccttaaggtaagaaataaaatgttttgtttattcacacgttacactcttaaattaaataatttgcctaattataacgttttttttatgaaatattttcgacgacattcgtaaacaactaaaaattgagttcattctaacgtttagatcttatgcatttccaggaggagcggggtctggctgcggactttataaaacacatctttaacgtactgtacgaagtatacagctcttctgccggaccaaatgtgcgttacaaatgcctgcgcgcccttctgcggatggtgtactatgccacgccggagttgttgcgtcaggtgctgaagtatcagctcgtctctagccacattgctggcatgctaggaagcaatgatttgcgcatcgttgtgggagctcttcaaatggctgagatcttaatgcgccaacttcccgatgtctttggcacgcactttcgtcgtgagggagtgatctaccagtttactcagctcactgatccaaataatccgatatgcgcgaatccctcgccgaaaccgcttagcgcaacagcaacgcccaccgcaaatgcaggcggatcacaatcggctcctgcctccgccaacagcctgcaagtaaatccatttttcatggatagtgctccgggtttgtcgagtgcttccacgactcccagcagtagcaagcatcaatcgtacagtgtgaagagcttctcacatgccatgaacgccctaacagccagcgccaaaggaactccttctggagcgttggacgccacaagctcatctaccacagctggtggttataattacagcagctcggcaccgtcttcttcctccggagcacccgctgcctactttgtgacccaacagggagatccacgccagtacgtccactttcagcagccggccgttccagcaccaccaccgcagcaggaactgttaccatcaggagttcagcaacaagggcagcaggtgcctcaggtgatctaccagccacatcatcaacagcctgcacacttagtgctggcctccaccagcagtggcgctgcctcgtcgtcttcgtcttcgtcctcttcgtcctcggcctctgcactgcagcacaagatgacagacatgctaaagcgaaaagcgcctccgaagcgtaaatcgcaaagcggtggcagggcaaaatctagacaagaagatgcagcagtcgcaccagcgggatctggaccagggggagcgcctccttcttcatccggctcagctatgcatgaacttcttagccgtgctacaagtaagtatattttccaatgatcgtctaactttgtaggatatatgggtcgtatgtaaatagctttttgtctaacccattcttttgctatttcaggtcttggtagcgggaacggtggcaggagtacgccaaattcgggaggtggctctggaagctccaagtcccggtttaacgccggaaactcgtccaatgccggatcgagcaaatcttcgttcttggcatcgcttaatccagctcgctggggccgtcaaactcatcaaaatcatcaccatcaccaccagcagtcccagcagcagcatcatggtctttctaaagattccggcaactcgaactcaacaggttccggctccggagctggtttagcatacacggtgagccaacatggcgctggtagtggagccggaggactgaacgctgcagccgttgcggcgagtataagtaagagcatttcccacgccaatctcctagcggcggccaacagagagagggcgcgtcagtgggtccgcgaacaggctgtggattttgtaaagcgttacactgagcaggaggccaaaaggagcaaggcggcatccgagagtggtgccactcagagcgggagtagtggagtgggattatcgtcgacgggcaatactccattgtccacagcgggcagtaccaatgtcctagagcgtttgtccagcattctgtttaagcttaacgggagctaccacgactgtttagatgctctcctcgagctaaagaccattcttttggagagtgacatctctccctttgaggtaaatcattcgggcctgatcaaagccatgctcaactatatgactagcgagactggactggttgagcgcgatgcacgtctgcgcagctttatgcacgtattcgctggccttccattagagcctctgctgcaaaacgtcggccagatgccaactatcgagccgatagccttcggagcctttgtggccaagctaaatggttgtgtcacgcaactagaacagtttcctgttaaggtacacgactttcctgccggtcctggtggaaggtccaatcagagtgctctgcgtttcttcaacacccatcagcttaaggtaagtagaaggaaattgaaagtaattacatttttctttgcaaggaaatttgaaaacaaaatgatgcaattttccacttgttgaattcaactgaattttttccttagtgcaacctgcaacgccatccgcagtgcaataacctacgtcagtggaagggcggaactgtaaagatcgaccccttggccatggtccaggccatcgagcgttacctggtggtgcgcggctatggtggcattcgtgcagactccgacgacgacagtgaagaggatatggatgacaatgtggcggcagtggtgttgtcccaggcgagctttagacacaagttgcagtttacgattggggatcacgtgctgccctataacatgacggtttatcaggcggtcaagcagttctcgccactggtcagtgaacaacctgagacggacaacgagtcggagactcttttaggaaacgctagtatatgggtgcagcagcatactattcactatcgtcctgtagaggaggaagtgacttcgggagcggctgcgggagcagcatccagcagcagttcgtgtagcagtggcgtgcaaaaacagcagagctcttcaagctccgcatccagctgtgtaaacgctacctcttcgtgctcctcatcttctggagtggcaagcggtggcgggtcgttaacaaagaaggctcacaaatctagcagcaagttcatgcgcaagaagactgagctatggcacgaaggaatagctcctgtagtgatttcagctctaaagcctttccttagcagctctcttccagctgatgttgtgaccgtacaagacgcctcattggatgcactgtgtatgctgcgagttattcatgctctaaatcgtcactgggaccatctctacggttgtgtggtgcgccaaaacattattccccagtcagactttatacatcctaagattatggccaaggcgaatcgtcagctgcaggatccgcttgtcatcatgacaggcaatctaccacagtggcttccccagataggcatggcctgtcccttcctcttcccattcgagactcgtcacctgcttttctacgcaaccagctttgatcgggatcgcgctttgcagcgtctgttggacactacccccgatcttaatgcagcggagtcttcagagcgcgtggctcctcgccttgatcgccgcaagcgagcgatttcccggacagagatactcaaacaggcagagcacatcctacaggactttgggcactcgaaggcactgctggaaattcagtacgagaatgaggtcggaacgggtctgggacctacattggaattctacgctttggtttctgctgagctgcagcgtaccgaccttggcctatggaatggcagtgatagctacaaacagaactctgtgaccattgtagacgtagtcaaggccaacagcgctgtgctgcacatcgaggatgctcttgaggcaaccaccacggaccagaacactccagcagtagcaggagcgtcgcttgtgagcagcagcaccaccactacaacaacaaccgcacaacaacaccagcatccgcccacacgctctagcagtcgttcgcacgtcttgcgtagcggagctggccaacagccggtggagcacagctcctctagcgccggcgccaatgagaatgctttaaatatggttatagcacagcaatttagtgatacaaactctgctaacccagcagcgattgataatcccagcagcaccactaccgcaacaacggttgtacagcataataccactacgaataactcaagcattatcacgactacaaccacgacgagttatgtgcatgcggtgcatggcctgttccctttgcctctgggtaaatcttcgaagcttccgcagatgactaaggccaaggccaaattcaaattcttgggaaagttcatggcaaaggcggtgatggacagtcgcatggtaagataattttgcaaaaatatttttgaattcctttgtattgacttttctgttttgttttagttggatttgccattttctttgccattctatcgctggttagtcagcgaagagcattcaatcggcctggccgatctgatgcgtgtggccccggaggtccaaaacactctagtgcgactccaagacttggttcgccagcgggagtacattctatccgatccaaacatcgatgccatggaaaagactgaaaaggtaagttacgcttttaccaagtaacaaattaagtattttaaaatcatttttgtccttttttgattagtattttatacatttcataaatgtacttatttttttcagattgaacagctagacttggatggctgtcccattgctgacctaggcttggactttgtattgcccggacatgccaatatagagttgtgtcggggcggtcgcgatacacctgtcactgtgcacaaccttcaccagtacatctccctggtcacatactggttccttatcgagggtgtccagaaacagtttgaggctttgcgtgaaggtaagtcaaggttcaacacactaaagagctctttcactaatttcctggaactttactgaaaaaatgtttgcctttaccacgcgtaggttttgattccgtttttccaatccaacggttgcgaatgttctatccagaggagttggagtgcgttttctgtggatcgggcagcgagcagcagcattcgcgatgggaaatcaagatgctgcaggagagctgccgcactgatcatggattccaccaggactcgcaagctatccaatatctgtatgagatcctggcctcttacaaccgcgacgaacagcgcgccttcttacagtttgtgactggatcaccacgccttccgactggaggattcaaggcccttacgccaccactgactattgtacgcaagacgttggatgagaaccaaaaccctaacgattacttaccatctgtgatgacctgtgtcaactatctaaagttgcccgactactctagtcgcgaggtgatgaggcagaagctgaaagtggctgctaacgaaggcagcatgtctttccacctctcataagcaagcaacaaaccaaaacccaaccgaaccccgctttccacaaacaaccagatttacagcaacacaaatcggaaactacaaaaatactacatggaatatattaaggagggtatattccggatggattaattggatgggggtcctatttgcattttttctttcgatcgttagtttcgccgcgcgcgttttcccaagctccttaaatttttcattttggcaagcgcgtgtcatactaaatttcaatataaatatataagtataatatattttttattaccaagttttgcaaaaaagttaaacggaaacacggataacatcgagaaagaaaataatgatggacctctcacacaaaatgttacctttaaaaaatttgaatagtaaacatcgattattcaataaaagaccatttgtccacccataaacgcacaaagcggtatatttgtcgattagggctttgcattcgttctagttaaatttgtttagtttgcttttcccattcttattatcctcaagcaaattctaactcatattattcataatcaaaccattattttattaagtttttatttgttatgttgaactatttctctggcgtttaactatgagtttaattatttgtaagcatacaatgtgcataaacgcttattagaaagaaacgtgaatgaaaatacaatgaaggggaaacactgaagcattggaggtgaggagtaacacttatatggaaaagaaagaattcataatgttttacatataactcccaaaataaatgatctgaataaattaaagcgcccaccctgaaaagttacatataaagatttaataatatataaaacgtaattatctatcttgcaagtctaagagaaaatttaatgcaaattttgcaagctgtgttacataaagaaacaaataaaaacaaatgccatcattgggtgtatgtttaattaaaggatgagaaatggattaagggaaagcggacaaaacgaagtttgtgtttagtacacatcccctttacataatctatgcttatatatgcttttatatatatatatatatatatatatatatatatatatatatatatatatatatatttaaactgtaacattgtataacttctattgtacttgatgcatacgcatacgaaagagaccagaatgctggtaataaaaattgattaacatttaaaccgagaagcgaaatcgatcttacattaaaactagatacaaatctttgcagtactgaaaaactgattacagacatgtggtatatatacatataactttaaaatcatatatatatatatataaataatataattatacttaactgaaagcattggcatctcgcgagatgctggccaagctaaaatgtaaaacgcta

SEQ ID NO: 21278 - DNA, 6942 bp, DROSOPHILA
atggcacaacaaccgccaagtggaccgccgcatgcaggtggacagcaaataacgccaggtgcaaactctgcaaatctaagcattgtagcggccgctttgagcgccgctcgtgacgtcgggggaggatccgacggaggaggatcagcgggaggcgcaacgccagctactggagcatcggcttcatccgtaggaaacaccagcgccgtgggcgcgtcgagcagcagcaacagcagtgccggccaagcagccagcagcaacagcaacaatgtgactgcaacaggatcggggtcggctcctggcggaggacccacgagtaccgggacgaccagtggcactcagcatggtagtggatcgggggcagctgcagccgttgattcggaaagcgatgacagtgaggtcggtcgactacaggctttgctcgaagcccgaggactgccgccccatttattcggtgcccttggcccaagggtgacacatattctccaccgaaccattggtaacagcagcagttccaaggccaatcaacttctgcaaggattacaatcccacgacgaatcccagcagctgcaggctgccattgaaatgtgccagatgctcgtgatgggcaatgaggacaccctagccggttttccaatcaagcaagtggtacctgctctaatacaactccttcgtatggagcacaactttgatataatgaacaatgcatgtagggcattggcatacatgctagaagctttgccccgctcgtcaggcaccgtggtggaggcggttccagtctttctagagaaacttcaggtcatccaatgcatggatgtggctgagcaaagtttatcggccttggagattctgtcacggcgtcacaacaaggccatcctgcaggcaaacggaatttcggcctgcctcacctatttggacttcttttcgattgtggctcagcgggcagcattggcgattgcggctaattgctgcctaaacatgcatccggaggaattccactttgtggcggaaagcttgcctctactagctcgcttgctctcccagcaagataaaaaatgcattgaaagcgtttgttctgcattctgtcgtctagtagagagtttccagcacgacggtcagcgcttgcagcaaatcgctagtccggacctgttgaagaactgccagcaattactgctggtaacaccagccatcctgaatacaggaaccttcacagccgtcgttcggatgctaagtctaatgtgttgcagctgtccagacttggcaatttctttactaaggaacgatatagcggccaccctgctttatttgctcaccggaaatgcagagccggctgctgccagtgctacccacgtggagctgatctcacgctcgccttcagagctgtacgaacttacctgcctcattggggagttaatgccgcgcctacctttggatggaatctttgctgtggactcactgctggacagaccaacgcttaatacccaggaccaggtgcattggcagtggcgcgatgatcgcggctcctggcacaactattctacaattgattcgcgcctgatcgaggccgccaaccagagcagcgaggacgagataagcctaagcacctttggacgcacctacactgtcgattttcatgccatgcagcagataaatgaggacacgggcactacacgacccgttcaacgtcgtcttaaccataactatgtggctcccatgtctgcgggccaggacttgactacaacatcggctggatcggcggccgcgggaggagcttccacgtccgctgcagcagcggcagcgtcctccaacaacaataacaataataataataatccaccaggcaatagtgtcaacctcaatcaagtaaagcgccgtccatctctggatgctagaatcgcatgccttaaggaggagcggggtctggctgcggactttataaaacacatctttaacgtactgtacgaagtatacagctcttctgccggaccaaatgtgcgttacaaatgcctgcgcgcccttctgcggatggtgtactatgccacgccggagttgttgcgtcaggtgctgaagtatcagctcgtctctagccacattgctggcatgctaggaagcaatgatttgcgcatcgttgtgggagctcttcaaatggctgagatcttaatgcgccaacttcccgatgtctttggcacgcactttcgtcgtgagggagtgatctaccagtttactcagctcactgatccaaataatccgatatgcgcgaatccctcgccgaaaccgcttagcgcaacagcaacgcccaccgcaaatgcaggcggatcacaatcggctcctgcctccgccaacagcctgcaagtaaatccatttttcatggatagtgctccgggtttgtcgagtgcttccacgactcccagcagtagcaagcatcaatcgtacagtgtgaagagcttctcacatgccatgaacgccctaacagccagcgccaaaggaactccttctggagcgttggacgccacaagctcatctaccacagctggtggttataattacagcagctcggcaccgtcttcttcctccggagcacccgctgcctactttgtgacccaacagggagatccacgccagtacgtccactttcagcagccggccgttccagcaccaccaccgcagcaggaactgttaccatcaggagttcagcaacaagggcagcaggtgcctcaggtgatctaccagccacatcatcaacagcctgcacacttagtgctggcctccaccagcagtggcgctgcctcgtcgtcttcgtcttcgtcctcttcgtcctcggcctctgcactgcagcacaagatgacagacatgctaaagcgaaaagcgcctccgaagcgtaaatcgcaaagcggtggcagggcaaaatctagacaagaagatgcagcagtcgcaccagcgggatctggaccagggggagcgcctccttcttcatccggctcagctatgcatgaacttcttagccgtgctacaagtcttggtagcgggaacggtggcaggagtacgccaaattcgggaggtggctctggaagctccaagtcccggtttaacgccggaaactcgtccaatgccggatcgagcaaatcttcgttcttggcatcgcttaatccagctcgctggggccgtcaaactcatcaaaatcatcaccatcaccaccagcagtcccagcagcagcatcatggtctttctaaagattccggcaactcgaactcaacaggttccggctccggagctggtttagcatacacggtgagccaacatggcgctggtagtggagccggaggactgaacgctgcagccgttgcggcgagtataagtaagagcatttcccacgccaatctcctagcggcggccaacagagagagggcgcgtcagtgggtccgcgaacaggctgtggattttgtaaagcgttacactgagcaggaggccaaaaggagcaaggcggcatccgagagtggtgccactcagagcgggagtagtggagtgggattatcgtcgacgggcaatactccattgtccacagcgggcagtaccaatgtcctagagcgtttgtccagcattctgtttaagcttaacgggagctaccacgactgtttagatgctctcctcgagctaaagaccattcttttggagagtgacatctctccctttgaggtaaatcattcgggcctgatcaaagccatgctcaactatatgactagcgagactggactggttgagcgcgatgcacgtctgcgcagctttatgcacgtattcgctggccttccattagagcctctgctgcaaaacgtcggccagatgccaactatcgagccgatagccttcggagcctttgtggccaagctaaatggttgtgtcacgcaactagaacagtttcctgttaaggtacacgactttcctgccggtcctggtggaaggtccaatcagagtgctctgcgtttcttcaacacccatcagcttaagtgcaacctgcaacgccatccgcagtgcaataacctacgtcagtggaagggcggaactgtaaagatcgaccccttggccatggtccaggccatcgagcgttacctggtggtgcgcggctatggtggcattcgtgcagactccgacgacgacagtgaagaggatatggatgacaatgtggcggcagtggtgttgtcccaggcgagctttagacacaagttgcagtttacgattggggatcacgtgctgccctataacatgacggtttatcaggcggtcaagcagttctcgccactggtcagtgaacaacctgagacggacaacgagtcggagactcttttaggaaacgctagtatatgggtgcagcagcatactattcactatcgtcctgtagaggaggaagtgacttcgggagcggctgcgggagcagcatccagcagcagttcgtgtagcagtggcgtgcaaaaacagcagagctcttcaagctccgcatccagctgtgtaaacgctacctcttcgtgctcctcatcttctggagtggcaagcggtggcgggtcctgatgttgtgaccgtacaagacgcctcattggatgcactgtgtatgctgcgagttattcatgctctaaatcgtcactgggaccatctctacggttgtgtggtgcgccaaaacattattccccagtcagactttatacatcctaagattatggccaaggcgaatcgtcagctgcaggatccgcttgtcatcatgacaggcaatctaccacagtggcttccccagataggcatggcctgtcccttcctcttcccattcgagactcgtcacctgcttttctacgcaaccagctttgatcgggatcgcgctttgcagcgtctgttggacactacccccgatcttaatgcagcggagtcttcagagcgcgtggctcctcgccttgatcgccgcaagcgagcgatttcccggacagagatactcaaacaggcagagcacatcctacaggactttgggcactcgaaggcactgctggaaattcagtacgagaatgaggtcggaacgggtctgggacctacattggaattctacgctttggtttctgctgagctgcagcgtaccgaccttggcctatggaatggcagtgatagctacaaacagaactctgtgaccattgtagacgtagtcaaggccaacagcgctgtgctgcacatcgaggatgctcttgaggcaaccaccacggaccagaacactccagcagtagcaggagcgtcgcttgtgagcagcagcaccaccactacaacaacaaccgcacaacaacaccagcatccgcccacacgctctagcagtcgttcgcacgtcttgcgtagcggagctggccaacagccggtggagcacagctcctctagcgccggcgccaatgagaatgctttaaatatggttatagcacagcaatttagtgatacaaactctgctaacccagcagcgattgataatcccagcagcaccactaccgcaacaacggttgtacagcataataccactacgaataactcaagcattatcacgactacaaccacgacgagttatgtgcatgcggtgcatggcctgttccctttgcctctgggtaaatcttcgaagcttccgcagatgactaaggccaaggccaaattcaaattcttgggaaagttcatggcaaaggcggtgatggacagtcgcatgttggatttgccattttctttgccattctatcgctggttagtcagcgaagagcattcaatcggcctggccgatctgatgcgtgtggccccggaggtccaaaacactctagtgcgactccaagacttggttcgccagcgggagtacattctatccgatccaaacatcgatgccatggaaaagactgaaaagattgaacagctagacttggatggctgtcccattgctgacctaggcttggactttgtattgcccggacatgccaatatagagttgtgtcggggcggtcgcgatacacctgtcactgtgcacaaccttcaccagtacatctccctggtcacatactggttccttatcgagggtgtccagaaacagtttgaggctttgcgtgaaggttttgattccgtttttccaatccaacggttgcgaatgttctatccagaggagttggagtgcgttttctgtggatcgggcagcgagcagcagcattcgcgatgggaaatcaagatgctgcaggagagctgccgcactgatcatggattccaccaggactcgcaagctatccaatatctgtatgagatcctggcctcttacaaccgcgacgaacagcgcgccttcttacagtttgtgactggatcaccacgccttccgactggaggattcaaggcccttacgccaccactgactattgtacgcaagacgttggatgagaaccaaaaccctaacgattacttaccatctgtgatgacctgtgtcaactatctaaagttgcccgactactctagtcgcgaggtgatgaggcagaagctgaaagtggctgctaacgaaggcagcatgtctttccacctctcataagcaagcaacaaaccaaaacccaaccgaaccccgctttccacaaacaaccagatttacagcaacacaaatcggaaactacaaaaatactacatggaatatattaaggagggtatattccggatggattaattggatgggggtcctatttgcattttttctttcgatcgttagtttcgccgcgcgcgttttcccaagctccttaaatttttcattttggcaagcgcgtgtcatactaaatttcaatataaatatataagtataatatattttttattaccaagttttgcaaaaaagttaaacggaaacacggataacatcgagaaagaaaataatgatggacctctcacacaaaatgttacctttaaaaaatttgaatagta

SEQ ID NO: 21279 - protein, 1518 aa, DROSOPHILA
MAQQPPSGPPHAGGQQITPGANSANLSIVAAALSAARDVGGGSDGGGSAGGATPATGASASSVGNTSAVGASSSSNSSAGQAASSNSNNVTATGSGSAPGGGPTSTGTTSGTQHGSGSGAAAAVDSESDDSEVGRLQALLEARGLPPHLFGALGPRVTHILHRTIGNSSSSKANQLLQGLQSHDESQQLQAAIEMCQMLVMGNEDTLAGFPIKQVVPALIQLLRMEHNFDIMNNACRALAYMLEALPRSSGTVVEAVPVFLEKLQVIQCMDVAEQSLSALEILSRRHNKAILQANGISACLTYLDFFSIVAQRAALAIAANCCLNMHPEEFHFVAESLPLLARLLSQQDKKCIESVCSAFCRLVESFQHDGQRLQQIASPDLLKNCQQLLLVTPAILNTGTFTAVVRMLSLMCCSCPDLAISLLRNDIAATLLYLLTGNAEPAAASATHVELISRSPSELYELTCLIGELMPRLPLDGIFAVDSLLDRPTLNTQDQVHWQWRDDRGSWHNYSTIDSRLIEAANQSSEDEISLSTFGRTYTVDFHAMQQINEDTGTTRPVQRRLNHNYVAPMSAGQDLTTTSAGSAAAGGASTSAAAAAASSNNNNNNNNNPPGNSVNLNQVKRRPSLDARIACLKEERGLAADFIKHIFNVLYEVYSSSAGPNVRYKCLRALLRMVYYATPELLRQVLKYQLVSSHIAGMLGSNDLRIVVGALQMAEILMRQLPDVFGTHFRREGVIYQFTQLTDPNNPICANPSPKPLSATATPTANAGGSQSAPASANSLQVNPFFMDSAPGLSSASTTPSSSKHQSYSVKSFSHAMNALTASAKGTPSGALDATSSSTTAGGYNYSSSAPSSSSGAPAAYFVTQQGDPRQYVHFQQPAVPAPPPQQELLPSGVQQQGQQVPQVIYQPHHQQPAHLVLASTSSGAASSSSSSSSSSSASALQHKMTDMLKRKAPPKRKSQSGGRAKSRQEDAAVAPAGSGPGGAPPSSSGSAMHELLSRATSLGSGNGGRSTPNSGGGSGSSKSRFNAGNSSNAGSSKSSFLASLNPARWGRQTHQNHHHHHQQSQQQHHGLSKDSGNSNSTGSGSGAGLAYTVSQHGAGSGAGGLNAAAVAASISKSISHANLLAAANRERARQWVREQAVDFVKRYTEQEAKRSKAASESGATQSGSSGVGLSSTGNTPLSTAGSTNVLERLSSILFKLNGSYHDCLDALLELKTILLESDISPFEVNHSGLIKAMLNYMTSETGLVERDARLRSFMHVFAGLPLEPLLQNVGQMPTIEPIAFGAFVAKLNGCVTQLEQFPVKVHDFPAGPGGRSNQSALRFFNTHQLKCNLQRHPQCNNLRQWKGGTVKIDPLAMVQAIERYLVVRGYGGIRADSDDDSEEDMDDNVAAVVLSQASFRHKLQFTIGDHVLPYNMTVYQAVKQFSPLVSEQPETDNESETLLGNASIWVQQHTIHYRPVEEEVTSGAAAGAASSSSSCSSGVQKQQSSSSSASSCVNATSSCSSSSGVASGGGS

SEQ ID NO: 21280 - DNA, 3337 bp, DROSOPHILA
ttgggcttgcaactcctaatatccaaaatattataaaagtgctggtatacattttatatatatttaatttactttggtgtaatataaaaataagtttaatattcaggatgcaagaacggtgatcttaaaacgctattcactgaagtttcttctaagttcgatttttaacgcattagcttccgcagaaaatcaatgaggcagttttatgctttcccattttaacgtatctaatcaattcttttaatttcacagtttagctataaaaaatagaattgtaaaatgaatattaaatcctattaaaactaaaaatacaaatagtctaatgtaatccttaagctaggtacatagttcagatgatcgagcctacgagattgatttatgaatttatttaatctattaaattttgttgggttaaataactagtttattgttataaaatatatttaaaatctgtagatttttttttcattattaaacaatttgaatcgtagtgaaggtaaccccataaccacataattataccagttagtcgtagagtaattatattcaccaatatctatcgatacgccaattaaaaattaggaaacttcgcgttcgcacttccactagctaagtaacgagtatctgatagtcgtgaatttgactattgcattctctctagttttgaaatttatttgtaaataaacaaagaaggaattgcattgtactaagttcttttaccagatctgtgtagctactcatatggccatattttttatttttcgttctatatttttccccactcattttctatagttacaaaacaaaatttttgctgtgcacctctactagctcgaaacgggtatctagtagtcgaggctctcgttcttgtattgtacaaatacataagttggcaattaaggtgcgaaaaattcgtttttgtatgcatattacttaagatctttgcgtgtcgaaatcatactgattcaaaaaaaagttcaccaaaagtaagtagttgaagatgaaagtggtcggcagtttgcatatcctctattcgctggcgatcctagtatccctacattctctcgtcgcgggaaactcttcggtggtggcggtgacccacgaaaacttgcaaggaataatcgattctaatgagttggttctgcttagtttttacacggattggtgccgttttagccagattttgcagcccatttttgaggaggcggcggcgaaggttatacagaaattccctgaaaacggccgtgtgatcctgggaaaagtaaactgcgacactgaagatatattggccgatcagtttgacatacttaagtacccaacgataaagatcgtcaggaatggattgattggcaatcaggaataccgtggccagagatcggtggaggcccttttccagttcgtggaaaaggagctatcagatccaatcaaagagttccataacattgatgaccttaaaaacgtggatgttgggtatggaatagtcattggttatttcatttccaaggatcatgctgagtatgataactatcgcagggtagcgagccttttgcgcaacgattgtaggtaagtttaatgtatccattgaacaactcataatcgatcaatatctgtaaaacaatttgtggagcttttgtaaacaaatctattaaatatatatctaattacaggttccttgtgggctttggtgacttgactaaggacctccgaccgccaggaaagaacgcgttgatcttccgaggcgatccatcgattccgaatcacaaaaaccagtacagtgagtacttgggcaacatgaccagctttaaagaactaaccttttggatcgataagacgtgtgtgcccctggtgcgagaggtcaccttcgataatgcagaggaactatcggaggaaggattaccatttgtattgctattttacaacaaggacgatctaagtcccatccaggagttcaagaacgcaattcaaagccagatggaaaatgagacgagggttattttcctgactgccgaaggagaagtctttaagcacccacttttccatttgggaaagtccccgagtgatttgccagtgatcgcaatcgattccttcatgcacatgtacctatttccacgcttccaggacatttacgatccaggtgccctcaaaaagttcattgatgacctgttcagcggtgcactgcattataattaccatgtggcccagcaggctaaggaagatttggagtccattatcgatccaactgaagacctgccagtcgttcacgagtccaagtttaaggacctcaagccatccaagcaccgttacacgttggtcaaccgcacaagggacgagctataatattatcctactctaccataatctttgctcatgcttaggtgtaatcatttaatatcggtttaagtcagattcttaaacgtaagaatattaatttatttaacttgacgctcaaataaaattaatttgatatcagttgtggtgttatcttgagcaaataatatggtataatatcccccatcggatacaatccgttctccgactatgaagtaaaatattttcacaagcccatcgccgacttcaccagcattgaatgccccattttggacgctgtgacaaatcgcacacccatcatatatgggcatctcatcagatagtcaggagatgacacgtgcctcgatatcgatatttcctggaagatcgcctcaatccagaacaggaacgtcgatttcatttgaatatgctttgccgactgctctacaccagaccatataaacactaataaactcattagtcaagcatcttacaagcaaatctcacaggtgcaaaatgccaatacaataaaattgcagttctctttgcaatctaagtacagtgaagtggaaacaggacaattttgtatatctttgaaacttaaaatatcagtaaaaatatcaataaaaatataaatatattttttttaacaacaagtatttaaaaatgttgaccgtaccgaaccgatgtattctttaaactactaaaaatttaacgacataaattccaattgatttattattaaaagataaagtgcacaatttgcattttcgttgacagcttaccacatgtattctaacatctgatcgcatcacaatgttaaattctcgagggagtatcgcgtccttccttttcagggtctaggcttggtgcttacacttctactccaatattgtcataattaataatatctttatggtcatatgccagcgcaaaatcgagcgtgactcgcgatgaagtatctgccacagcggcgagtgcagctgcaggtgcaactgcctctaatcagcgtcagcagcgcgtgccactc

SEQ ID NO: 21281 - DNA, 1233 bp, DROSOPHILA
atgaaagtggtcggcagtttgcatatcctctattcgctggcgatcctagtatccctacattctctcgtcgcgggaaactcttcggtggtggcggtgacccacgaaaacttgcaaggaataatcgattctaatgagttggttctgcttagtttttacacggattggtgccgttttagccagattttgcagcccatttttgaggaggcggcggcgaaggttatacagaaattccctgaaaacggccgtgtgatcctgggaaaagtaaactgcgacactgaagatatattggccgatcagtttgacatacttaagtacccaacgataaagatcgtcaggaatggattgattggcaatcaggaataccgtggccagagatcggtggaggcccttttccagttcgtggaaaaggagctatcagatccaatcaaagagttccataacattgatgaccttaaaaacgtggatgttgggtatggaatagtcattggttatttcatttccaaggatcatgctgagtatgataactatcgcagggtagcgagccttttgcgcaacgattgtaggttccttgtgggctttggtgacttgactaaggacctccgaccgccaggaaagaacgcgttgatcttccgaggcgatccatcgattccgaatcacaaaaaccagtacagtgagtacttgggcaacatgaccagctttaaagaactaaccttttggatcgataagacgtgtgtgcccctggtgcgagaggtcaccttcgataatgcagaggaactatcggaggaaggattaccatttgtattgctattttacaacaaggacgatctaagtcccatccaggagttcaagaacgcaattcaaagccagatggaaaatgagacgagggttattttcctgactgccgaaggagaagtctttaagcacccacttttccatttgggaaagtccccgagtgatttgccagtgatcgcaatcgattccttcatgcacatgtacctatttccacgcttccaggacatttacgatccaggtgccctcaaaaagttcattgatgacctgttcagcggtgcactgcattataattaccatgtggcccagcaggctaaggaagatttggagtccattatcgatccaactgaagacctgccagtcgttcacgagtccaagtttaaggacctcaagccatccaagcaccgttacacgttggtcaaccgcacaagggacgagctataa

SEQ ID NO: 21282 - protein, 410 aa, DROSOPHILA
MKVVGSLHILYSLAILVSLHSLVAGNSSVVAVTHENLQGIIDSNELVLLSFYTDWCRFSQILQPIFEEAAAKVIQKFPENGRVILGKVNCDTEDILADQFDILKYPTIKIVRNGLIGNQEYRGQRSVEALFQFVEKELSDPIKEFHNIDDLKNVDVGYGIVIGYFISKDHAEYDNYRRVASLLRNDCRFLVGFGDLTKDLRPPGKNALIFRGDPSIPNHKNQYSEYLGNMTSFKELTFWIDKTCVPLVREVTFDNAEELSEEGLPFVLLFYNKDDLSPIQEFKNAIQSQMENETRVIFLTAEGEVFKHPLFHLGKSPSDLPVIAIDSFMHMYLFPRFQDIYDPGALKKFIDDLFSGALHYNYHVAQQAKEDLESIIDPTEDLPVVHESKFKDLKPSKHRYTLVNRTRDEL

SEQ ID NO: 21283 - DNA, 10444 bp, DROSOPHILA
tgtttattgtatcgagcgcaagtaattcgaagatattaacacaacattaatttcacttgcagtccgcaattgtttttggtttcccttatcagtggatgacgtaaataaataacttgtatcacttactttgcgttgttgtgtgctgaaatagaagaataagccgaaatcgctttgtttggattcgatttctcgctctcctccactttctctctctttgattttcctagattttctgtgattttcctacgcgtacacgaaactataacaaacgtgtgcaaattgaggagtcgcccgattttttgatcatagcagctgtttttggtttttgctcacggatttcagctaacaacacatgatgtttttctcttttcgtggcgggggggcttaactctataatgtggatataactttatattatctgaacgatttcagcgccgcaggggcttccgatccccttgaaactgtgagttgcattattttgttatctatatatccactgaccgattctagcgagggatgtgaaaagtatttgaatgtcaagatatcgataggtttttgatgaagtaaatattttcacaatgctaaatgcctaaagcacttaaaaatagtagatgcctttttagatatatactacatactacttacttacacgcacttaaaatacaagttttatatttgatatttgagcgcattctcacaggttggcaacgcgaacagctgatttttagggtgaccgtcttccgcaacagagtatctcacagttttcgaaaagtatctcagcaatttaggcaaagtttctgaactttcagttactacttaataaaaagtttgttggttgtttacctagctcaagagattctttcagatttaatttaataaaaccggtagcttaggattataaaattaactttgactttatttaatgtccctcccgcgcgaatgcagcttagtaaaaatgagtcatagtgttcagatctgcctacattccagaagcttgcagtattcagtagacatcagtcgagcgcagaagctcttcgtgataagacgtcttcaattcaaattttttttatcgaacacaccatggagggggacaaggtagtttttcatagttctgatctaccatacgaatatttatacgacgacgaaaaacacgtttcgcacatgccggattccaaattaagtgtacgaaatattttggattcagcttacgcttctgctgaaggcaaaattataactaggaaactttcgcgcagcattccgccgtatccgcatgctgttcgagtaaaaaatggcattcgtgtttatgaatacagtgagcccagaaaacagagctacaaatcaagtttatggaaggaggcctacaatgtgagtaggaatcgaagaacacatgctggacattttacttgctttatttcagatactccaccagcggttggatattgccgagccaatcgcagcaaaggaacacgtgagaacgcagatacatccgtgtctgcacaagatcaaaggacttctagatccggaaacctgcatcaagtgtccgcggtgtcataagtccatttcgtccaccaaagttgtgaaaagctttgcatagtgacgaatgcaagccaccttcaacatatatatctattatagaggttcaatatatgctcaaatcaacacatgcatttatatatatatataatataaacaaagaatgcaacagccctacagatgaatcgtcattttcttctgtcattttgctagctgtaattaaaagggaacgggaaatgtgctctcgcttactgattatagataatgactttgattttgaaataaggaatgcaaagaatactcattttcgtattcacttccattttggcggactttctttatcagtaaacaaagtggaagaagaagaaacgagaaaggtaaacaagtcaatacaaaacagttgtttggaaaatgtgccatagttaccaagtgcctgcaccaattttaatatcaaaaccaattattgaaactagttatataagtatttttatttacattcaatgcatttataaataaaataaatcaaataatttaagcttactaaatcaatcagcttgtgacagccatcactttgataacgatagttggcaactctgccatcgaacagctgttaatgtttgccattttggcgcgaaaataccagtgtaacaatttgtttatatataataggattttattaagttgtttgttggacgctcgtttgaaaccagtatggatcagtatccggacgaaaacgaggagttcgagctgcaataccaagacgaactagagctgctggaggacttgccggacgagtttaacgcgtacgatggaccgagcacatccaaacaggccgctgaaaagcaaaaggaaaacagagctcccgttgcggcactaagagatagcacccgtcttggaaactctacactgggatcgccacagctgtcgcagattacctttggagctagccagttgggtggggaagaggaggcagaaggaacttcatctggaggccaggtcaatcggcgcctttttggaacgcccaaaggtccaccggtgggcagagggtgctcgacaccctttcagcgaatgcccgccatccaggagctggaaaatacacaactaacaagccgctcctatggcctggaaaaggaaaatgcagcagctaatcagctgcaggaagtgggtctcaaaaatgtcaataagcgccgcctggaacgcgatctcttcggggacatagatgacctttttcacgagtcttacgaagatcccatggtgaagaaagcccgaactgaggagcaacgagatcacgaggccatcgaaagaatcctcgagctgcgacgcaaaatgcgagaatcaagcaagactctgcgaaaggacgacgttagtcgcctcaaggcactgcacgatttcaagatgagaaacctatcgtatgagatcccaaactggcctttcctggccattcagcgcagtgatctcgagcggatctacgtaagattccactccgaggactatgaacaaaggcaattggacctgatcagtgccaggggcgaggtggtgggcagtcttttgggtgaggccaaggataagatctggcaggaagccggcgaaatagtaagtatcaggtgatgtcatcgaaaccaagtaatactgtaattttcccctgcaggttttgagtcgcgctacagccgcagaagacgcagatgtaactctcgtaaatagcaacgccaattcagagcccggacgcctttgggtggacaagtacaagccgaggaaatacatcgacctgctctccgatgaaatgaccaacagaagcctgctctactggctgaaaatgtgggacaaagtggtctttggcaaagcctttcacagcaaacgggaacaggaggcggtgactggagagggcggcactgctggcggagctgccaaccagctgaatagcttcaataaacgtacgggcaaattcgaatccaatggcggctggcggcaacgcaaatctcgccaagctctcaacacaaatgtggatgctttgggcagacccatgcagaaggtggcgctgctatgtggtcctccaggtctggggaaaactacactggcgcacacgatcgcccgacatgctggttataatgtccgggagatcaacgcctccgatgatcgcagtccagaggcattcaaactggctttggagaatggcacgcaaatgtcttcggttctgaatgaagacaaacggcccaattgcatagttctgggtgagcaaacatcccttgaaattgtaaagctatatactaaactaatatttctctagatgaaatcgatggcgcgcctcgtcaatctattgattatctggtcaagttcatcagcgatgctgtttacaccaaagttaaagccaagggcgccaaggcagagcacaacgtcttgaagcgacctattatctgcatttgcaacgatgtctacgatcccgccctgcgccctttaaggcaggtggcctttgtggtcacgtttccgcccatcgatgcagcacgtctggcagagaggcaatatcttttatatatatttaaaatatagtatatatgctgaaggcaattatatcttactttcagattagttaagattgccttcaaagagcagcttaagacggactttggttcacttatcgcgctagctgagaaatccggaaacgatgtgaggagctgtatatcatccatgcagttttttaagtgagtaattagcaaatacttactcattactatactaacgataattcaacttgtagtgctcaaaagcacagtcttactctgcaagatgtgctgaacaacaatctgggacaaaaggacaggcatcaaggtctgttcgccgtgtgggatgctatttttcgggtgcgcttttgtatgttgcgtgtttgtggggtgctatttaatgttatttctgttttcagatacaacgtccgcggaaaaccctgcacacagacgccaataaggtcgatgagcccgcccaggttaccatgacaaacacgtctgtgacaacacgagttcgcaatgtactagaggtggtccactctagtggggattatgaaaggtaatcgcacgttaacttatattaaatagacgaatgatatttatattttccttcactctttagactaacgcaaggcgtgtatgagaactacctgcaacagaagatgcccgatccaaactttacgggcgtgtgcgaagccctaaaatggttttgcttcacggatacagtgcagcatcagatcagcagacagcagaactacagtgtgtacccgtacctgcagtacggtttcgtcgcttggcatttgctgttcgccacactggcttggccaaaaatcgcatttcccacgcgtggctttgaggtgagctgctgaaagaaaaagaaacgaaacgatgacgatgacgatgaggagatgatggccccgggccacattatttcttttcaacgcagagagactgcttctttgaggcaggctcatgatttatgcaggcgtcattagccggggcaaacatccccggccaagccctgtggaaagtgcataatcaacacaatcaagccatgtaatttcttgtccattatgtgcctcaaatgcaatcacaagattaatgagactcctgcatagatttcgcactgtttgcccaaggactaacccttctttttgtatccttgcagttccagcagaagagcaccaaccagagaaacatctttcaggccctctgcaaaggtgtcaccacctctgcgctgggtgtgggtcagggcggaactctgcttctcgatacggtgccgctgctaaagaggattctatcgccgcaactgcgctccgtggcggtgcagttgctatcgccaaagtgagtatacccggattaccttggaacattccaataagtgcatatttaaatgacctcagggagcagcaggacttgcgccacaccatcgaggtgatggttgatctcggcctaacgtttgtgcaggtcaagtcccaggaaggacactatgtcttccaaacagaaccggatctcgatgcactcagtgcttttccaggtgcgtctgagacatggatgcaaagcccacttaaatctaaattagtttcaatttatcctcaggttacacaggtctctcgcttccctacttcagtcgacagttgatagcccgcgaggtggacttggaacggatacgacgggctgcccctaagggcggtgcaccctcagctccagccgcaaaaaagaagacatcaggagctgcagcgcagctacccaatcatttgcaaacattgaagccgaaaccaatttcggcctctaatatgcacagtgcacccaagcagcaggtgaatctataagcatttgcatgccttgcatttacttagcagcaatttacttgcaaattctcgccactctcaaaagaagtgcgcatatgcttgggtcaaacctgagttcactttccttcctcctcaaaatggttttcctttgctgtttaagccgaagctttttcctcgtggcaaatccttgcaaagctaataacccataaggggattccagcggtattgtcattggagtcgtaatgtgggatcagcgcaaacgaacatttattgctcgccttaagcgaatgcgacttcgaaagctactttatggtttacttcatgagggctcttacttttgcgctctctctctcttttgtccagaaaaatatcgttcaattaccttaagtatttttttttttttttgaatatttcaaatagcgtttggattatttttgctttcagctaactaaggacttttttggccgcattactcacaaatcgacttcgacaaactcagctgaagaatgtaagtaactcgaatctcatcaattttgcataatccttaaccaaactattttttctttcagccaaaacggatgcaattgtgaagagtcctatttggtatcgctataaggagggtttcaacaatgccgttcgcaaagatgttcacattcacgagctgctttaacccacatctattgatttcccactcaagacttttaccctatttattaactgaaataatacacaaaaaaccatatatttcttacaagccggaagttgtgtggcaaaatgcatggacttcaacagggcatcgttcttttatctttgattgtttgtgggaaatttacaaagacaactatgactccgctcgtgctgggctttaatatgtattacaagtgattgtagttggctgtgctttccttatcgcggctctcgatgggttgagctcggaagtgtacccgattgctccgcttactcagttgcccgccgccagtccagatgtctcgacacaagcccgcgtcggtggtgctaacgctgctgttggtggtgctgttggcgctgatccaccaccgccgcatagatgccagattcgtgcccggtccgccttcaatacccagtgagtagccaaatcgacagggggtgtcacagaagtaaaagttgttaccatgccgcaattgtttagttttttcctttctgtgagccccaaaaaagagttcgttgaacatcaataattatttactcgttaggtatttgcaaaaaaccaccgccacgttcggagggcgtttgtgccattgatatcgagggatactattacgatccgataacatttgactgcaagatgtacaagatcggggcatgccacttgattcgtggccagagtttcggcagtcaacaggattgcatttccacctgcatccatgggatacgccggaatcatgacttttatgtgaacgagtaatataaataaatacgtaaacaaatgtacccacaatgaatgagtttgattcgatgagagttgatcaaatcttcgagagcggcaaccgaattgcgtcgaaatgcctagtctcagctggatgtcaatcatccgccacgttgacctgtgacgtaattattattttttttttcattgctcgcactatcaaaacgtgcgaaattctgtgattgtggctcgtttggcactcaaagttactttgttggacattgaaacgcgtcttgtgataatatattcctgtgctaccctggaacgtatggaatccgaaagttctggtaactcttggaattgttatttatgttggtgatattatgtacttcaaacttcataatcatatttggaaaataataatatttttgtatataggaaaatttataaaagtttccgaatcaaacgaacatttgtcaatgcaaatttaaattttttggcctgcgctatctacaagcccaagtaatataatcggcaaacaatgttgctctttggcttcaccccattacatcacaacaacaaatgtaatgtagatgattcagatgcagatagatgtgggctatttactgagggcataactagctcgttgcgtatacgtcatgttggccttatcagccgtgcacctctctgcgttcatcttagccttctgcaacaggcactcgccggatttagctggaattcgaggagagccaaccctcagtacgatcaccatcccccaacatcatcatcaatgatcagacgtgcaaaatctccgtttgcgatgctgacgtcttatcaatccaaacacacagagaatggtttgttgttttattgaaataaaacaatattttctagcaaataacataaagtctaaatagtttcaatctcttgagctgaatatacgttatagaggtaggacatcaatttgttctaagaatgggaaaaaatcgttgaaagttttgatcagtgtacgttttaattctctcagcagaattcgaatcagcagcagagctgctggcagagcgactccgattacaaatgtgtgcctcggatgccttttgttcgaggtttcaagtcgagttcgcgactaaccgtttagtcagtgaccaagtgtgtggtgaaccaaatccgcttcttcatccatcgaagaattttcagaaatttcaaaactgctcaaagtccaagaaaagttgcaataaaaccctagagtattccctatctgcataccaaactgacaacagctgcaacaaagactaagcgcatttttttgactgggcttttgcactctagatgaactttgccgtgccgacgagtataaaaaactcataaaatccagcaaaattgcaaaaagaaaataaataaataagaaaagcagacggatcggccgatcatcatccatatactataggctttcaatcactctagaatcggacacattccgcactgcctcttatatatggcgagctgctgcgcatttgtgtttgtcctgaaccagattgacatcatcggggccagggagcaaagcagagctgctctacagagttgaccaacttgagacagaggaaccatctaatccatctagaacactttcggaagtactatcaaaatggccaacttcagtcagctaagaatcaccattggattttgtgtgattttggccgttatcctggaacaaccattcactgcagaggcggttgttcgtaagtattcaaagatttcttaaaatcaatcagaaaaaaatattgtaaaatgttcaacatggtgttgggttatctgctttttgtttttcaacctgtcaatgccgaaattctgagggcaatgacttcggattaacctatcgaatacattttaaatgaaactacctacatgcttacttgaactacttgaaaccacaatatttttcgaaatattagctagaaatgtaatatatataatatgtattccaggagatgcatgccagacggcgccgaataagagtgtgtggctatgtagcccatctaccctgggcatatttttcgatccggagacacaacgttgtcgctacatgggatgcagtaatcgaaagctgttcttaacccttgaagactgcgaaaagatttgcaacaatccgcggcacatcaagcgacgcaaccaagcaaaggccaatgaaacatcacattgaacacaccaaaagggaaagaaaatacccttagttgttaattgtcacgtgccttatttagtcgaatgtaattatattatttcaattttcgatggtgaaatttgttaaacctgagaatagtttctgcaaacttttttttatttttatacgcacatcaaactggtttttatactcgaattaaaatttattttgttatatatttttgttaataagaaacattgaaaatccagttggagtttgaaatactctaaccctaagattgaatgaatatctaggatgttgcctcaataacacaacatagaatatttggaaacataaccaccagtttgtagtttttaatttcaatcgtagttattgtaactgtgacatttcagttgacattctcaaatatcacggcagttgaactcgcactcagctttggtactaaatcgattgtcattaccgccgcatccgccgtagatgaagggttcgcaatggcgcttaatgggattgtaggcatagctctcaacgtatccaaagcaccgaccactgatcatgggctgcaggcatagtttcactacacagattataaagattatatagatatcaccgattagtgggtgtcattacctctcttggaggccgcccctgaatggtgcggaatcaacaggaggaggccaaccaaaagccactgccaataagccggcatcatgacatctagacttgatgatcggaggtcccctcgacttccacttgcagcgatattcaaccgtcacgttcttgggcctacgactcactgaaccaggctctctgtgtttacaaatgccttcaaatgctcagacctcatactcgtttttataacactttttgttgccaatattcaacattgaccaagttaacaagtggcaatggtttaggccaaagcaaaagtggaatgcccttcctattagctgtcttaggtctcgctattctgatttgtgcttatgtataagctaagcaaacatttaatgttcgtaccttgtac

SEQ ID NO: 21284 - DNA, 4274 bp, DROSOPHILA
tattcagtagacatcagtcgagcgcagaagctcttcgtgataagacgtcttcaattcaaattttttttatcgaacacaccatggagggggacaaggtagtttttcatagttctgatctaccatacgaatatttatacgacgacgaaaaacacgtttcgcacatgccggattccaaattaagtgtacgaaatattttggattcagcttacgcttctgctgaaggcaaaattataactaggaaactttcgcgcagcattccgccgtatccgcatgctgttcgagtaaaaaatggcattcgtgtttatgaatacagtgagcccagaaaacagagctacaaatcaagtttatggaaggaggcctacaatgtgagtaggaatcgaagaacacatgctggacattttacttgctttatttcagatactccaccagcggttggatattgccgagccaatcgcagcaaaggaacacctgtaattaaaagggaacgggaaatgtgctctcgcttactgattatagataatgactttgattttgaaataaggaatgcaaagaatactcattttcgtattcacttccattttggcggactttctttatcagtaaacaaagtggaagaagaagaaacgagaaaggattttattaagttgtttgttggacgctcgtttgaaaccagtatggatcagtatccggacgaaaacgaggagttcgagctgcaataccaagacgaactagagctgctggaggacttgccggacgagtttaacgcgtacgatggaccgagcacatccaaacaggccgctgaaaagcaaaaggaaaacagagctcccgttgcggcactaagagatagcacccgtcttggaaactctacactgggatcgccacagctgtcgcagattacctttggagctagccagttgggtggggaagaggaggcagaaggaacttcatctggaggccaggtcaatcggcgcctttttggaacgcccaaaggtccaccggtgggcagagggtgctcgacaccctttcagcgaatgcccgccatccaggagctggaaaatacacaactaacaagccgctcctatggcctggaaaaggaaaatgcagcagctaatcagctgcaggaagtgggtctcaaaaatgtcaataagcgccgcctggaacgcgatctcttcggggacatagatgacctttttcacgagtcttacgaagatcccatggtgaagaaagcccgaactgaggagcaacgagatcacgaggccatcgaaagaatcctcgagctgcgacgcaaaatgcgagaatcaagcaagactctgcgaaaggacgacgttagtcgcctcaaggcactgcacgatttcaagatgagaaacctatcgtatgagatcccaaactggcctttcctggccattcagcgcagtgatctcgagcggatctacgtaagattccactccgaggactatgaacaaaggcaattggacctgatcagtgccaggggcgaggtggtgggcagtcttttgggtgaggccaaggataagatctggcaggaagccggcgaaatagttttgagtcgcgctacagccgcagaagacgcagatgtaactctcgtaaatagcaacgccaattcagagcccggacgcctttgggtggacaagtacaagccgaggaaatacatcgacctgctctccgatgaaatgaccaacagaagcctgctctactggctgaaaatgtgggacaaagtggtctttggcaaagcctttcacagcaaacgggaacaggaggcggtgactggagagggcggcactgctggcggagctgccaaccagctgaatagcttcaataaacgtacgggcaaattcgaatccaatggcggctggcggcaacgcaaatctcgccaagctctcaacacaaatgtggatgctttgggcagacccatgcagaaggtggcgctgctatgtggtcctccaggtctggggaaaactacactggcgcacacgatcgcccgacatgctggttataatgtccgggagatcaacgcctccgatgatcgcagtccagaggcattcaaactggctttggagaatggcacgcaaatgtcttcggttctgaatgaagacaaacggcccaattgcatagttctggatgaaatcgatggcgcgcctcgtcaatctattgattatctggtcaagttcatcagcgatgctgtttacaccaaagttaaagccaagggcgccaaggcagagcacaacgtcttgaagcgacctattatctgcatttgcaacgatgtctacgatcccgccctgcgccctttaaggcaggtggcctttgtggtcacattagttaagattgccttcaaagagcagcttaagacggactttggttcacttatcgcgctagctgagaaatccggaaacgatgtgaggagctgtatatcatccatgcagttttttaatgctcaaaagcacagtcttactctgcaagatgtgctgaacaacaatctgggacaaaaggacaggcatcaaggtctgttcgccgtgtgggatgctatttttcggatacaacgtccgcggaaaaccctgcacacagacgccaataaggtcgatgagcccgcccaggttaccatgacaaacacgtctgtgacaacacgagttcgcaataagatgcccgatccaaactttacgggcgtgtgcgaagccctaaaatggttttgcttcacggatacagtgcagcatcagatcagcagacagcagaactacagtgtgtacccgtacctgcagtacggtttcgtcgcttggcatttgctgttcgccacactggcttggccaaaaatcgcatttcccacgcgtggctttgagttccagcagaagagcaccaaccagagaaacatctttcaggccctctgcaaaggtgtcaccacctctgcgctgggtgtgggtcagggcggaactctgcttctcgatacggtgccgctgctaaagaggattctatcgccgcaactgcgctccgtggcggtgcagttgctatcgccaaaggagcagcaggacttgcgccacaccatcgaggtgatggttgatctcggcctaacgtttgtgcaggtcaagtcccaggaaggacactatgtcttccaaacagaaccggatctcgatgcactcagtgcttttccaggttacacaggtctctcgcttccctacttcagtcgacagttgatagcccgcgaggtggacttggaacggatacgacgggctgcccctaagggcggtgcaccctcagctccagccgcaaaaaagaagacatcaggagctgcagcgcagctacccaatcatttgcaaacattgaagccgaaaccaatttcggcctctaatatgcacagtgcacccaagcagcagctaactaaggacttttttggccgcattactcacaaatcgacttcgacaaactcagctgaagaattgattgtagttggctgtgctttccttatcgcggctctcgatgggttgagctcggaagtgtacccgattgctccgcttactcagttgcccgccgccagtccagatgtctcgacacaagcccgcgtcggtggtgctaacgctgctgttggtggtgctgttggcgctgatccaccaccgccgcatagatgccagattcgtgcccggtccgccttcaatacccaccttctgcaacaggcactcgccggatttagctggaattcgaggagagccaaccctcagtacgatcaccatcccccaacatcatcatcaatgatcagacgtgcaaaatctccgtttgcgatgctgacgtcttatcaatccaaacacacagagaatgcagaattcgaatcagcagcagagctgctggcagagcgactccgattacaaatgtgtgcctcggatgccttttgttcgaggtttcaagtcgagttcgcgactaaccgtttagtcagtgaccaaaacactttcggaagtactatcaaaatggccaacttcagtcagctaagaatcaccattggattttgtgtgattttggccgttatcctggaacaaccattcactgcagaggcggttgttcgagatgcatgccagacggcgccgaataagagtgtgtggctatgtagcccatctaccctgggcatatttttcgatccggagacacaacgttgtcgctacatgggatgcagtaatcgaaagctgttcttaacccttgaagactgcgaaaagatttgcaacaatccgcggcacatcaagcgacgcaaccaagcaaaggccaatgaaacatcacattga

SEQ ID NO: 21285 - protein, 1397 aa, DROSOPHILA
MEGDKVVFHSSDLPYEYLYDDEKHVSHMPDSKLSVRNILDSAYASAEGKIITRKLSRSIPPYPHAVRVKNGIRVYEYSEPRKQSYKSSLWKEAYNVSRNRRTHAGHFTCFISDTPPAVGYCRANRSKGTPVIKREREMCSRLLIIDNDFDFEIRNAKNTHFRIHFHFGGLSLSVNKVEEEETRKDFIKLFVGRSFETSMDQYPDENEEFELQYQDELELLEDLPDEFNAYDGPSTSKQAAEKQKENRAPVAALRDSTRLGNSTLGSPQLSQITFGASQLGGEEEAEGTSSGGQVNRRLFGTPKGPPVGRGCSTPFQRMPAIQELENTQLTSRSYGLEKENAAANQLQEVGLKNVNKRRLERDLFGDIDDLFHESYEDPMVKKARTEEQRDHEAIERILELRRKMRESSKTLRKDDVSRLKALHDFKMRNLSYEIPNWPFLAIQRSDLERIYVRFHSEDYEQRQLDLISARGEVVGSLLGEAKDKIWQEAGEIVLSRATAAEDADVTLVNSNANSEPGRLWVDKYKPRKYIDLLSDEMTNRSLLYWLKMWDKVVFGKAFHSKREQEAVTGEGGTAGGAANQLNSFNKRTGKFESNGGWRQRKSRQALNTNVDALGRPMQKVALLCGPPGLGKTTLAHTIARHAGYNVREINASDDRSPEAFKLALENGTQMSSVLNEDKRPNCIVLDEIDGAPRQSIDYLVKFISDAVYTKVKAKGAKAEHNVLKRPIICICNDVYDPALRPLRQVAFVVTLVKIAFKEQLKTDFGSLIALAEKSGNDVRSCISSMQFFNAQKHSLTLQDVLNNNLGQKDRHQGLFAVWDAIFRIQRPRKTLHTDANKVDEPAQVTMTNTSVTTRVRNKMPDPNFTGVCEALKWFCFTDTVQHQISRQQNYSVYPYLQYGFVAWHLLFATLAWPKIAFPTRGFEFQQKSTNQRNIFQALCKGVTTSALGVGQGGTLLLDTVPLLKRILSPQLRSVAVQLLSPKEQQDLRHTIEVMVDLGLTFVQVKSQEGHYVFQTEPDLDALSAFPGYTGLSLPYFSRQLIAREVDLERIRRAAPKGGAPSAPAAKKKTSGAAAQLPNHLQTLKPKPISASNMHSAPKQQLTKDFFGRITHKSTSTNSAEELIVVGCAFLIAALDGLSSEVYPIAPLTQLPAASPDVSTQARVGGANAAVGGAVGADPPPPHRCQIRARSAFNTHLLQQALAGFSWNSRRANPQYDHHPPTSSSMIRRAKSPFAMLTSYQSKHTENAEFESAAELLAERLRLQMCASDAFCSRFQVEFATNRLVSDQNTFGSTIKMANFSQLRITIGFCVILAVILEQPFTAEAVVRDACQTAPNKSVWLCSPSTLGIFFDPETQRCRYMGCSNRKLFLTLEDCEKICNNPRHIKRRNQAKANETSH

SEQ ID NO: 21286 - DNA, 2398 bp, DROSOPHILA
gtattagcacaaaaaagaaggccagcaaaaagtaggcaatctttttacaacaccatgagggtattccattgccctacaaaaaaaaaactttgatttatttattatattacttctattatttattgtattataaataaaaaacattcgaaatttttttacattattcaaagctgctcaactttatttttgcagagatcttcgcaaattgctttagtttgaaacctattttcgttgccaccacagcctccgtatgaaaactccagacattcgtttttatctgaatgataggaaaaccaattcgagtagtgtgcacaggacataattttcccaaagccattagcctcaggcgtaagttgacagatttctaaatatatattttattttacacattttaggagtggtagttaataatgaaatacacactaaccatctgctgattccgcattaacaccagctaatgctatgaataaataccatatattgatgaacatctttttcccggtaaaactttgtttagattgaagacctttctcgtgaaagatgtctttataattctataattcgcaataacctggcttaaagtgtgcctaatttgaaaagtctacagttttctttcaagtgatagggtatcgctttttgtttattttattcgattcaagtatatattattatgcgagcactatgagttcgaaaatgcgttccaattatgtgctatctgtttgctttgttgaaattatttaattaatctcgccagcgttcaacacggcgtatgcgcaatgcgagcttaactcacacatggatgagcagagagtgagcaaatgatttaatttgaacgtaattgatcgtctaagcacagcatatagaactggaatatggaacattcggaacagttcagttcacagtcgttgcttttaacgttcagttatcaggttgcaaacacaaaatgcttctgcggatgacccagtttctctgccttgcggcactcgttttgctaagtcttatgcaacttacgcaggcagtagccactcccaataataataataataataataacaatattaaaccgaaggctgtggttcaggtgcaacctggaaatccatcgggaaacaagcctgcagttgccacaactacaatcaaaccacagagactggtaccaggtatgtttatttataaactgatcgaagaacttttatggacctttattaaatcccttaatttgtagatcccaaatgcctgcagcccttggacgttggtccatgccgcatgagcctagaaaggttctactacaacaaggattcaaaagcttgcgagaccttcaagtacggaggatgtcgaggcaatgacaatcgttggggattccgacaaacttgtgaggaggcttgtattcccaaaaagtgatccattgatggcggtcacaaaatacgagattgtttttaaattgtaaatgctagatgaaattatttgttgatgtatttttaaaataattacttgaaatgggtttttgctaatgcgaaatatatacgtttaataattaactaattacaagtaagcagtatatcaaatgtttatctataattggaattaagaaattaagtgcattattttccacctatatgcgcaattttgaaaattacctaatgattagaatcgcaaacgagcgattattaggaacatttcttaaccagacagtttattcatttcttctgaagctccaaagcttaccccattcgttagatacacaaaaaacttcaaccgacagttaaccagtttataggtaattcagttagattcccattccgctcgctaaacgtgatttggctgactaaaattgtcacaccgatacggaagccacttggaatatgattttatggccagcattatgattgacttgcgttggtgcgttgatctgcaattgaaggttgggccgcgaaagcttctccgagagctgtcagtgccaggtgatatcgatatggacgtggatatagacgtcagagaggcaccgccgtgatttacatgcggcgacgaatcagttggacaaacaagctggcgctccgataaatgaagtacacaaaaagaggcaaaacggtgggcaaaaacccagttgagtgagtatagtagtacgtgagttaatcagttcggacggatagtatttaagccgcaatatccgagcgagccgaaatcattcgctcatcatccactcaacggactcgaaatgtgctttagatatagcttcagtttcatagtattcgcggctgttctgctcctggcagccggaattcgtgcagctccctcggatgtcgtcgtggagaaggcggaggagcccgcggtggccaaacccctgcctgatgccagtgagctcactgttccggaggactgtcatcagcccaaggaaaccggt

SEQ ID NO: 21287 - DNA, 333 bp, DROSOPHILA
atgcaacttacgcaggcagtagccactcccaataataataataataataataacaatattaaaccgaaggctgtggttcaggtgcaacctggaaatccatcgggaaacaagcctgcagttgccacaactacaatcaaaccacagagactggtaccagatcccaaatgcctgcagcccttggacgttggtccatgccgcatgagcctagaaaggttctactacaacaaggattcaaaagcttgcgagaccttcaagtacggaggatgtcgaggcaatgacaatcgttggggattccgacaaacttgtgaggaggcttgtattcccaaaaagtga

SEQ ID NO: 21288 - protein, 110 aa, DROSOPHILA
MQLTQAVATPNNNNNNNNNIKPKAVVQVQPGNPSGNKPAVATTTIKPQRLVPDPKCLQPLDVGPCRMSLERFYYNKDSKACETFKYGGCRGNDNRWGFRQTCEEACIPKK

SEQ ID NO: 21289 - DNA, 4908 bp, DROSOPHILA
gtcataaggactcgggatactttgtccttccggtcgatcgacgtcctcacaccgtggatgatattctctttgaaaacacaaactttacaaagtcagaacgtattgattgtgactcggagctcatgtgcggatttcccatttacagctcacgctggttaaatgcagtgtaagttgtaaaaacatcaatcaacttacctttactcatcgttttatttgttttcagtgataacagctattttgttcctggtcccgagccaaatagggaatatattcccactctgactattttggaaaaatcgagtaattcagatacaaatattaggtttgatcttgagatctcaggaccggatcacacgagcatattcattctgcccttaaacgatagcaaattggtggattggtccttcattagggatccgctggatggaaatgtaaagccaccatactacgtgtactggtcatatgcattagatcccaaacccttgcagttttcactggaattcgaggtaataatattaattaaatattatactttagaggggtagttaactcactacttatttccagcacgaagatccaaattggtcgggaggcactttcaaaatagccctaatgggtcatcgaatacacgatgacatgtatattacggaggatttccgtgagttcctggccacgtttccgccgtgggcgcatgttagctcctggctgggatcctacaatagttggcagctttaagtgtagactcaaagttccttcacgaactcaactcaatcccatttttgccatgacacctcagctactcttaattctggtactgttgatggagtgtaccaattttacctaatccaacgaacaaagtgtcgataagcatggcacgtcctaaattgtattagtatttacgattagaacactgtagttactactttgtaattttattaaaatatactataaattatttattaagatacgccaactttggagtctatattctcatcgccgcctaaacaatccagctctcgagggccgagaaccaatcggtggtatatgtccaatcggggaaggttgcgaggaattccttgtattcctcggtgtagtactctggatggtattggaagtgctcggatacgaccagcttcatgtagggtccgtctgtgttgccctcctcgtgctcgagctccacccaaaagttgagcggctcctcggtttgggagtatatggcatagatcagatagggaggtgtgtgcttctccaccaaaggtgtatgatcgaaggaccaatctgtcaccttgacattgtcaagcggatctatgtacatcataacgcgatcgctggccctcaggttgtactcatatcgtaccttgttgccatccagagattgtttagacagctgggtaaggtttatgttcattggaatcacaggtggcgagctgtagatccaacgagcagagtctctgtgatgcaagcagaaaaaagtttagataccaactaaggtcaggttacggtctctaacatacttccattctatccagcgaccactatacaatggaagtccacagtacggttctgcggcacaggtggctgccgtccagctttccggctcggcgttcttgaaagttgtgtcatccaattcatggagtcgtgtatccacaggttgaatataataacccgagtcctgcttacttgtaccatccaaattgtggaatgttcgttgtgtgtgctgaaggataaattaagggataagctatacaaatatatggttaaatatatttaagaacctaccagcacatagtaacgctgaggagccaattgcttcacaaatggaaaaccggcggatgtgcaggccaagatgatgaaaataattgtgatcacaccaaacgatgagaatataatcttgggctttcggaacttgtgcataatgggaatctgcaagcatatgcttagaaaatcttgaaacaaaaattgattgattgtatcaacttacaacaaaaccagcatagtttattgcggttgcaatgataaagacagatatcattatatcgggactactttcgggtccatcgcgaccctccatgggaacaaaggtgacaagggtcgcatagcagatgtatgtgtaaaagaagaagggcagcacttggaacaacaggtgaactgtgacgaagtagctctctaaattgaaagaataaatgctttaaatatcatacaaatattctcaagataaatactcactcttcagggtgagtttcagtactatttgcaccagaacggaaatcgcgtagaagaagatgcccaccatggggaagtagctggagcgaatgcccatgatggtcatgatgatacagagcagcgcaagaaggatgcactgggcgtgcatgaagcaggcgatggtctgatccaacttcatgttcgttttcctcttcgtgaatccgatataagtggccggaagtatgccaaaggcgaagaacaaggtgcagaagtacagcccaaaggccatccattttccgtagtaccaggattcggctagacccacaccttgcataaaaacggccaccaagagagttaagccgcaggccacgaacagagttcccgcttgaaccaggaagatgatggcgaatctcaaaaccaccgctttcggagcatctgcaccattgtccaatgtcatgatgtacaccgaggtgccaatgcaaataaaggccgccacagaaaccaccacattgatggctatgctcaccgattccgtataggtcatcatgaaccagcctaagaaatcatagtacacggtgtgtcccttctcatacgcagtggtgttatccaattctggagcattggccagagcccaaatcaggggcaatacgttctcgccggtcgactggtatgtaccatattcgacgtttttaaagttatcaaactcggtgtggtacacatatccattcatcacactggccatatccaggccaggaactcctccgtaatcgcggaagatgcggaagtcggtgtccgagggaataaagttatgctggaacagctcttcggctaaggtctgagcatatggatgcggcacacttgcttgataatatttggccaaccacgggtgattgggtcccgtttggaagagcacctcacggccaccagctccggtcgaatccaggtttaccaaggctctgacattggtggaaaggaaatgaatgatttcgatttttaacttttgcacggtacaccacttacttgcaattcttggaccatttgtgttgtgtgataaatccgtgggaacccagcatacaagcctcctcggctccattaaataggaaaaccacgggatgggttagcgttctttcggagcgtgagattacgcgcagggtttccagcataacaaccaccatgacgccatcatctccagcagccggcgtttggacctccgaatcgtagtgggagttgaccagcagatagttctcgttgtctgaactcttctgcgatattttcactaccacattagagagatttgtgtaggaaatggtcatgccccacaaatggaaggcacccgaagagtactgcgtgtccacttcaatgtcatagagatccaatcgggcttcgtccttgatcttctggatctctcgcagcaggaaattgatcgtatgcacttcgttgttgatggagccactcatcttattgccgatcgccgagtactcggccaactggcgcatcgcccgctcgccgataaacttatccggatgcagtgcctcctcactctggtacagcatctttgggtagctgtaaaaactgggcagtacggcggcatagaacagagcaaaggcggcagccgcgtaaatgggtgctccgaaccaaggccatttcttatccctggacttgccgccatccttctcctctgtaatgtcaacggttgagaaagacatctggaatatgaaatccgaaagttataggtcgtaagaaatagaggttccacacaaaaaactttttaagggaaatctatgcaaaccaaattgtaagaaaacgttgcatactttttggccccaaataaaaacgatattcgcttttacgatatagggatcgggaataatttacaattatctcatgctatatgagtggttgccaaatcgaagtctccatcgattggaagccataaaagttttgaaattatcataaattgctccaattggagagtgtagaaaggtcgtaaagaaattagtaccctacaaagcaattaggtttatggtctccaaaatttaaaataccaaaaaacagcaaacgataaccagaccgggtcctattttatggccgatataaactttcttatcgcctatggatactcgtttgagagcgcaggaaactaggctcttttgttcggcatattatatcacttcgtaacgaatccattgatttttgcaagcctatcacattttcaaaagcaattcttagattttaaaggaacacaatcactttggtgaaatatggcaaggcatataggcactaaccttcagatcacacgcgactcgtaccggaatcaccaactatgaaatacaaccgtaccagggcccagccgttgggcaactaagaagctccaggctggttcccaagaattaagtagggcccagctccggtgcgttagatttcttatcgcgtccatggcagcgataataattaaatattatgattataatcgtcgatttcggcgcataaaacgattacatccagcgataggcgataccagaagcattttctctttataacttttttatggaaccgttgttaacgcgattaggactcacgttcggcggagatctttcggtggggtccaaaatctaaaaaaatctacataaaacgtacataaaataatttagatttgcttgctctctttaatttggggaagtacggaccgtgttatcgaatcacata

SEQ ID NO: 21290 - DNA, 2601 bp, DROSOPHILA
atgtctttctcaaccgttgacattacagaggagaaggatggcggcaagtccagggataagaaatggccttggttcggagcacccatttacgcggctgccgcctttgctctgttctatgccgccgtactgcccagtttttacagctacccaaagatgctgtaccagagtgaggaggcactgcatccggataagtttatcggcgagcgggcgatgcgccagttggccgagtactcggcgatcggcaataagatgagtggctccatcaacaacgaagtgcatacgatcaatttcctgctgcgagagatccagaagatcaaggacgaagcccgattggatctctatgacattgaagtggacacgcagtactcttcgggtgccttccatttgtggggcatgaccatttcctacacaaatctctctaatgtggtagtgaaaatatcgcagaagagttcagacaacgagaactatctgctggtcaactcccactacgattcggaggtccaaacgccggctgctggagatgatggcgtcatggtggttgttatgctggaaaccctgcgcgtaatctcacgctccgaaagaacgctaacccatcccgtggttttcctatttaatggagccgaggaggcttgtatgctgggttcccacggatttatcacacaacacaaatggtccaagaattgcaaagccttggtaaacctggattcgaccggagctggtggccgtgaggtgctcttccaaacgggacccaatcacccgtggttggccaaatattatcaagcaagtgtgccgcatccatatgctcagaccttagccgaagagctgttccagcataactttattccctcggacaccgacttccgcatcttccgcgattacggaggagttcctggcctggatatggccagtgtgatgaatggatatgtgtaccacaccgagtttgataactttaaaaacgtcgaatatggtacataccagtcgaccggcgagaacgtattgcccctgatttgggctctggccaatgctccagaattggataacaccactgcgtatgagaagggacacaccgtgtactatgatttcttaggctggttcatgatgacctatacggaatcggtgagcatagccatcaatgtggtggtttctgtggcggcctttatttgcattggcacctcggtgtacatcatgacattggacaatggtgcagatgctccgaaagcggtggttttgagattcgccatcatcttcctggttcaagcgggaactctgttcgtggcctgcggcttaactctcttggtggccgtttttatgcaaggtgtgggtctagccgaatcctggtactacggaaaatggatggcctttgggctgtacttctgcaccttgttcttcgcctttggcatacttccggccacttatatcggattcacgaagaggaaaacgaacatgaagttggatcagaccatcgcctgcttcatgcacgcccagtgcatccttcttgcgctgctctgtatcatcatgaccatcatgggcattcgctccagctacttccccatggtgggcatcttcttctacgcgatttccgttctggtgcaaatagtactgaaactcaccctgaagaagagctacttcgtcacagttcacctgttgttccaagtgctgcccttcttcttttacacatacatctgctatgcgacccttgtcacctttgttcccatggagggtcgcgatggacccgaaagtagtcccgatataatgatatctgtctttatcattgcaaccgcaataaactatgctggttttgttattcccattatgcacaagttccgaaagcccaagattatattctcatcgtttggtgtgatcacaattattttcatcatcttggcctgcacatccgccggttttccatttgtgaagcaattggctcctcagcgttactatgtgctgcacacacaacgaacattccacaatttggatggtacaagtaagcaggactcgggttattatattcaacctgtggatacacgactccatgaattggatgacacaactttcaagaacgccgagccggaaagctggacggcagccacctgtgccgcagaaccgtactgtggacttccattgtatagtggtcgctggatagaatggaaagactctgctcgttggatctacagctcgccacctgtgattccaatgaacataaaccttacccagctgtctaaacaatctctggatggcaacaaggtacgatatgagtacaacctgagggccagcgatcgcgttatgatgtacatagatccgcttgacaatgtcaaggtgacagattggtccttcgatcatacacctttggtggagaagcacacacctccctatctgatctatgccatatactcccaaaccgaggagccgctcaacttttgggtggagctcgagcacgaggagggcaacacagacggaccctacatgaagctggtcgtatccgagcacttccaataccatccagagtactacaccgaggaatacaaggaattcctcgcaaccttccccgattggacatataccaccgattggttctcggccctcgagagctggattgtttag

SEQ ID NO: 21291 - protein, 866 aa, DROSOPHILA
MSFSTVDITEEKDGGKSRDKKWPWFGAPIYAAAAFALFYAAVLPSFYSYPKMLYQSEEALHPDKFIGERAMRQLAEYSAIGNKMSGSINNEVHTINFLLREIQKIKDEARLDLYDIEVDTQYSSGAFHLWGMTISYTNLSNVVVKISQKSSDNENYLLVNSHYDSEVQTPAAGDDGVMVVVMLETLRVISRSERTLTHPVVFLFNGAEEACMLGSHGFITQHKWSKNCKALVNLDSTGAGGREVLFQTGPNHPWLAKYYQASVPHPYAQTLAEELFQHNFIPSDTDFRIFRDYGGVPGLDMASVMNGYVYHTEFDNFKNVEYGTYQSTGENVLPLIWALANAPELDNTTAYEKGHTVYYDFLGWFMMTYTESVSIAINVVVSVAAFICIGTSVYIMTLDNGADAPKAVVLRFAIIFLVQAGTLFVACGLTLLVAVFMQGVGLAESWYYGKWMAFGLYFCTLFFAFGILPATYIGFTKRKTNMKLDQTIACFMHAQCILLALLCIIMTIMGIRSSYFPMVGIFFYAISVLVQIVLKLTLKKSYFVTVHLLFQVLPFFFYTYICYATLVTFVPMEGRDGPESSPDIMISVFIIATAINYAGFVIPIMHKFRKPKIIFSSFGVITIIFIILACTSAGFPFVKQLAPQRYYVLHTQRTFHNLDGTSKQDSGYYIQPVDTRLHELDDTTFKNAEPESWTAATCAAEPYCGLPLYSGRWIEWKDSARWIYSSPPVIPMNINLTQLSKQSLDGNKVRYEYNLRASDRVMMYIDPLDNVKVTDWSFDHTPLVEKHTPPYLIYAIYSQTEEPLNFWVELEHEEGNTDGPYMKLVVSEHFQYHPEYYTEEYKEFLATFPDWTYTTDWFSALESWIV

SEQ ID NO: 21292 - DNA, 6561 bp, DROSOPHILA
aagttagataagaacacaaattaaatagaattatacatttaatagtagttcaacacattttcttgtacaatttaggtaacattaataactaagtaataattaaagacaatgcaacaagtggcattaaaattcatgaattaaatgacttggtggtaaaccaccccacagacccaaaataaatttaaaccatttttttggtgctgtatattagatttttggctcagataagaatacctgtctggcactggttgtttcttattgccttaggttttttttttatagcgggactaaatactaataaatatgtctaagctggacgtactataggacagctcatgatttactactgtgaacattacaggctaaacgaaaattttggtcacacgtttattaaatttgtgtttacctcaatgataatcattcggaaatgttcaactattcatgctgataagcattcggacatattaaattatcaaatcctaatctggcaatctaaaatcagtctgcatcacactttccgtgaatggacattatgaaaaatactctatttttttgggggcgatgtgcgatttcgccatttatatttttgcgtgggacacaagttggctaaactctggaccataaattctaaatctatggccgattatttcccgacgaggccataaaattcgagttaataccaattttggacattcattttacggacaccgaaagtacatacactcttcttggtagaacagtcctcatttctacattcatatcatgtagaaaatacattctacgtttaggaattatgtaactttcaattggcgatatacaatcgcaacactttgatatcggccgcatagcttaggggattagttattattaattattgataaatgaacagcccaatataactgacgcttatcaatgattatggtttttcatatctcaagaacaaagttcttacgatatttattttacgaaggtacaaaaatgtatacattagatagcttctctagaagatccggctctcgaatgaagctggccagggtgtggcatccacataatgggggaaactgtcgaggaacttcttaaagtcaggcgttattagttccttgtgatggttccaatggcctccgagcccaagttccagagtagaagagttccaatttccgttgggtttctggtcgatgtggaaaatatatgtatagacaaattacttttgcgagttttccataacctacctctagttctagccagaatttaagtggatctccattgacaccccacgagaagtagatgaagtaaggtggctcaaagctcagacgtaagggtgcctgtagttgttgagatattaacattgaattcagacttatgtgactttaataattacctgatggaaggaccagtccatcatctttgctccgttcaagggctgtataaagagggccatgtgattgggtccacttagctgcatttcatagcgaattttggtgggcgacactgtattcttggagagcaataaaacggttggcacattctcgccaagaacaggttccgatgcgggtatccataaactgttctttctataaggactcaaatgtattagtttactaattcatactaactttttgagttggaaactaacctggtcttgtgccaacgctgattatataggggcaatccgcaattaatttccttatcgcaatcggatccaattctttgggccagtgtcatgttgataacagcatcttaaaaggccaaaaaaaattccatgaattaacctttcaatataattagtccaccttacttttcacggtgtaagtgcgtctgtcctggggcataatgaagtaaccagattcctgacggcgcactttgttttgagcgtcgtggaaggtacgcttggtgtgctaaaaaaaggaaatcctttttacttatcaatacaatataactttgtagtttcttaccaggacagcgaaacgctggacattcgtttctgggcgataggggaatccaattggtgtcattgcaataatgaagcacaataacgtgatgcccatcaggccgcagatgatggtcttcgatttgttgaacaactgcagaacagggataatgaaaccgcagcagaggaagcccacagcgacactgaaaacagccaccgccaaatccggattaaggttctctccaaaacgaccaaacattggaatgaacgtggtgaagaatccgtgcgagaaatatgcaaagaatacaaatggtggcacagtgcaaacaatgtgcggaatgacccatgcgacatctattgggaataaaaagacatattaaaaatcaaactaagcatactcttataaatacaactcacctttggtgtgcagtttggtggcaatattaatgatcaagcccactgtatagaacaagcaactgagcatcaaaacaaaaacagagcgaattccacagatggtgaagatcagggtgagaacagataaaagtaggcagtggcagtgcagcaaaagctgaacccgctgaccaatgggaagcttatcctgaaaaaagatttagctttagtcaaccaataaatcataccaaactatacatacacgcttggtccagtggaagtacaaggcaggcactatggccaaaccgaagaagaaagtggtgaagtagagacccaggatgagccaggagttcgagaaccacgacagaggcaaatgcaccgcatccatgaacagaccgagcaaaactggcaggatggctcccacaacaacagatagaatctgtacgaggagtgtgtgccccaccttcttgaggatcttttcgagctttatgcccgagttgaccgacatcagcttaaaagcgtagccacaaatcccgatggataccaaggagacgatgacgttcaagataacgccttcggtttcggtgtagaaaaccagaaaccaacccataacatcgaaatagatggtgtgacctttggcgtatttctgaaaaaagaaaaaggcaattagtaatttatcattaagatctgtatcagccatgttaccgctgaattctcaatctccggagagtttgcaatctgtcggaccaaagcaagcagattatcgccagtatgctggaaactacccctgggaaagatctctgccttgtcgtgtcgcgtgtggtagacaaatccgttgtaggtgtaggccatatccaagccgggaaccgatccatggtcacggaaaatgcggaagtccgtgtcagagggaatgaaattgtgctggaacagctcctcgcccattgtagaagcatacgggtgcttgatggcacgtcggtagttcttcattagccagggatgattgggtcccgattggaagaggatctctcgaccgccatttccgcaggaatcgagattgataagggctctgtaaaggataaatgaaagtataagataaattcgacaaaatttaaagcactcatttgacctacttgcaatatttggcccacttgtgctgggtgatgaaggcatgcgaggcctgaaggggattttcctcggcaccattgaacaggaataccacagggttctttagtggcttatcggacttggccagcacacggagtacctccatcatagtggccaccatggaaccatcatcaccagcaccaggtcccgccggcacggaatcatagtgactgtttaccagaagataagtagtgctgttcgtgttcttgggactgatcttaacgacaatattctgaatgctctggtacatattgaccatggaccagtgaacatagctaccggatgccacctgaacatccacttcaatatcgttggcagtgccggatcgaattttttgcatcttctgggagagcatcttcaaagcggccatctcattctgtcgactgcccaccactcggggtcccaggctcactagctcccgtagatttttctctgcgcgctcggcgatgaactggtcgggatgcgtttcctcatcctgaatggtcagtgggcggggaaggcggtggcaggcgggtatcgagatggtcacatagagcagcagccagaatccaaagaaggcgggtgcccagaaccacttaatcttgtttccctggacgaatgctcgctcacagccattgggctgagcctgaaatgaagcggataaagattaattcaattaaattcaaacaacttaatatgcctgcaatgtcagtattggctttaggtcacttatcttatacgggacttccgaaaactaggcatgtacatacatattgtatatcttttaatcttgccaatgccccctaaagatatctaattttcggcacggttttattcacaccgaatggatattacccaaaacttcgtagttagatacacctacgtctggccgcagacatgagtcaatttcgaaattggaatcgactataggtatcaagtcgaaagttagatttaatccatcaacggttatcttatcgctggtcagcccgccagttgcaaaacctgttgccaccgaaaatcgaattggtcacaggtggatagtataacttcttgtgttgggaactgctccactaaactaaggccagacagatagataaaccgagggtgcaactagggcgaaatggtgcgctgctatctcaagggtatccactgttcgttagttatcggcttttccctgataagtacatgccgccaaaaaaaagtcgattcccttggaactcaaccatgggtaatgctcatgttgctgtttggctgtttggatcggcggtgattagcacataccacacccaattgaagagcaatctaatcaaggacccaaagtgggtgcttacctcatactgctgggaaccgcggggtcgtagcaatggatccacattcgtaggatcgttggtcggcgtaatgacgcgacgccgtacattcttctcactgccactcatgtttccggataacgatgcccggtattttggtcaagatctcccaatgaaccgatcgcgtcggcgtccaacgctctactgaacgttccactgcattgattatcctaacgtaccggtctcaaattccctcacagagacaaataacttttttattctctcgcccacgatacaatgtttcttatctatcggttcgtcgtacgaaccgtatacaatagttcgaaatatgtttatggctactcagggtacagggggttgtggggggctggattttcattaacagtggactgcgagaaatgcctacataacttccgcttggattcataattcataattctgaatttgaccaagtcgatatatatcaattaattagagcagcagcattatgagtgcaagcccacatcttatctttttttacacattgaaaaaataggtatatcaatctgtatttatcatagtaataatggctgaatggttttttacttgcaacgattttatgaattcactgacatctgcattatatttttctaagtgcactttgcattctaaatctgcatccgtaccttcgatcttttctcctccgtttcgctgctcattccgaggcgctcttcttcttcccgtatctatattgtagcgaaaccggccttgttgtttttgccgctccgagttttagccgccgaatggtgggatcaaagtttccgaagcgcggttttaataccgctcgagcgcaaagcgctgcggcactaactgaattattcaaaataatggtcagcgttttgttgacagttcttagttgctaatatttacacttttcacacagcgcattattttcgtatttacttgggcaaatgtgtgtgtgtgtggtaaacaaaataattgtgtgcgacattcgataaagatagcaatcgtttcgattgtctatcgcacccaagcggttcttatctgattcgtaattgcatactttcgggcggcaatttggaaacaatttcacactggccagcaaaacgaccgaacagccgaacaaaaagatagggcacaactaaaagcggtaaatttgctcatttacagttatgcgccctcatgcctgtctctctctctttctggcctgcatgtgcattagaaaacgatgacgtgaaaagcacaggcacacacacgcatgcagcgggagcatcccgtttggaattgaggacaacgtggaaaacatgtgccataaaacgggaaatgcaataaaggcgggggaggtgcaggaaggggcacttaggcgcagtgtcattcaacctaaataaggaatgcccgagtgggtgtaacctatgtgtgtttgtgtgtgtgtgccaattgctctcgcgaattcattcactcactaatacactgactcccgcactcacttcttcattgatgccttgtggcactgaaattcgtaaacaaagcgttcaccggaacacggaccgaaaggataatcgatagaatgaacgcccaggaacaagtgtatgggaattccgtgagagtttcacaatcagagctacgaaaacactgaccagctagttttggccgtcttttgtggctagttttagtcgaacggaaagcgagagaacgcagaaagtacgcatgcgtgtgagagcaattgccggtttggggacacaaccaaaacaaagcgaaatatgtgtcagctgc

SEQ ID NO: 21293 - DNA, 2658 bp, DROSOPHILA
aaaactcggagcggcaaaaacaacaaggccggtttcgctacaatatagatacgggaagaagaagagcgcctcggaatgagcagcgaaacggaggagaaaagatcgaagcgagcattcgtccagggaaacaagattaagtggttctgggcacccgccttctttggattctggctgctgctctatgtgaccatctcgatacccgcctgccaccgccttccccgcccactgaccattcaggatgaggaaacgcatcccgaccagttcatcgccgagcgcgcagagaaaaatctacgggagctagtgagcctgggaccccgagtggtgggcagtcgacagaatgagatggccgctttgaagatgctctcccagaagatgcaaaaaattcgatccggcactgccaacgatattgaagtggatgttcaggtggcatccggtagctatgttcactggtccatggtcaatatgtaccagagcattcagaatattgtcgttaagatcagtcccaagaacacgaacagcactacttatcttctggtaaacagtcactatgattccgtgccggcgggacctggtgctggtgatgatggttccatggtggccactatgatggaggtactccgtgtgctggccaagtccgataagccactaaagaaccctgtggtattcctgttcaatggtgccgaggaaaatccccttcaggcctcgcatgccttcatcacccagcacaagtgggccaaatattgcaaagcccttatcaatctcgattcctgcggaaatggcggtcgagagatcctcttccaatcgggacccaatcatccctggctaatgaagaactaccgacgtgccatcaagcacccgtatgcttctacaatgggcgaggagctgttccagcacaatttcattccctctgacacggacttccgcattttccgtgaccatggatcggttcccggcttggatatggcctacacctacaacggatttgtctaccacacgcgacacgacaaggcagagatctttcccaggggtagtttccagcatactggcgataatctgcttgctttggtccgacagattgcaaactctccggagattgagaattcagcgaaatacgccaaaggtcacaccatctatttcgatgttatgggttggtttctggttttctacaccgaaaccgaaggcgttatcttgaacgtcatcgtctccttggtatccatcgggatttgtggctacgcttttaagctgatgtcggtcaactcgggcataaagctcgaaaagatcctcaagaaggtggggcacacactcctcgtacagattctatctgttgttgtgggagccatcctgccagttttgctcggtctgttcatggatgcggtgcatttgcctctgtcgtggttctcgaactcctggctcatcctgggtctctacttcaccactttcttcttcggtttggccatagtgcctgccttgtacttccactggaccaagcgtgataagcttcccattggtcagcgggttcagcttttgctgcactgccactgcctacttttatctgttctcaccctgatcttcaccatctgtggaattcgctctgtttttgttttgatgctcagttgcttgttctatacagtgggcttgatcattaatattgccaccaaactgcacaccaaagatgtcgcatgggtcattccgcacattgtttgcactgtgccaccatttgtattctttgcatatttctcgcacggattcttcaccacgttcattccaatgtttggtcgttttggagagaaccttaatccggatttggcggtggctgttttcagtgtcgctgtgggcttcctctgctgcggtttcattatccctgttctgcagttgttcaacaaatcgaagaccatcatctgcggcctgatgggcatcacgttattgtgcttcattattgcaatgacaccaattggattcccctatcgcccagaaacgaatgtccagcgtttcgctgtcctgcacaccaagcgtaccttccacgacgctcaaaacaaagtgcgccgtcaggaatctggttacttcattatgccccaggacagacgcacttacaccgtgaaaaatgctgttatcaacatgacactggcccaaagaattggatccgattgcgataaggaaattaattgcggattgcccctatataatcagcgttggcacaagaccagaaagaacagtttatggatacccgcatcggaacctgttcttggcgagaatgtgccaaccgttttattgctctccaagaatacagtgtcgcccaccaaaattcgctatgaaatgcagctaagtggacccaatcacatggccctctttatacagcccttgaacggagcaaagatgatggactggtccttccatcaggcacccttacgtctgagctttgagccaccttacttcatctacttctcgtggggtgtcaatggagatccacttaaattctggctagaactagagaaacccaacggaaattggaactcttctactctggaacttgggctcggaggccattggaaccatcacaaggaactaataacgcctgactttaagaagttcctcgacagtttcccccattatgtggatgccacaccctggccagcttcattcgagagccggatcttctag

SEQ ID NO: 21294 - protein, 860 aa, DROSOPHILA
MSSETEEKRSKRAFVQGNKIKWFWAPAFFGFWLLLYVTISIPACHRLPRPLTIQDEETHPDQFIAERAEKNLRELVSLGPRVVGSRQNEMAALKMLSQKMQKIRSGTANDIEVDVQVASGSYVHWSMVNMYQSIQNIVVKISPKNTNSTTYLLVNSHYDSVPAGPGAGDDGSMVATMMEVLRVLAKSDKPLKNPVVFLFNGAEENPLQASHAFITQHKWAKYCKALINLDSCGNGGREILFQSGPNHPWLMKNYRRAIKHPYASTMGEELFQHNFIPSDTDFRIFRDHGSVPGLDMAYTYNGFVYHTRHDKAEIFPRGSFQHTGDNLLALVRQIANSPEIENSAKYAKGHTIYFDVMGWFLVFYTETEGVILNVIVSLVSIGICGYAFKLMSVNSGIKLEKILKKVGHTLLVQILSVVVGAILPVLLGLFMDAVHLPLSWFSNSWLILGLYFTTFFFGLAIVPALYFHWTKRDKLPIGQRVQLLLHCHCLLLSVLTLIFTICGIRSVFVLMLSCLFYTVGLIINIATKLHTKDVAWVIPHIVCTVPPFVFFAYFSHGFFTTFIPMFGRFGENLNPDLAVAVFSVAVGFLCCGFIIPVLQLFNKSKTIICGLMGITLLCFIIAMTPIGFPYRPETNVQRFAVLHTKRTFHDAQNKVRRQESGYFIMPQDRRTYTVKNAVINMTLAQRIGSDCDKEINCGLPLYNQRWHKTRKNSLWIPASEPVLGENVPTVLLLSKNTVSPTKIRYEMQLSGPNHMALFIQPLNGAKMMDWSFHQAPLRLSFEPPYFIYFSWGVNGDPLKFWLELEKPNGNWNSSTLELGLGGHWNHHKELITPDFKKFLDSFPHYVDATPWPASFESRIF

SEQ ID NO: 21295 - DNA, 5377 bp, DROSOPHILA
aaaaaccgtgggaggttgaaaaagcacagccaagcatttatacaaatatatagaaaaaatctaatcgaaggcagtccaaaaagaaaaatgcatagaaaatggaaaaacgaaatcgcttcgcaaaaagtcgaacacaagccagaaaagccaaattcgtgcggaaaaaatatttttgtcgcgtaaaaaagttaaggggaatacggaaaaaatgtgagcagaggcgtaccaattgaaaattcaaaataaaagtgagccgtggaaaaaatggcgttagatttaggacaacaaaagcggagacaaaaagtcgcttttccggctccccggtgcaaccagtcgagaccaaagcgtttttgcggtcgagtctcgcaggttttcagtggagcttcgtttttgttatttcccctttatttaatattggctttggcagttggggcacagtgtcaacaaagcgctaacacagcttcaacaaagttattctgcttcgcaaattgttgcatcactcgcattcattaggaactgagttgcgagaattctcggggtcaatctccactcgtaggatgaagtgttaaagagcagttttaagatcagatcaggttacgaaaaacaattagaatttaatagtccttttatttaatatctcccaaaagatgcattggaattaaaaatcccatcttgtcttcatttctaaatttaatattgtatatttttgggataattacgatcgaactaggacattcattcttctccacgatcttacaactcaaaaacgagaataaccaggccaaatatcccttcggacgtatttctcaataataatatgcaattaaatgaaaattaaaaaaaaaaataaaagtgatcacaaagttctttcataactgcagagctacagtataaaatataacgaagtaggagtgaaaacctaaagatacctgcacgaattaaaattgtgcttggaccagtgaaacaaaactaaaccaacatagatttaataagcagccaaatggaaggccgtctcatcgagtatcgtccgataggcggcggcctggactaccatcacaactcgccgctgattggggagattccgcccgctggcggggattactcccatgccgtgcatcgctctatcgatcacctgcggaacagcctcaacgaacgcgtggccctgggtccacttagtgtgttctccaacacggccgacttgaggaactccgtccttagctacagccaacagccccaccagcagccccagccaccgcagcagcagcagcaacagcagcagcagcagcatcaccagcagcagcaacaccagtatcagctggtgccggagcccaagccgagtatcaccaatctggagagcagtgtggcctcctcggcggtcagtggatcggtggcaagtggccaaaagcacgtaaacgacgcagtggtcagcagcagcagtgggagcagcagcaccgctggacccgcccccaccggatccaccaggggccgcaagtcccggatctaccccaatcccaaccagcacatcatagtgaccagcaacagcgtggacaatggcggcatccgcatgcagaatgcgacgttgaacgaaagaaattctcaaaattcctctgcgggggctgctggcgtgggcaacgtgaccacggcagcaggatccggcaatggcatatcatcctccaccagctcgccgcaccacatgacccagttggacgtgaaggacaccaaggtgatgggcaacttttgaactaagtctgcaacatttaatatttagctttgtggtcaagcaaagtatctatttcacaatattaataacgtgaaatctctttgttaagatcaggaagttgggaaactttaaaggaaagtttaagaaccttttgggttaaggaatcaaaatgttcgtaaatccacgctatataaattttaaggaatttaatttccagcaatatatgtttcaaaatatgcttcaagggcttaaatttattctactatcgtacaaaattctctagcagttttttaaaggagaaattatttttgtaaatctagacctttggtttcattcaagagtggcctacacttagactcgaaattagtttttaatgtattgtattttgtgtttataaagtattaagtttaagaaacctttattgcgatttctcagttatttgcaacatattcaaacaatatcccgtctaatttttacaatggcttacattaattcgtttttgagcaacgtattaaatgcattcataatagctccttaaagataacaaacttttaaaaaatgcgcaggttttatcgtaccctattacttttgtagttataccagcagccaggcatttgattatcgattcgtcacgcaagtctaaatatacgattcttcgccctcagatttttagctcgaaggcagatctccagctgcacacgcagatccacatgcgggaggcgaagccgtataagtgcacccagtgctcgaaggccttcgccaactcgtcgtatctgtcgcagcacacccggatccacctgggcatcaagccgtaccgctgtgagatctgccagcgaaagttcacgcagctctcgcatttgcagcagcacatccggacgcatacgggcgacaagccgtacaagtgcaggcatcccggctgccagaaggccttctcgcagctctccaacctgcagtcgcactcgcggtgccaccagacggacaagccgttcaagtgcaactcctgctacaagtgcttctccgacgagccttcgctgctggagcacatccccaagcacaaggagtcgaagcacctgaagacgcacatctgccagtactgcggcaagtcctacacccaggagacctacctgaccaagcacatgcagaagcacgcggagcggacggacaagcggccacctatcgtgccaggcagtgcggcggccattgcagcggcggccgcggcagctgccggcggatccgccaacccggcaaatggaccgcctccacctcccaatcccgcccagcatcagcgcaacaacctgggcctgcccccagtctcgattgcccccagcgacaacggctactggccaaaggtaagtccggactcggccgctgcagccaacgccatggaggtgatgcaccagcagcagcagcagcaacaacaacagcagcagcagcagcagcagcagcagcaacagcagcagcagcaggcgcaccaccaccatccgcaacacggagtcccgccgcagcaacatgtcccgccccagcagcagcagcagcaacaacaacagcagcaacaccaccatccgcagcagcaacctcctccgcagcacagcatggaagcccactacgctcagccgacggctcccaacggatcccaaagcaacggacacggcgcggagttgcagccccatcatcgcatgcccgatccggtgcgggaggatattggtaagtgatccgatctttgattacatctcacctaggcaatatgtagtgcaatggaagactcgattgtcttatttcatatgtcttttgaactcaacaaatgattacagaaaacgtttacgataaagtgcacatactttctaatgctccacattattcaaatttctattcacaacttgcggggttctttattccaatgctataccaagattctagatcggacagattcaaaaagtaaaagttttacgaaaccatatagtatataaactcttgattaacatcacttgccaagtcgatctgaccatgtccgtccatctgtccatctgtttgtccttccgtatgaacgtcgagatctcaggaactaaaagagctagagagttaagatggagatcatggagatttcacagtctttaatttgataacgccaacaagccgtaaaaaagttggcacgtgctcactttttgttttgatttttttcattattttatgtgttttaccaatttctatcgatatccaaaatcaattactgtattactccattgagtaaagtctatctaatagtcggagaaaatttgtcttttaaattgatatcgtaactaacttctgactgttttccgtctcttcgattcttcacaacagcctcgacccccagtgccgtgggcccctatgacgccgcatcaataacgaaaaccaccagcaactcggcgttcacgccgataaactcgatgccaccgcacctgaactcgctgagccaccacccgatggcccagcggccctatctctacgatgccatcagcttcccgaacaagaacgtgaaccagaacaacgcgaacgcgttccccaaccagctgatctcgctgcaccagatccgcaactacgcccaccagccggcgggactgatggcgggggagcacctgctgggcgtgagcgtgggtcctgggaaggacaagggatagctaggggcctacttctagatggaaggtagttcatccgttgtttctccaagcggagacgaggcgtgcattcctgtacagtattaatttgtagttagtcgtagcgagtaaaggtcattttgtaatttttgtagatcttcttgggttaagttaagggtgttcgttctcgcgcactcgataagcactatgtaaatggccaacgatacgtactctaatttgacaaacaccgtccatacctatgtttacacaatgtcttggaatacaagcaccagttcaggtccagataaaggtcctgcgatatgaattcggtccagcaaaagttttcccgtcgagtgattagttttcgaagacctcgtctcttgccgcttgtaaatataattggaaatagatttgttttcggtgcacacggatctcgcagtcttgaagcaatggcagatatcaaaagctgcacactaagccgatatatttgtacatagatatacacatcacctaaagaaacttaccggcaaacgtaacttacattaacatacaaatcctcatatatatttgtttaggtgtatcgtattaaatacagatatttccgagagaatctcctcgagaaacaaaacacaaaaaatgcaaaatgaattcaagaaatcaaacgtgtttacaactataaataaaactatgcgatagatgaaaactattttgaaaaaaaaaacatttataagtatacatatgttggcagttgcaaaaaccgaagtaaaaaacaaaaaccgaaaagaaatgttgtactactttttggaaagactgaagagatcgaaattaacctttaattgaaccagcggaggaaatgatgaaaatcaaacattttaaagcgcgtttttactgcagttactaagcaaactgaatgtgtcctataaaatttcgtactaaatggcagaaactaaacctaaacgtaattacgagtatgacaacatcaaatgtaatgtattattaaataaaataattttaattttaattt

SEQ ID NO: 21296 - DNA, 2079 bp, DROSOPHILA
atggaaggccgtctcatcgagtatcgtccgataggcggcggcctggactaccatcacaactcgccgctgattggggagattccgcccgctggcggggattactcccatgccgtgcatcgctctatcgatcacctgcggaacagcctcaacgaacgcgtggccctgggtccacttagtgtgttctccaacacggccgacttgaggaactccgtccttagctacagccaacagccccaccagcagccccagccaccgcagcagcagcagcaacagcagcagcagcagcatcaccagcagcagcaacaccagtatcagctggtgccggagcccaagccgagtatcaccaatctggagagcagtgtggcctcctcggcggtcagtggatcggtggcaagtggccaaaagcacgtaaacgacgcagtggtcagcagcagcagtgggagcagcagcaccgctggacccgcccccaccggatccaccaggggccgcaagtcccggatctaccccaatcccaaccagcacatcatagtgaccagcaacagcgtggacaatggcggcatccgcatgcagaatgcgacgttgaacgaaagaaattctcaaaattcctctgcgggggctgctggcgtgggcaacgtgaccacggcagcaggatccggcaatggcatatcatcctccaccagctcgccgcaccacatgacccagttggacgtgaaggacaccaagatttttagctcgaaggcagatctccagctgcacacgcagatccacatgcgggaggcgaagccgtataagtgcacccagtgctcgaaggccttcgccaactcgtcgtatctgtcgcagcacacccggatccacctgggcatcaagccgtaccgctgtgagatctgccagcgaaagttcacgcagctctcgcatttgcagcagcacatccggacgcatacgggcgacaagccgtacaagtgcaggcatcccggctgccagaaggccttctcgcagctctccaacctgcagtcgcactcgcggtgccaccagacggacaagccgttcaagtgcaactcctgctacaagtgcttctccgacgagccttcgctgctggagcacatccccaagcacaaggagtcgaagcacctgaagacgcacatctgccagtactgcggcaagtcctacacccaggagacctacctgaccaagcacatgcagaagcacgcggagcggacggacaagcggccacctatcgtgccaggcagtgcggcggccattgcagcggcggccgcggcagctgccggcggatccgccaacccggcaaatggaccgcctccacctcccaatcccgcccagcatcagcgcaacaacctgggcctgcccccagtctcgattgcccccagcgacaacggctactggccaaaggtaagtccggactcggccgctgcagccaacgccatggaggtgatgcaccagcagcagcagcagcaacaacaacagcagcagcagcagcagcagcagcagcaacagcagcagcagcaggcgcaccaccaccatccgcaacacggagtcccgccgcagcaacatgtcccgccccagcagcagcagcagcaacaacaacagcagcaacaccaccatccgcagcagcaacctcctccgcagcacagcatggaagcccactacgctcagccgacggctcccaacggatcccaaagcaacggacacggcgcggagttgcagccccatcatcgcatgcccgatccggtgcgggaggatattgcctcgacccccagtgccgtgggcccctatgacgccgcatcaataacgaaaaccaccagcaactcggcgttcacgccgataaactcgatgccaccgcacctgaactcgctgagccaccacccgatggcccagcggccctatctctacgatgccatcagcttcccgaacaagaacgtgaaccagaacaacgcgaacgcgttccccaaccagctgatctcgctgcaccagatccgcaactacgcccaccagccggcgggactgatggcgggggagcacctgctgggcgtgagcgtgggtcctgggaaggacaagggatag

SEQ ID NO: 21297 - protein, 692 aa, DROSOPHILA
MEGRLIEYRPIGGGLDYHHNSPLIGEIPPAGGDYSHAVHRSIDHLRNSLNERVALGPLSVFSNTADLRNSVLSYSQQPHQQPQPPQQQQQQQQQQHHQQQQHQYQLVPEPKPSITNLESSVASSAVSGSVASGQKHVNDAVVSSSSGSSSTAGPAPTGSTRGRKSRIYPNPNQHIIVTSNSVDNGGIRMQNATLNERNSQNSSAGAAGVGNVTTAAGSGNGISSSTSSPHHMTQLDVKDTKIFSSKADLQLHTQIHMREAKPYKCTQCSKAFANSSYLSQHTRIHLGIKPYRCEICQRKFTQLSHLQQHIRTHTGDKPYKCRHPGCQKAFSQLSNLQSHSRCHQTDKPFKCNSCYKCFSDEPSLLEHIPKHKESKHLKTHICQYCGKSYTQETYLTKHMQKHAERTDKRPPIVPGSAAAIAAAAAAAAGGSANPANGPPPPPNPAQHQRNNLGLPPVSIAPSDNGYWPKVSPDSAAAANAMEVMHQQQQQQQQQQQQQQQQQQQQQQQAHHHHPQHGVPPQQHVPPQQQQQQQQQQQHHHPQQQPPPQHSMEAHYAQPTAPNGSQSNGHGAELQPHHRMPDPVREDIASTPSAVGPYDAASITKTTSNSAFTPINSMPPHLNSLSHHPMAQRPYLYDAISFPNKNVNQNNANAFPNQLISLHQIRNYAHQPAGLMAGEHLLGVSVGPGKDKG

SEQ ID NO: 21298 - DNA, 3356 bp, DROSOPHILA
gtctgatgaagcgaatgcttaaaggaaaacattaagtttgcgggtaaaaattgggtaaggatttcaaaagaggtgggcattaaacttatagtatagtataatttgagagcacagagaactagtttacattatcctgtgtaataacaattgaaaggacaatcaaaatttaattagcttgtatataaaatttactaaaagaatgcatatcacgcgaaactaaatataagccactgaagctaaatatatttagtctactggtaatgtagccattgtgtttgaaataaatgcataaacgagtcgggccacaaatgagtgaccctagctgagaaattatataaaaatacagaggcgtctggaaagaaagggaaaagaggggcagccggagcaagtttaatatgaattattacgtgcagaaaagttgtatgatgctgctaaacctggttacagacctttgttaaggtgccaacaaagcacacacagcaaaccaaatgagttatcaagtctgttgttttaatacccttctgaatgaataataatagtaagggaattttcattctaagaaatattttatatcatgtgtatatagtttctagtatacccgaagagaacaacaatctcttaattgattcaacttttaagttcatgtgtattataattcatttgtactctaacacaattttatctagggtatacaaactgcacgaatgcatgggctcacctggccaacatttaagttaggtcttaacatgccccgtgtatctgttagatacaatttgttttaattgcacaagttggcaaccctggcttgcagcagcagcaggccaattaatttctatttaaccaggtctcagctgagattttcgcccagtgacactgtcaagcgattttttgtatttctggtaaataataaccaagtctagaataaccaaataacagctcctataaataagattagtttatttgcttttgtttagaacatccaaattgatcactaatacagttttgcaatgttcttgattgatttttattaagtttcataaaagatccataagttctcgtttagtgagctgccacagcctgatcgtacttcggtggcagagcggacatagtctgtggctcctgccagtgggttgcacactgggcaggcatcactgtggtcgtggtggtctgcactggtacagccatctggtttgctggcacggataccacaatgttgtttctggacatcatgcgacgacatttgcggcaaggacgaccccaagccaatggattcgcgtagtagagaaggccacgacgatggtagcattcgcactggacgttgatattaacattattaacgttattcatttttacacattagtcttctttctatgacttcggagcgctaactgtccgttttcctactggtctccagtttatatattttattttttttttagtgcttcgacactcagtgcgataagaaaatcctctttgccttttatcagcacattgatcgatcaacgtttttggcacaacttagtgattcaattctttcagggctggctcattgcattatacagttcactggggtcgctgattcatgggtgctcgccaacttggggttgccttgggattgggataagatcgtgagtcatcttgggtaactgggcacttgaaaagtgttaaggtagatcagaatcataggcttatttaaataagctattgagatcgatgcactcgattccacaagtaaactgataagatacaagggtaaatacgtagtagtagctggcattatatgttcgatttttactaaatggtgcgcaaataaaatagttttttatcatctatagtaccactaatccaagttgatactttttctgtttattgacaatatataaacaagataaatgaaaacttagtgttttggccacaaaatccaatagccatttcccaatatcagcagattcttcaaagttaaaattttagagataatacaaacaaacttaagtttgatcaaaaaatcattcagtaaatccacagcttaaagaatgttataatactatttttcaaatgtaaaacaaaggaaaatactgtttcgatttctcaaaagttttattatattttgaagagcatatttttccatttattgggtggacacagcagcgactggtacaaatgtagtagtggtggtgatgttgttgttggtagcaactggaactgcaacctgagtgggaacaaccacaacatttcgggacatcatcctgcggcactggcgacaaggacggccccaagccaggggatttgcatagtacaggactcctcgaggatggttgcactcggcgcacttgaggttgatattgatgtcggacatggctctgtcttgtcttggctctaagttgtctctgctcgactgcacttcaatttggcttttaactttaacttataacctttttatacagccagtttgaatgcgataagaaaaattgaggactcgcttatcacaacagtgatggatcaaactcgtaattctgctgcagcagttgtgattcaatctctcaatccctcgattttctgtgactcatatgttctagggatgttgaacttttcattctagagtgactcatcatagacctcttcttaagtggttttttaggatacatttttacttgctattctcgatagtttaagaatccaaaaataattatcttgactcttctcttcatgagtaattaattcttttttagatatcaattcccgaactcttatcatgaaaaatatttttcatttgtatacatatacattttaagccatagttggatatgcaattcttatttaaatacggcaagaatggtataacttttcatataaaatcataattcaaattttactttgagtccagcaagatcttttatatttattacgccatttaaattgagaaaactattgcccagttttcgttataataaagcttaaaatatgtttatgtactgacagcactagttgtacaataattgataagctggctacgaccagaggacatcaatcatttcccaccagtcagatagcaaaaccgaagccaaataatatatacaaaaaccacaaaaaatccacgaaagcaattacccgtacggaaaatagagagtggaaaaggaatcatgaccatgaccattgtttatgtcgttcgcctgcagttcaattttcatatttgtaccattaacattgcaaataaatgcaggcatatatattcgcaatatgaaaatgtgtcacagcaagaaccgacattgaaaaccaatcaagtatatttcaattaaggtaaagtgcatttaagttatttaagcaaatatttcgagcggatttacaattgcattggc

SEQ ID NO: 21299 - DNA, 515 bp, DROSOPHILA
atgtccgacatcaatatcaacctcaagtgcgccgagtgcaaccatcctcgaggagtcctgtactatgcaaatcccctggcttggggccgtccttgtcgccagtgccgcaggatgatgtcccgaaatgttgtggttgttcccactcaggttgcagttccagttgctaccaacaacaacatcaccaccactactacatttgtaccatgcgaatgctaccatcgtcgtggccttctctactacgcgaatccattggcttggggtcgtccttgccgcaaatgtcgtcgcatgatgtccagaaacaacattgtggtatccgtgccagcaaaccagatggctgtaccagtgcagaccaccacgaccacagtgatgcctgcccagtgtgcaacccactggcaggagccacagactatgtccgctctgccaccgaagtacgatcaggctgtggcagctcactaaacgagaacttatggatcttttatgaaacttaataaaaatcaatcaagaacattgcaaaa

SEQ ID NO: 21300 - protein, 151 aa, DROSOPHILA
MSDININLKCAECNHPRGVLYYANPLAWGRPCRQCRRMMSRNVVVVPTQVAVPVATNNNITTTTTFVPCECYHRRGLLYYANPLAWGRPCRKCRRMMSRNNIVVSVPANQMAVPVQTTTTTVMPAQCATHWQEPQTMSALPPKYDQAVAAH

SEQ ID NO: 21301 - DNA, 5165 bp, DROSOPHILA
tgcccatctgcttggagccaacgggcgttttgaaggacaactgcttttgtagcagcgaggcgctacttcctccggatggattggcggtcgtaataagattccggccatgaccgttgttgcccaagccggcaacgccgttctttcgaaaaacattacgtgcactggaatcagctgtcattgtttggttttgactctgaaaatgttattacgttctgctgattccgttgatgggcataagttttcacgcatttacataaatttgtactgcggttggtcggggacttgtgataagcactgccaaagggttcgaaagatatattcatttattgacggggtactaatcaatatcaattgcttgctcaccgcacatttgcctccagagatctatatacaggacttatgagctatacactcgatcaaataattgacgcacctacatatgcagcttaaaaatcaagtgtatatatctttatccgattaaattaacttaacaatataatcacttttctgccgaaaaaggaaatgaccactggcaactctcggttgtgctcgggaaagctctagccaaagctttcgaagcatctggggttcctgtgaaagcttttccatatttgtacatatgtccattttgcattattgagcactttttggtggggaaagaagtacccccactaatgcgctagcgttccttactaagctatgcaaaaataaagtactccaaagcattttcgttcgccatagcccattcccaacactctttccatcgccacctgttgtcaggatgcggtactaaacatagaaaaattatctagtctattcgaaaaaatcatcacaaaaaatttaaattttatatataaacagcaaaaatccagttacatagttttgtgcatttcacgtttattttcgaagtatcgatttcatatatctttggcgtagaatgtatattaagtttttaaagctatgagttgtgtaggcagaaaaatttgaccattttttttttgtaatatataaaagctatttcatttttaataaagcgtttcaaaaattacattcaagtaatcgttgtttatcgataaatatttatttgtgtaagcctctgccttgatgcgaaaatttgaatacaaaaataattagacttactacaataggatgactggacaaaagcttgacaaattagctatttagattaaaaacctctcccatcgatttcgggcttcatagaaataccttctccttgtcgaagttcttgaagtatccatcgtacttgctgagctccctgttgatgccagtggaggataccatggagggcagggctctcaaaaagccatgcaagccagacggaatcgggggagtgggtggcactgacagtccacatcggttgtacaggaagggcatgataccggtcacattggtgtgaagtgtcagcactgcctccaaatcggactcctgggcgtgcatcaagaactgattgtaggcgctggatggaatcattccgaagtgatcgaacgagtccacatacgcctctgtatctcttttgtagttctccagaaagtcaccaagaagtttcgccaccattgcggatcgggctttgctggccaccttgatggtttgcatattccggaacatgactggcggctttacagatccgccgaacttgttcaaaaacttaagtattattttctcgtgattgtctttcggatcttcggtaagccgccgaagaaccgattccaagtacatgctgaacgtctgacgcgcttgaaaaggcgtcagctctgacccattggatattttcttgagcatgatcttccgcaaccgcctcccctccacttcgcacttctcaactgtgggcttcttgacaaatggaatttccgaatcggtttccaaagccctttcgtattgccaaatccgatcagcttcattattatcgtcctgcttttgccggccgtccttggagtataaattttggtgaagcatctggttgtagttgtgctgtataatcggcgtttggaatgtctgactctgtacatttggtgtggagatcggaatgccattagcagaatcaaggaaattaccataccgctgcattgagtcatctgtgggaaagatgcgcacgaatcctccacgacgagaatactgtaggcgtgcattgcgcaatatgcgctgctcttcgccggttagattaagattaatggcagctccttttttcttcgacttctttgtcttttgcgaggtactgggaaaagttgctatcctttggcagcttgagctgcggaaacgcgaccatttctggtcataatgagatttcatttcgggactataggctggaatgcccacacacgtcaataggtctgccatcagacatgacttcaccttagtgtccaaaggactatccacacccattgacggcgatagattgatttccagtagccatggcttaagtgcgttgtctattaatatatcgaatccatacagctcaaagcagttatttccattgggaacgaacatcctgcaggccgaaataatagattgagcacaggctagcacagctttaataattaaatcctcaatattcagcattagctgacgtgtatcacaactctggagtttcaggtgccttaaaagagcggacaacgtccacttatggcctacatcctcatcctgagcatcggagctccttatgtaatcagaatggtatttgttaatgctgtaattgcagagatgcatgcacgggttccacaggttatcggcatgcctgtcatacttgactgtggccaatctcacaatgccctcttcatataaataaataattaggggatcgaaggaagtgactagaacgtataccctcaaatcacatttgtgaccatcaatgcacagcggatccactatatatttcgacaccaccgcctgctcatcttgaggtatttgatctggctaaaacacatatatctatcagtttcgaattatagcaagttgttggtttagttaccgaattaacaataaatattccccttcctcgactggatgccgctggcttaactatccatggtccgcgatgcttgttgtgggctactactaaatctcgggattcgattggcagaacgaatgtttgtggcacaatatcaaaatgcttcataccccgaagatgttgcatgcgttcgatgtttttatatagtcgatcctttcgtgtcatttcgtaggacctgagcataagaaatatatgttatgttttcaaaccagtttaataattccaaaaattactcacctagggaaatgattaaccctctgatacggcgccaaatttctaacaatatctaatttcatatgaacacccgtccagagtaaattaaagttattattttcaccctgaacttcagtaaggccatggacattaaagagctttcgaagcaacttggtttccgtttgatggaatttgtaggtaattttgagtttggaggcaggcatgtttatcccacactcggcatcgtcctcgctcgtctcctcctgatcttcttcgattacttcagtatttgaaattgttttggcaggtgctatggattcgtatccactctcattcgataagtcggtagctagtttaatattaatggcattctgactggttttaagtacacgcgatttgttttcactactatttgcaggctcttcaccttcacttgaaatggacgtatcactcgaggaatatcggttaagtatcttcttaaaagggctagaaaaagttaatttatccgatttatcacattgttgcggttttttcaataaaaatatcttttgttgcgttgaaccgcttagagcttccttgctactcggttccgaagaagtgggttcttcttccgccagtttttgtgggctttgaacgggcttctcctcattatccttcgtgtccgttaacacttgtgcagaggacttctcagacaatgttttccggattttcggattaagaatattcgttctgaaaaccaaaactgcttctcgcgaaccaagctttccactcgtaatccaatcatcttctttttgataatcgaaactgattctgtaacaaaaattaataaatatattaatgtaatacaaacgaatgatattttaagcagtttttaaacttacgaagaatttgtgagagcttcacacaatgaagaaggcataacgacttctgaaatagtaaagtttataagaataagttattttgaacataataattttaagagatctttatactctcgtttttatgggacattgctaagctggatttaaattaataattcatttaaagtaatatatgaaaaacaaacctggaaaatgcttaggcggacagacacttcacattaatcactaacatttaagtagttcgctacaaatagcagtaagataatcgagcaatcattaggagctgctacatttcagttaaatttttttatttatttttattaacataaaaaaataaacttaacggaaacactctttataagtaaaactaaagtgtaagcaactaaaataatcattatactcaagtttgaatggcacaggatatagaaaagagcgtatgttgtaatcaacaaccaacaacctcaaattaaaattttcattgctttcagaggttttaatcatatttcaaattaaacaagctccctttagatatgtttattagaaaaaggtgtcttaattactttagaattatttcgtacctttattaacaacgtagagtgagtaccaggtggtttgttttgcctatataaagatagattgatctaaatataagtagagaagctatttagggaaaactacgggttttccatcgatttgcagttgtttttaggcgataactttccaacgtcgagatggtcaacattttggaagtgctaagcacggagggttatcaatcggagtgttctttgtcacttttccatggagtaattgagtgtgtgcatccataccgcatgtttgtctggaagctaggatattctagattcacgactaggttctagatctattgaacctatttaaacggtgtaacatgctagtatggcgtccatcctgatgtgcggaataaagtgtacttagatgatccatgcgctgttcgtttgtgcttactattctattataaaataatagacctctccaccagacacacagttcttattaatcatctttcc

SEQ ID NO: 21302 - DNA, 2977 bp, DROSOPHILA
aagtcgttatgccttcttcattgtgtgaagctctcacaaattcttcaatcagtttcgattatcaaaaagaagatgattggattacgagtggaaagcttggttcgcgagaagcagttttggttttcagaacgaatattcttaatccgaaaatccggaaaacattgtctgagaagtcctctgcacaagtgttaacggacacgaaggataatgaggagaagcccgttcaaagcccacaaaaactggcggaagaagaacccacttcttcggaaccgagtagcaaggaagctctaagcggttcaacgcaacaaaagatatttttattgaaaaaaccgcaacaatgtgataaatcggataaattaactttttctagcccttttaagaagatacttaaccgatattcctcgagtgatacgtccatttcaagtgaaggtgaagagcctgcaaatagtagtgaaaacaaatcgcgtgtacttaaaaccagtcagaatgccattaatattaaactagctaccgacttatcgaatgagagtggatacgaatccatagcacctgccaaaacaatttcaaatactgaagtaatcgaagaagatcaggaggagacgagcgaggacgatgccgagtgtgggataaacatgcctgcctccaaactcaaaattacctacaaattccatcaaacggaaaccaagttgcttcgaaagctctttaatgtccatggccttactgaagttcagggtgaaaataataactttaatttactctggacgggtgttcatatgaaattagatattgttagaaatttggcgccgtatcagagggttaatcatttccctaggtcctacgaaatgacacgaaaggatcgactatataaaaacatcgaacgcatgcaacatcttcggggtatgaagcattttgatattgtgccacaaacattcgttctgccaatcgaatcccgagatttagtagtagcccacaacaagcatcgcggaccatggatagttaagccagcggcatccagtcgaggaaggggaatatttattgttaattcgccagatcaaatacctcaagatgagcaggcggtggtgtcgaaatatatagtggatccgctgtgcattgatggtcacaaatgtgatttgagggtatacgttctagtcacttccttcgatcccctaattatttatttatatgaagagggcattgtgagattggccacagtcaagtatgacaggcatgccgataacctgtggaacccgtgcatgcatctctgcaattacagcattaacaaataccattctgattacataaggagctccgatgctcaggatgaggatgtaggccataagtggacgttgtccgctcttttaaggcacctgaaactccagagttgtgatacacgtcagctaatgctgaatattgaggatttaattattaaagctgtgctagcctgtgctcaatctattatttcggcctgcaggatgttcgttcccaatggaaataactgctttgagctgtatggattcgatatattaatagacaacgcacttaagccatggctactggaaatcaatctatcgccgtcaatgggtgtggatagtcctttggacactaaggtgaagtcatgtctgatggcagacctattgacgtgtgtgggcattccagcctatagtcccgaaatgaaatctcattatgaccagaaatggtcgcgtttccgcagctcaagctgccaaaggatagcaacttttcccagtacctcgcaaaagacaaagaagtcgaagaaaaaaggagctgccattaatcttaatctaaccggcgaagagcagcgcatattgcgcaatgcacgcctacagtattctcgtcgtggaggattcgtgcgcatctttcccacagatgactcaatgcagcggtatggtaatttccttgattctgctaatggcattccgatctccacaccaaatgtacagagtcagacattccaaacgccgattatacagcacaactacaaccagatgcttcaccaaaatttatactccaaggacggccggcaaaagcaggacgataataatgaagctgatcggatttggcaatacgaaagggctttggaaaccgattcggaaattccatttgtcaagaagcccacagttgagaagtgcgaagtggaggggaggcggttgcggaagatcatgctcaagaaaatatccaatgggtcagagctgacgccttttcaagcgcgtcagacgttcagcatgtacttggaatcggttcttcggcggcttaccgaagatccgaaagacaatcacgagaaaataatacttaagtttttgaacaagttcggcggatctgtaaagccgccagtcatgttccggaatatgcaaaccatcaaggtggccagcaaagcccgatccgcaatggtggcgaaacttcttggtgactttctggagaactacaaaagagatacagaggcgtatgtggactcgttcgatcacttcggaatgattccatccagcgcctacaatcagttcttgatgcacgcccaggagtccgatttggaggcagtgctgacacttcacaccaatgtgaccggtatcatgcccttcctgtacaaccgatgtggactgtcagtgccacccactcccccgattccgtctggcttgcatggctttttgagagccctgccctccatggtatcctccactggcatcaacagggagctcagcaagtacgatggatacttcaagaacttcgacaaggagaaggtatttctatgaagcccgaaatcgatgggagaggtttttaatctaaatagctaatttgtcaagcttttgtccagtcatcctattgtagtaagtctaattatttttgtattcaaattttcgcatcaaggcagaggcttacacaaataaatatttatcgataaacaacgattacttgaatgtaatttttgaaacgctttattaaaaatgaaatagcttttatatattac

SEQ ID NO: 21303 - protein, 917 aa, DROSOPHILA
MPSSLCEALTNSSISFDYQKEDDWITSGKLGSREAVLVFRTNILNPKIRKTLSEKSSAQVLTDTKDNEEKPVQSPQKLAEEEPTSSEPSSKEALSGSTQQKIFLLKKPQQCDKSDKLTFSSPFKKILNRYSSSDTSISSEGEEPANSSENKSRVLKTSQNAINIKLATDLSNESGYESIAPAKTISNTEVIEEDQEETSEDDAECGINMPASKLKITYKFHQTETKLLRKLFNVHGLTEVQGENNNFNLLWTGVHMKLDIVRNLAPYQRVNHFPRSYEMTRKDRLYKNIERMQHLRGMKHFDIVPQTFVLPIESRDLVVAHNKHRGPWIVKPAASSRGRGIFIVNSPDQIPQDEQAVVSKYIVDPLCIDGHKCDLRVYVLVTSFDPLIIYLYEEGIVRLATVKYDRHADNLWNPCMHLCNYSINKYHSDYIRSSDAQDEDVGHKWTLSALLRHLKLQSCDTRQLMLNIEDLIIKAVLACAQSIISACRMFVPNGNNCFELYGFDILIDNALKPWLLEINLSPSMGVDSPLDTKVKSCLMADLLTCVGIPAYSPEMKSHYDQKWSRFRSSSCQRIATFPSTSQKTKKSKKKGAAINLNLTGEEQRILRNARLQYSRRGGFVRIFPTDDSMQRYGNFLDSANGIPISTPNVQSQTFQTPIIQHNYNQMLHQNLYSKDGRQKQDDNNEADRIWQYERALETDSEIPFVKKPTVEKCEVEGRRLRKIMLKKISNGSELTPFQARQTFSMYLESVLRRLTEDPKDNHEKIILKFLNKFGGSVKPPVMFRNMQTIKVASKARSAMVAKLLGDFLENYKRDTEAYVDSFDHFGMIPSSAYNQFLMHAQESDLEAVLTLHTNVTGIMPFLYNRCGLSVPPTPPIPSGLHGFLRALPSMVSSTGINRELSKYDGYFKNFDKEKVFL

SEQ ID NO: 21304 - DNA, 22253 bp, DROSOPHILA
aaaagaaaactaaataatcattttgaagtcagaaacatgtatgttttaatatgaactagacatgattataactttacatcctttgattaacctgcgtatattgatgtcctattgggtttccttttaagaagaatacgaattgtaaaacattagaatagttgtaaagatcaatgcttcataatagctaagaagagcttgttaagctagctttctttttttcaggttacagtagtatttataaatcaaagcactcaactaaaataccagctcgttacttaagttgcaatgatataataaggataattgtgtgtccaacacattccgaaacctcaactgcttgtaagttcacttcctcgacaaatgacgcttgccgcaatcagcttgcaaatttgtaacaatagcaggatattaacaaaatccacttatgtatccgttttaggtttcacgctccttgggaaaacgcgtagagtgagaaggaaatgccgatgcacagagagagagagagagagagacagagagagtgggatagagagccacacactttgtggcctaagcccaaaatggttttccgatgcaattgtggtcgaaaaatctgtggcaccaaagtcatattttttgtggggcgaaaaagcgcaaggactccgttcagcatttcccttcgaggacatctgggcgtagggcagtaagtgcagttagtttattttattacgatgccgacaaacaagccgctttggcaggagtcggggcatcccaaatacccattgttgtactctggataccggatcgccgggattcggtttcggaagtccatgtcctgtcccgtgccgtgccggagcgcaagggacaaccaccccgcgagtcctgcgcactctctcgcgctctcgcaatgctctcccgagctgactccgcccccttggttcacacacacacagagtgtgcattgtgtatatataggtgcggtgagctcaaccggtttccaattcgatttggaaactcgagtcgtcagcgggccacagtcgctgccttcgagtttattgccaactctgccttggtccggtgcgcaacggtttcggtagttggtagtgcatagttggtattgtcggagttaaacttcttctcgcttgtgactgaaaaatgcttgacatttagccagaaaattctgagcgcgattcaaatacaatttgtatgactgtgtagagtgtgtgtggtgcctcaactgtgatcaatcatatcattgccgatttaagtactcttgccccttgcaatcgaatggatatcaaagcctcgacgccacctgccctcgatgtggctcctggcagccaggatcaccagccggaaaaccggtagcaatctccggcgccatgtccggttcaggtggtgtggccaactcgtcctccacagcggcggccaacaataccgccgccacattccagcacatcttcgagcagctggtacagcagggcggcggaaaccacaagctgccccccaagcagctggagcaactgcgtcacctgctcggcaacgtgagggacgccaagaatctgcagatgatcgtggagaagttcaagaatctggagcagttccacgagcactacgccgcccacctggctaacaacaacactgtgatctcaacggaaggtgagctgaacttccgacggcaaatttcgagggtctacttttagaaaatagggatctatttggaataaaaacaagtttggatttcaattctatacaaaattttagaatttagaattaagctttaaaatgacgaactatcattccaataaatttgagcagttcgaacatagagaatggactataatcaatcattcttaaaagttctataaaaataggtgtttcatggaattaattttgatagggctaaataacaagctgcttgaacaaattggaaaatcagatatcaatatgcatatattaattgatctcgaatcacggcaatttctggtcgaaaactttgccacttagcaaacatattaagcttcgttagttaaaatcctgttgttaattttttcacgtgtggccttagccggaaaagccgtgcaattgtttgattatagatttaattaacacaaattgctggcgaacacggaaattccggactgatcgccaaatgtctgaatggctgagtgtgtgcgtgttcacagcaatgttttttagtgcattaacatgcacagcggaaaatttgagagaaaattataagctaattgcaagacgaggcaattaagtcgctttaaatcccggcgcactttgtgccgctttcactcgccacttggcacagtttgttttaatttcgttaaaaatgcataaagccatcaggcaacatgttgcctactttccagcatgccgtcgtgacaactggccattttatgcggacgatgggctcgcgaggggggggggtttggcggtttgggggtggtggttggctcgcggttgcaattacagcttttagctcgttaaaatcgcaaataaagttgtgtgtatgcgggactggactaaattttaatactttcgaaattgctgacaaatttgcatagggtcgcgcagcaccactgtcgtgcgcctaattgactttggcaaactgttggcaaacaggcttttaactcggctctctttttttacccgttcttttttccccctttttttttgtatcccgcagatagcaacgacttggttaaggataatgccaggaagtatggatctggtggacaaacgctaacgccccgccacacaatcgatgccattctgggcctaaagaatcgcaatggcgcggcgaatggcagtggcaggaatccggaaacggtcagcgatggtaagtcataacgcgacattatttggccattagccgtgatcagtgggccctgtcagggaaaatggcaaatcgatttcaattacccgctcgcagcccgtggaatcaacgaacacaatcgcaaaattttattagccttggcaggggggggggggggtgctattgggtgggtggtttttctgtggttttgggtggctttaggtggcttggttgggtggtggcgttgagacttgcactttggcaacgcctcgagatgcacgacagctgataagcaatcagtcagcggtaatcgctggcgaagaaaacgaaacgagaagctaaaaaaaaaaaaaacaaaataaaaaaaaaacgaacgccaaaacggaagtcatatttagatgggattagaaaccccatcgcttttggccaatttaaacttatattagtggcgcgcgcagtgagcacttttgaaggctttttaactggattatagtggggatttgcggtgccagctggcgacgactccccacatccaggtgggtgccaaaaagtagtcttctgcacgtcatttataattcatttcgcttctgttttgattgccggcaagcgattgtcgctctcgcgtctcgaccacgcccaccgcccaacgcccatgccaccaaattggcagcaagttgcgaaaaaagggtgggcactgatattgccgcgattatggttatttccataacaccacagccttgagtccttggatcatcccagcgactaggtgagaaattagggagtagcttttgctacttttgtgcttttgaagcatagtttctaagaggatagagtttttgaaaatcaatcattatcaagataccacaatacatgcattttccaattcttcaattgataaaagcaattagtatttgtttgaatgctcacttatcagctctcaactggccaacagaaagccaaaacaattagcagtacgtatctttgcaattaatgcaattaagtggtttcataaacgctcaaaacagacaactcccatcgatggtaaagggtttaaaacaacaaggtgatgaacaaattgacaacaacaacgagtgcaaatcaaaatggcgccgagcgacaacaacaagagcacaggttaaatggccgcaaattaattagaaacaggctaattaactgtgggagaacaaatcgcgggggtggcagcttggagaagggcgagctcaagcgtttcgcatttaagccataattaaactggcggccagacacaagccgtcaaaaagcatttaatctgacagctggcggcaacggtggcgtcccagaaatcagaaagagacagctacattgcggcagacagagctggagagagagagagagagagagagaaggcgagatgtaaaattgagatgtaaacaaaaaaagcgcaggaggcacaagtgcatttggccaagaaacgaacaaactggctatgcagcagcgttaagatctagataggctaagagaacgagcaaaagagtgggacatatgtgattagaaagagacgggcgacgaacgagctctgaggcaatcgaagtgatccccttcacgacgatccatctacacgagatctgttaagcagttgacgcggcattaaattgagcattaaggcgtcttaatgattttaatgcgtgtctgcgtcggcgtcgtcttattagccgcttttgtggcttctaccactttttatcgaagccccccgcatgccgcacttccactgccaacaagcacttgtgattgacagttttgtttatggcttgtttcgctttttgatacgagtccgatatctcgcatctcatctggctgcaaagatcttccggcgaacaagaaaccagccgaaatgtgcatttcctttcggtccctacctgttctggccatgacttttagaaaactcgctgcggctaataacatatcaattaggccgcctaatggccaagtattggaccaacaatgggaatctgtcaaatcatcattaggattagacacatggcgggtgggggccagagaagtagtgacgcgattaacgtcaatttggatggattcgtcggaaacacaagccaaattagagcaaaacgacgagacgagtgtacattctaatcgtggaatagcatctcatctcactaaacgcaactttcccgacaactacctagcattacaatcttaacttagaagtcataatcaaatttcattgcgttaacgaccgacaaattttcagacgccaactcgaaatcatttcctaattgatgtgtcgatcaatccatcgaaattgagtgaatgggcagtggcttaggaagttggttcattcaccattagaattgtgaatgagttttgagatatatgggcagataattatgtgttactattctttaacatgtaaaagatattaaggtggcctatctatataaatattcacaggacatgtatcatgttcctctagcagaattgatttctgtcatattacttcttgatttatgccaccttttaaccaattccccatgatatacgagcctatccatcacatcattcacactttgggaaattgcttaggaaagaccccagaacaacttttgttttaacctttttatttcgctgctcacgcaattaactcacgcactccgtgtggcaactcggcggtggatattttatcgggatttttttggatggattaatgtgaatggtgaatggagggaggtgaggggatcggctactgtccatcgcctcatgcggctgccccattcaaatcttttgtgctacttcatttgcagagaggctttgaaaagcgattttcgtagttaatttcattagcaccacagtggctcaaaataaaatgcatgctgggcgtgtaaatttcgattgattggtgaaaacgctcgcagaggttaattcggggcatttacaatctacgattcggctgctgtttaaagttaattagccaaaaatactgacccaattaatcgaactgtggcgaatcgaaacgatgtggcgcataattacattaggcaatcgactaaacgaaatgggctgactggcaatggactaacatcgaaaagcaattatccaaaagactatcaaataattacagatacttgtactctcgagcagcaacttcccagtctgactgcgtaattggttttgtttccagttggcccgccccgaaagtcaatttaagcatagaaattgaattcggttacacaaaatcccagccaagaacggccaaagaactgaaacctaaaccccaaataatatataaagcttggcctcggcgcttcgaaaactaatgacttccttgcatgtcacgtgatatgaacaagcgctagttggaacacccattagggaccaatgccgcctcatctggaactcctcctctgctttctgggaatttttattgcctcacattgtaaatacctggcgtctaattgaaagccgtttattagtgggtgggcggcagtcggccaacaggttttgacccgccgcagttcgaaggcttccacttcgcgccatccccggttcagtgggcaaattaactaacacgttgttattagccgggttgttcaaggcttttagccagcgagttggcaaacagctttatgacttacctacccgccccattgagcatactaattaaaatctaatcaggtgcctgaatgcgtgggcgaatggaaaaggaagctccaaccccattgccccgtattagccattgatcacgctcaattaattgctcaaaaaaataatgattgctattccaggattcccttgtaaagtagctattattactccttgacatatatcctttattaacactacaaacttcatatttcctgtaacttttgatctcgcttttaggctccgttgatccctccctgggtgacgatgatgccactgatctacgctgcggcatgaccctgacgcagttgcgcagcatggacaatcacatggccagtatgctgcagcagcacgcgaaaaacggcggagccctgccctacggtccaccaactccgccggggggtcagcagccccaggtgccgaatgccacgcccctgcaccatggacaacagatgggcggccaggcgggacatgcaacacatgccggacatggtcatcctacgcatcatgggcatgcgcccttcggctatcataatgcatttggctttggccagggcggtcatgggtatgggcatccggaggaggcggcgggcaattacctcaattcgatgcaccagatggtcgaggccaatcaattgcagaccggagccaatggggccaatccaccgcccgctccgctgccgcccagttcctttggcagtcatcagcagcatttggccgccttggcggctcaggcgcaggagcagcagaatcaacacagcaaatacgccaagtcatcgcccactggagcgggtcctcctccaccgccgggtgcctactttatggaatcccagacggcgcctgtcgccccgtcgcaaatcaactacgacgagcgttcaatgtcctcggccagcgatttggaggaggatgacgatgatgcggcaaagttgcagctcgatgtgacctcgccgcccactccgtcgccacgtggtcagctggccgccaagcgcaagtccgccggcgtcttctgtgatgataatgagccaaaattagccaacggtcagttgccaggcggcaattacggcattcgtccgcgcagcatggaggaggtgcatcatcagcagcaatcgcatcaccatcaacaacaacagcagcagcagcaacagcaacagcaactgcaacagcagcagggctttcagcacgactttcgcaacagtggcaatgggaatcccaatggcaacagcaattccggcgatcatggcgagcgtttgaacgcggatagcgacagcttggtcaacggcagctgtgcctccagcgaggatctcaaccagaccaacagcagcgagcagggcgagaagatcacctccggcagcgacgacgaaggtgggtacaacgtctatcctttaatgtccttttgataaaagaaagcataatgctgataacttactagcttaatcatcgatcaagttgttttattggtaataagataccagtatcttaacgtatcttattcacacctttaacaaacatctgtattgcaattttttgtattgccaggtcaagatgacaactgcgccaagaagaaacaccgtcgcaatcggaccaccttcaccacctaccagctccatgagctggagcgggccttcgagaagtcccactaccccgatgtctattcccgcgaggagctggccatgaaggtgaacctgcccgaggtccgcgtccaggtgagtcacctccaccagtacccaccaatatctcccgtatctcttgtgtctggtagtgatttacattcgagtctcggctaattgggaaatcaacgtgtctgcagctggagtaaccgccagccaggctccggaaattaaacaatttccgtttgctatttattttaacgaaattaagttgtacccgctctttatcatccccttgcatttaaaactttagtgaatgtaaggtgatagatgtgcatacatttagaatagttggcagggatttatgaccggagatccttaatgagaggagaactgcatatttgcattatttaattgactcgtacctttgcttatccctaaaattccaaaggaaaagcattttgtatgcctttcttatttacgatgaactcaaattagttgaatgtggttgcttacatttacatattcgaattaaactggtttattttgccataactcttctaggcattcattgatatttttgtgcggtttgatttcccctcaagagcaataataattgtcaaactttgcgcataactcgactccgagtgcatgaaacaatttatgtctcaataggaaaatgacagggccgaaagagttctcaacttggtcggtggcccattcaatgggtttccttttctttctcggacagaattatgcattttatgcgactatgcgcttttatgctcctttatgcgactgcgactttgggccaacagccgtcagtgtggcaatgtagcaatgtggctatgtggcaatgtggcgatatggcgggatgccatgtctggcagccattcgtttcgggtggcaaattgtgacgtgaacgggcagggcgcctcgtaaattccattcacagcggtgtagcataaaaaaacgcttaagcagcaacaactatcgatggttggcagtgggtgttgcacatacaaacatttaggatagatatttcaatccacatttatgcatagttaatcaagcaaacagtctagatcatatttcctatctaaattcagcttaagctaaaaaatattgccacatagattgtttattaagtagctccccatatctttctgtgtagtctccgaaggaggaaaagtgacttcgagcctgaggctgcagcaagctctagagtggaccaggcatagttggcatagttttccaaccgcaaaagtgggtgtgaggtgaaggaatcaccccacccggtaaatgcaaaggacatatcaaatttcatgatttcgtttcgtttcctcagccgacaaatcatttttattgactaaacattatcgtgcccacagccagagttggcgacactgtcgtcggcgtctccaacacaacacaggacataaataaataaacaaataccgaaaatgccgtatgtatttatgggtgtatctatatagccccggctatattcccaccgcacaaacgaaatacaaaggtaatgaagcgaaatcgcataaaaatttctcctcctcagtcttttgggccttctgagccttctggccctcatgtgtcactttgtcaaattgacacgaattcaaattatgccagcaggaaccgaaacgagctatggccatagagtaatcgtatatatagtcgtcctccaaccctttgacttgctttttcgatttagtgggctgcattgggccaccccatccatcccatcccatccatccagatcctgtgtgtttgtaatcgtatttgcggttagtttgcatgaagttctagttatcgtttttactcctttgctaccaatttttttcctacttttttttcgaggttttttgtttttgctctttgactgggcctgggaaattgcttggtgtgcaactcgttgaaggtggaaatttgttttgattaagtttgctgccacacacacacacactgagtttaggctggccaaaaaaaaaaagaaagaaaggaaaggaattgtaaccaaagttgactgagttgtttctttgcaaaaccagtcagccatccaccaaatagaatttctcgtttagatgagttcatttcaggggttttgcattggtcgcccacttttcgtcggtttctttttggctcgcttgctgtcattgcattgtaatagatttgttaaatgtttgtttaaaaagtttgattggattttgcattttgtgtatggcaatggaatgaatttctctgtggcttgtttgattgttgtttaaatggcaatatacgttgacagacaagttgcccaactatgcaagttcaattgaaattgtgtcattttgcggtctgcccacagtcgaaagaaaactaaactaggctaaagacggtagccatttaaacaagggtttgagcaagggcctaagctcggggattatcgctgatggtaaccaaaacaaaacgcgttaagccagcaaattaaacggcagattaacggccaacaaaaaaaaaaaaaacaaaactgccgagccgagacgatcattaacacttgccgtggaaatgtatcgccacttccccccaaaaaggacacacacaaaaaccctgagagcagcaacatatgtcctgggagatgacaattacttttgtttggattactcactgacaggactgagtgcggcttttttcgtccttcgcgagggttgtctggcgcccagtcaagggttaaagccgccagtcgactcaatcatacgccgcatttaaccgtgggccaaaagagtttaattaaaacttaatttgccatgcccgagcgcagagaatcgaatacagatgggattgggatatacggagaaggaccttgctttcccatacgagaaaatttgggaaagtatttccaaatgcatgtctttatttagttagtatgataaacatgggtattttcatgtgcaacgagcacctttattgcgtttattagcagaaaaataaacaaatatagaggtcggaggcaaaagtttgtgtcaattattttgcatagtcaaatgattaaatatcgtaaacctgtcaaaatatcctgcgccaaaggtaaataataatcctgtgtaatagtttatttatctgcatatattgctcatacgacatgtgtgacgtgacatagacagctccaagcgctctttatatccgtgtctatctatccggtttgcatgtgtgtgtgtgtaagtgagtgtgtgtatgtggatgtgcataaacagcaaacaaataaaaatgtcatttcactaacaaataaaatagatttttattgcattccacttggcctgcgtctttgccctcgccttcgaagggatttggatttgcccccacggcattgccacatttttatgctcatttcgctgtgcgctccgttctggtttctgcttcgattattttttattgaatatttacttcaacattggcattcgttcgcttgcatgaccgttttatcgacaactatccacccataacgctttcgttttcgttttcacatgccataataataatgcatattagcttcatttgtttagaccagctccgtgcctccgtgcgccatgaaatcctatacaaatctaataatgaaaacgattgcttggcccacccgactgactggcaaataagctcgttcatcgccatcatttggcaacttgaatgtcctgtgcgggtcatcaaatcgttggaatgaataaagccattgaatgcttaagtaggctggtcccactgggcgttggaaatgcgaggagaaaaagcttttcaaacttatttaacttattgtcatgcggaggtccctgcaggaccactgaagtctcgatgggctgttgttgggggagtggccggtccttttaaaaccatttattaggcacttgtcctgattgctgtccgttcgctcagtgtggccagagcagttaattttcctcttttttttgaagcactcccgacgatataattaaatggcgatgaaatatgcatagaactcaagccgcagctgtggactagaagcgggtggagatggatagtagggtgggtgtgggcagagcaattaacacattatgccaccttggcaaaacaataataaaaagcgaacggagaaggggtgaacgaggagagccagggaaacaaaaccaccgcaagggtaaataaatgtcaggtcacaaagggcagtcgaggatagggggtggctatacagtccggaactcgggcttataatatatttaggcagggtctgtgctcaggctaacacatctgccgtttattaaaatgtattttgatcaactgtcaacagtaaaacaaagcgccgtacttgaacgcaactttcaggcacttgacatgagacggccaatttgggcaacaaggacgaagaaaacaaatagtcggtttaagggtatacaatatgctttaaaaacgaattcaactgactttgtactttgattatgcaaattcagttcttctattttccctataaacgcaactcacgatctcatctctaatgtgccacagaaaccgggttatttgcgactcaattctaattgaagatagatagaactaagccgctgaagagacggggaggcgaggggctctctctctacagaagtttgccgctttcaattaaccctcattagaagctcttttttttgtgggcaaggagaagaaagccttctgcgatcgagaaacgcccacgcagaatccgtgtcgcaattaattaaacttgaaagccaaagcgcagatagcaggagcttcagttaaattgggagcacgggtatatggggattgggaagatgacgacgcagttgccgcgcggctcaaaggaatttccgatgttggagggagtctgcggccggagatgccgaaggatctggcatggagcacaatgtcggcatcgtttgtgtttgtttgcgatggcatccaatttcattcttttatgcgacttattgagtttgctctgcgccgctccacctctcctcttctcaccactccaatgtgtgtccttaaggtcctggtcgggctcggctcggctctgatgtcccgatgttctgctcttctgatgtcctgatgtccttgcccggccaaaagggtgttgttgtctccagtttgagagcccgtggcagagtttaaaggcagcctatgccgcgtccgcctcccaggcgcatccttgccagcgcttaagccacgaaacgtgtccttgtgcgcgctatttgcctttccaggactttggctatgattgcgcttttctgcgcaccacccacctgatggctaatacaaagcgaatcggccgtgtagttggagttccgccacgtgcgggggatttgttttagttttcggctcggttgtctcgtattcaccgtggcctgtcaacacattttaatataaatgcataaatcaaacggaatgaaattataaatcatacacatgacccccggcttcaccctccatcgaggtggttgcaacccccgaacacaaaactcacttgacatcacggattgccttgcccgccctcaaggttgtcactccatttgtttggcttagagcgaaataaaatatataaaccaatgtaatcaagcgaagacaattacaattacaatgaaattatttcgcattttgtcggtgcttttttttttaatggtaaattgcttttgcccaaaaatatccttgcatctctgagaaaacagccagcggagcagctgttaatacgaccctaaaatgctcgagtgtcaagtggaaaagtggaaagtggaaaagggggagtggacgaaatcggtgggtgggtggtttgtttggagaggccatcacacccctcggtgatgggaacattatgaatattattcaatttgtacgcctaaatgctttgtaatgagttgcacatctgttcgcttcagcgagtgtttaatacatcattttttgcctctcggagtcaaaaggcaacaggataaaggataaaatccaaagtgcgggtgctttcgagtattaagtttttattgcattacatccccgtcctctgtcctctgtcagatgtcaaggatgcactcaatccggttcacagtttcgagcgcgattcaattatgactctgatttcggattgtgtaatctggctaggggattgatgaaccttgtataccttgtatacccacttcgcatccaaaacatttggatgcctctcggctgtcagtttaaatgagcattgggcttaagttgtcaaattagcgggcaacaatacaatttcaatttcgatccacagtcaatcaaaataatgcccaggccagaaaataaacgtatagggaatttccaaaggtaaaagtaaggtggaaagggggactgcatgcgatacgtaaaattgacttaatcagctttatataaatgcttattttgacaacaacgctgcgttgagcccccacatgtatgtacgctaattatgtggggcccaagcggcttattataatttcagacatcatgttcataaaaaagagggggaaaaaacacaaaaatcaagcaaaaccaactcctttgcactacgaattccgttttcgagtcgcttttccgcttttaattaattcccgctgcctgctaattggttttatgcgtttcccaaacgaattcctcccgccaactgcataaatcacaaaacacttaaacaattttccgagctctggcctcggcggctcgttcacgttgattacgtgctaattaatcacctaaacaaatttcgcttcggctggcaggtggaataactataataacgatattattattttcgagagcacgcaaattataattaagttatcaggggacaaacttttgatacgacagcgcccgaaaactaaagcgcgctacactgaacaaaaatactggttcattgcgctttttttttaatagagatatatgatttttagtaagatacttagtattcgattttatataccaacagcagctacaaaaaacattcgatttttaaacttttagtgtcagttaagtattgataaatggcaatggtagcaagtaaacttttgtttcacctcttcactgatttataactttgtacagatttcctttttgcagtgcatcttaatctacgagtatgtgtgtgtgccccaaaaattattcaaattgagcgtggcaactgcttagaaccggtctgaaactgatgggcggacattccctcggggcccgcgaatgttgcaaattaaaagtgcgtcaacagaaatttttgtccctgtgcccgtgtcctgcgtcctgtgcctgggaagtggcaaggacttgggctaagcaaccccgaaaggagcctgcctggtatttgtcgtcctttgtagccgatttaactgcttattaactgtgcgtgcggccgtttcttttgctcggaatgctgcccggcatgtcagcgagtaaataaatagctaattaaatacagggtgccacgtggcgccgagcaaacacgccccggcaaacaaaccttccctgctcctgcttctgcttctgatccttttccttctcattcccattcccctgcaccctgggcaaagtcagtttcggtgtggaacaattgaaatgccagggaaacccgagtcctgatcgagtgggtgtcggattggcgctttcctcgacttttctcatgccgaaattcgaggcggagtcgccgtccgagtctgcggctgtcagaaaatcaagatttgtcgcgtgtttggccttcgattacagggctagcgacggaaaagtaagactgcaattagccaagtcgaggggatagtgtgaaaagctgaaagtgtatggattacggttcgcttcactgcctagaaatcaagaatacttgcgatttctcacccttagagtgcgtacatagggatttttaatatacatagctcatatgcagaagtagatcttcgacttaatttcctagtaagccccatacatttctccaaaacccggctttttcaaacggcggcaccgagtgtaaatcaatatgcttgtcggctcccaaactaattaaaacatcttgcggattgtggccgtcgtcaaagcttttgtcttttgctctaatttgtcctgccatcgcacaaagcgaaaccgaaacaggatgctcgagcttcggcttcttgggcaaaccgagttcgattgcgagggtcctgggccggaactaaaagccaacaatggcataaaaaaaacatgtcataaactagcagggcaaggactacacgctgcggcattgtcggactgaaaattatgacaggccattgaaagaattgaatcggacggacggctgaatgcttcgtgtctgtcgctgtctggaactgggacagccctataattaggctccccctggcaggattcgaggattttttaattgaattaaagcttgcgcgaggagcggcaagagttcccatgcaattcgcattcggggttattaccttaggcgccgctatcaatatccttgaacgcaacgggttgtcctgccccgactttcgaaccattgcccctggggtcgcctctctaattgcaggacaagctggggcaaaattattttgctgccatgcaattagttcgcctatcgccgtacgaaaacgagctcaaacaaagtgcattcgatggcatcgagttttcaatcaatttgattgaattgcatgacaaactgacggcactgggataattatagtcctgttgacggcataatatgcttatgccatacgttggcactgagttgtaagtagatcgcaccaactgatacccagtaccccccatgggtagagataaaaggtttccctctctccaaatgaacctttaaccagcttgtttctgggaaaattgatttcgattttgatttttttaaggatttacttggtgtacaggagaatatattaagacctgtaacgaaaaacgtttaatttaatctggtttttaccttttcataaactataagctgtgtggtcaatctaaaaacccccattatactctccatcaattccagaggatggttttcgaagataatttatcccagtatccttcgccacactatggcacagcctaccgaaaacggaagtatgaatattccaacaacaagtcctttctgtgtaatatcaagtcgaactgcaacaattgaaccacccccccccccccctctggccgcccaacccgctgcgccaaccagcccccttgttctctacaagttgcaaacagttttattaagctgctgaagctcttgtgtgttaaaagtcaattttccaatttgcaaactgtcagaaacattcgaaaagcaatttctgccacatagcgagtgaaagagagggcagacagcgagaaagagagtgcgagagagagagagagaagcgaaagagtgagcgcacattgcgtatacgcctggtatgctgtgtgagttacttcaacatctatgtggggcttttgcccatttttgtttctttctttttttccctttttgggtggaacgacactttgcggcacaagttttccaataaaacggcaaaactttgctgcgaacaaaattaaagaagacgacaaggaaaatggtagaatgacattgccagaggaagagcaagatgatgatgttaaaagggggagggtgggagtgggagtgggtggctttgggttttgggtggtcgcaaattgtttgctgccaatgtgaagtttatgaaaaagattaaagttgaaaagtggttgcctgatggctgtgttggctgaggggcgagatggtaggtgggcagggggcgttcttgtggtgagtcgcgtgctccacatgaatgccaaattgctgcaggcctgctcgataggtgggatgggtggttgactgggtggtgggtgggtgcttttgaggacacaaccgtctaaatgtagcaaaattgaaaatggctgaaaatggggatgcctgcgtgtgtgtgtgcccgcctgtttgtatttgtgtctatggggtggaaaattgagtttggtccatgtcatggcaaaaaggggggcgcggggggcagggcgctgtgggtgttgggtggtggttcagcatcaacggccaaagatgaaagcagacaattttgccagctttcgggtggatgagcgtggtgatgtctaaaggtcattatgatgtttgtgggcgtgccaccacccgccagctgattgcgagggagaaatctttctcctgcctgtctccatctcgcttgctcgttttgaggcttgtatggaggattttcattatggcgcgccatgaatggaaattacaaaattgattttgatgatttaattaaaatgaagaagcacaaactcaaattataacagccagcaagaggccctctctttctttcagcttccagtcctctctttctctccacgattgagtatgcttgtgtatgttcgcttgagtgtggggagttgaatgtggcctaaagctgctaactttaatttattttcctcgtacagatttgagagacaggaaattagactttctaaatgggatttcaatttgcttgagtagggaatggaaatggttgtgcggggagtggggcgaaagatgaggagggaaagcggagccaacggcattagccattttgttattgttgcctgtctgcactgctaattgatatccgacagatattcaaagataatcaaggcacaactctaattggaacggatttgattggctcttgattagcatgaaatgagttttcgatagttacacatcaaacagtgttttgtaagtcggggaaggagttttcaaatattttctcatatattgtttcaatatcttatggtgatttattccagacgcctacaaagaattccctaggtatttatttaaaccgaaattaaaggatagttcgttttaaatttgtcttctcttgctgcgtagtgtatttttaattaagccatttcaaattgcattttccgactggcaaatttgttttgcaaatcactttcggggcaacgaaaataattttacgcgccattatccttaattaaatagccgcaaagcgactgaaacccgagcgcacaagcagcacatgcatacatacatacatatacacctatagatgcttgtttatgtccttgtggcagaagcagcaaccaaaaacagcaacgactacgacaacaacaacattatttcatggtaatgaaattttcatcagaaataatttcttattaatttgcgcaaattgcatttaattactttgagcgtggcaggagcagaaaatgggcgcaggatgagcagaaaggtgggtgaggggtggtaataaccagccagggggcaatgaaaactttccctagatggcttttatcgccctctccctctcacacacacacacactcttacctgctctcgctttctcttttcgtctctgccactaattagacagccacactaatacacactcattgttgcgataattctaattagagccaaggcaactaattgaattttattttatttccttcgctactttgcttgtgtgcgtgtaggtgtgcgtgtgtttgtgggtgctgctcagccattttgtttggtcgcttttatggctgtgtgtgtgtgcatgagtggatatatctctgctggcatctctgcgagtgtatttgtgtgtgtgtgctttcattaacaactttgtgttggccgccattttgctttttgtcttgtgagactcgctctctcttttatgagctccagctctctttgcggagctcttttgctactgcttttcatttccgttttctaattactaggtattctctgccacgaaatgaaaatatctttcgcttaacgcccgactaacttagcgcgtttcttgtcaagtgtttaatttaattgctccagctagcaatcgaattagctaatttcattccgccttttattttccaggtgtggttccagaatcgccgcgccaagtggcgtcgccaggagaaatcggagagtcttcgcctgggcctgacccacttcacccagctgccacatcgcctgggatgcggtgcatccggactgcccgtggatccctggctatcaccaccactgctcagcgcattgccaggtaggaatcttcacatgttctgctctgcgaaatattatcaaaacgttttgtaaatggtactaaactgctggaagtttatcgagtttaatttgcttacatatacaaaacacaaagataaatcagctcatatttcattacataattcatacttagttattgaatgacctttcgattttatctacccgcaggctttctctcgcatccgcagactgtgtacccaagctatctgacgccgccgctcagcctggcgcccggaaatctgaccatgagcagtctggcggccatgggccaccaccatgcccacaatgggccgccgcccccgcacgtgggtcacgggggacatggtcagccgcagccaccgccaccgccgccgccccacggagtgccccacccacatggcagccaccatgtggtacccctttctcacctctcgccgcacctgtcacgcatgtcgccgcatgcgacgtccttgggctcgccccaccacggagtgacccccctcggcacgccgctgcacagcagtctgccgcccagttcgacagccaccaccgtggccgtctcatcctcgcagtcgtcctcctcctccgcctcgctggagtgcagcggtccggatgtctgcatgtcgccgcagaacctgagcattggcaatgccgattccaatggcgatggacgcgacctgagcagcgacctggatgccggcagcaccagcagcaatcccggcagtagtctggacaagtgcgcggccagcgccaacatagagctgctcgatgtgggccgggatagcccaccacctccgcccactccgactggcaagggttcgagcacaccgccgacggacatgcgaagcaactcgatcgccacgctgaggatcaaggccaaggagcacctggacaacctgaacaagggaatggtatccattgtctagcgccagtcggttcctagctaagtgcacctccaattgaaaacagttcccagtcccttgtatcgcgtcatttaggtgtgttctaagtttagtgaatttcgtgttgtaagtacatatttctgaggcagtttcttagatggtaaactcaacgtgtgcaaagtgtatttgtaaaattttaattacttcaatgaaaaacggctgacgaagaagtctattcctaatgcatattagcacaaaataaatatgacaagttttagctcaacatatgtgtgtttttcttggtggcatgggtataatcatttaatcttatttaaacattttaaacatcattaaagaatataccaattcacatacataggttacataggtcacgttcttattttaagatttgtgtatattttttgtgggagttgttcaattagcaggggagctaatcagcgaggtaatcagtcatcaataatacaactttttgggccaattatggaatgcttatctgtcgcactaatcacctgtgcaaggctacttaatgagttgattaataagaaaatcatgagacattgagcagaaaatgctgacaagcagcaattaaatgcaattaaaaaggactaaatgcatagcaaacaaaggactcacatgggaatgggcctcctgttttcaggtgcagtagccgcagttgaatctaataaagtaacgaataaaattataattgattaacgccgcgggcaattaaaatgcaagcatgttgcccacaccagggggtaacaatacgagtatgtgttttcagaacttgcatgaactactggctccatgaaatgaaaagcatatcccatatgagcgtcacaatttgctcaaaggacctcggcgcaatgataattgcccgcaattacatcaggactcttatcacacgcacaacatctagccggaaaatctcacccaatatgcatatgaagcgcaaaacatgggaataaaacactgcgcttgcgggaaaattgtcgagggaaatggaattggtggccacttagcagtgggtgagcgtttagggccaggaacagttttatgacaatcgccgatacaaggtttttcagttggatacaagcatgtcatgccattaaatagaaatgattttacaagaatccaattcaattaagaactttctccagctaacggaaaagtccgtatttatacaatatataaatattaaactatacaaaagtcttttgaattatgtttagaatcatacggttaatataaatcataattat

SEQ ID NO: 21305 - DNA, 3266 bp, DROSOPHILA
cgtcagcgggccacagtcgctgccttcgagtttattgccaactctgccttggtccggtgcgcaacggtttcggtagttggtagtgcatagttggtattgtcggagttaaacttcttctcgcttgtgactgaaaaatgcttgacatttagccagaaaattctgagcgcgattcaaatacaatttgtatgactgtgtagagtgtgtgtggtgcctcaactgtgatcaatcatatcattgccgatttaagtactcttgccccttgcaatcgaatggatatcaaagcctcgacgccacctgccctcgatgtggctcctggcagccaggatcaccagccggaaaaccggtagcaatctccggcgccatgtccggttcaggtggtgtggccaactcgtcctccacagcggcggccaacaataccgccgccacattccagcacatcttcgagcagctggtacagcagggcggcggaaaccacaagctgccccccaagcagctggagcaactgcgtcacctgctcggcaacgtgagggacgccaagaatctgcagatgatcgtggagaagttcaagaatctggagcagttccacgagcactacgccgcccacctggctaacaacaacactgtgatctcaacggaagatagcaacgacttggttaaggataatgccaggaagtatggatctggtggacaaacgctaacgccccgccacacaatcgatgccattctgggcctaaagaatcgcaatggcgcggcgaatggcagtggcaggaatccggaaacggtcagcgatgggctccgttgatccctccctgggtgacgatgatgccactgatctacgctgcggcatgaccctgacgcagttgcgcagcatggacaatcacatggccagtatgctgcagcagcacgcgaaaaacggcggagccctgccctacggtccaccaactccgccggggggtcagcagccccaggtgccgaatgccacgcccctgcaccatggacaacagatgggcggccaggcgggacatgcaacacatgccggacatggtcatcctacgcatcatgggcatgcgcccttcggctatcataatgcatttggctttggccagggcggtcatgggtatgggcatccggaggaggcggcgggcaattacctcaattcgatgcaccagatggtcgaggccaatcaattgcagaccggagccaatggggccaatccaccgcccgctccgctgccgcccagttcctttggcagtcatcagcagcatttggccgccttggcggctcaggcgcaggagcagcagaatcaacacagcaaatacgccaagtcatcgcccactggagcgggtcctcctccaccgccgggtgcctactttatggaatcccagacggcgcctgtcgccccgtcgcaaatcaactacgacgagcgttcaatgtcctcggccagcgatttggaggaggatgacgatgatgcggcaaagttgcagctcgatgtgacctcgccgcccactccgtcgccacgtggtcagctggccgccaagcgcaagtccgccggcgtcttctgtgatgataatgagccaaaattagccaacggtcagttgccaggcggcaattacggcattcgtccgcgcagcatggaggaggtgcatcatcagcagcaatcgcatcaccatcaacaacaacagcagcagcagcaacagcaacagcaactgcaacagcagcagggctttcagcacgactttcgcaacagtggcaatgggaatcccaatggcaacagcaattccggcgatcatggcgagcgtttgaacgcggatagcgacagcttggtcaacggcagctgtgcctccagcgaggatctcaaccagaccaacagcagcgagcagggcgagaagatcacctccggcagcgacgacgaaggtcaagatgacaactgcgccaagaagaaacaccgtcgcaatcggaccaccttcaccacctaccagctccatgagctggagcgggccttcgagaagtcccactaccccgatgtctattcccgcgaggagctggccatgaaggtgaacctgcccgaggtccgcgtccaggtattccgccttttattttccaggtgtggttccagaatcgccgcgccaagtggcgtcgccaggagaaatcggagagtcttcgcctgggcctgacccacttcacccagctgccacatcgcctgggatgcggtgcatccggactgcccgtggatccctggctatcaccaccactgctcagcgcattgccaggctttctctcgcatccgcagactgtgtacccaagctatctgacgccgccgctcagcctggcgcccggaaatctgaccatgagcagtctggcggccatgggccaccaccatgcccacaatgggccgccgcccccgcacgtgggtcacgggggacatggtcagccgcagccaccgccaccgccgccgccccacggagtgccccacccacatggcagccaccatgtggtacccctttctcacctctcgccgcacctgtcacgcatgtcgccgcatgcgacgtccttgggctcgccccaccacggagtgacccccctcggcacgccgctgcacagcagtctgccgcccagttcgacagccaccaccgtggccgtctcatcctcgcagtcgtcctcctcctccgcctcgctggagtgcagcggtccggatgtctgcatgtcgccgcagaacctgagcattggcaatgccgattccaatggcgatggacgcgacctgagcagcgacctggatgccggcagcaccagcagcaatcccggcagtagtctggacaagtgcgcggccagcgccaacatagagctgctcgatgtgggccgggatagcccaccacctccgcccactccgactggcaagggttcgagcacaccgccgacggacatgcgaagcaactcgatcgccacgctgaggatcaaggccaaggagcacctggacaacctgaacaagggaatggtatccattgtctagcgccagtcggttcctagctaagtgcacctccaattgaaaacagttcccagtcccttgtatcgcgtcatttaggtgtgttctaagtttagtgaatttcgtgttgtaagtacatatttctgaggcagtttcttagatggtaaactcaacgtgtgcaaagtgtatttgtaaaattttaattacttcaatgaaaaacggctgacgaagaagtctattcctaatgcatattagcacaaaataaatatgacaagttttagctcaa

SEQ ID NO: 21306 - protein, 146 aa, DROSOPHILA
MSGSGGVANSSSTAAANNTAATFQHIFEQLVQQGGGNHKLPPKQLEQLRHLLGNVRDAKNLQMIVEKFKNLEQFHEHYAAHLANNNTVISTEDSNDLVKDNARKYGSGGQTLTPRHTIDAILGLKNRNGAANGSGRNPETVSDGLR

SEQ ID NO: 21307 - DNA, 2818 bp, DROSOPHILA
aagttcattaaaagtatactttattggtactcaatttccggaaataatatgtcaaattattgtaactgtgcatggcacaatgaaatctattcaatgcatgagaatgtgatctataaaaggtcagtcacagaatcccatccagcactttgtttgttcaagatgtattccgcgttagttagagcttgtgctgtcattgcttttctgatcttgagcccgaattgtgccagggctctacaggatcacgccaaggataatggtgatattttcatcataaactatgatagtttcgatggcgatgtggatgacatatccaccaccacttcagctcctagagaggctgactacgtagattttgacgaggttaatcgtaactgcaatgctagtttcataacgtcgatgagtgagtgcaaaggttaacgaaggcaatatatgactacatttatcgcctctttcagccaatgtcttgcagtttaataacactggggatttgccagatgacaaggataaggtaaccagcatggtaggtgtgctttgcagatccttcgcctcccgatactcaaagattacttgcagtgctattttcactgctttttcgaaaagtccggtttgatgacggactataagttaaatacggatctggtgcgcaaatatgtttggccagccactggcgattccgttgaggcctgcgaagctgaaggcagtgagtgttctaggcagaactttttaattacaaacgaaatctttaatgtgtaatcctcagaggacgagacgaatgcttgcatgcggggctatgccatcgtcaagtgcgtgtttactagagccctcacggatgctagaaacaaacccactgtatgaataacatcaaaggtcacatctcggacttatcagtagaaaattataatgttagcgtcactaaatcaaatacggctacgaccggaacacaaaattggctataaagcacaggcacctgcaagttatttggtattttctgccccggctatcacgtttcctcattgccatcgcaggcggtgtttctaagcagacggctgagccgcttgccaatgggcttggggtactggttgttcttcaatagaaactccttggactggtgctccacggctccgttgtctagttggtacttgcacagcgtgtgcagcggtcgcacgagcgtttgcctcagctctggccgagattccagcactgccaggcattgcgcagcggtctctagtgtgctaaggcatccttcagtaggctgtgtacggatgatgtagtcacttatacccacggcgatgagtttcacctgtcgcaggcggtgtagagccggactgctagcgtaaatggctttagcctgaggccaggtaccatcgatgagcaccagtgtataaggacccgcactgtggtccacctcttccagtgggaccgagtcccgactgggatacagaagcagtgtttgtggagagtccaaaatcctctgcagatcagcatggtttctatggtttggaaaccgcttgcctttgtagacgacacattttcccggttccaaacccaactgcagcatcagtgcagtgcgtagcgatctcttctcctctgcagggtgttgcagtataacaatctgtgaggacaccgcctcaggtggatgcggtaaagccgggcaccagcaaacaaccacgggtcgtctataatagagttcatgaaaatactttaatttttatggcagattcccagcttcaccactcacttgcatttctcgcacttgttgcgtctgttgggcggatcggcgctgatgcccacgaggtccagccacgcgtcatcctccatacttataattgattaaattagaaaaatgctaagtttatattccgcacgataagaaatccgtaagcaacaattcgcaactaggtggcaacgcacacagccacatggcaaatatgaccgccctgtcttcgaatcagctgtttggagtgcagtgaaattgcgattatgcgatgacagaatcttgaattcctttaatctatacaccaaggaatcaaaataaatattaatttattaatacgtcaagaaactaaaatcgtaaaaataatacgaaagtgcctagtttttaaagttaaagttaatatagaatcttacaaatatggttaaaaatcaccgaacttcataaattcgttccagtataaacattccacttcagctttgtgttttctatttagattttgtatgtgaattgaactagttgttaagcttaaagttgtgaagtacatagcataatttaagaaaaatgcagagtataggatggacgctgatcatgaaacgcggctgcctctttagttgccgcaaggagaccctgaacataaacggatctcgatacacaatccgcgaaaggctggcgacggggtttgtaccacatttttcccactatctcctctgatatatctaatctgagtgtttaaacaggggcttcagtctaatcgaccttggggaaaacgcctccacgcgacgtagctatgcgataaagcgcatcacctgccacagcatcgatgatcagaatatagctctgcgagaaatcgaaaactgtcgaaaaattgactcggaaaacgtgatccgggtagtggattacgagctgaagggccaggcggacatagttataaacacaacgagcaccttgttcattgtgcttccctattacaagcacggatctcttgcggaccaccttcagctgcgatcgcggaaacaggaccacatgcccgaggcccagatcctgcaaatctttctgggcgtctgcgagggattgaaggccatccacgaggcaatgccggtgcct

SEQ ID NO: 21308 - DNA, 756 bp, DROSOPHILA
atggaggatgacgcgtggctggacctcgtgggcatcagcgccgatccgcccaacagacgcaacaagtgcgagaaatgcaaacgacccgtggttgtttgctggtgcccggctttaccgcatccacctgaggcggtgtcctcacagattgttatactgcaacaccctgcagaggagaagagatcgctacgcactgcactgatgctgcagttgggtttggaaccgggaaaatgtgtcgtctacaaaggcaagcggtttccaaaccatagaaaccatgctgatctgcagaggattttggactctccacaaacactgcttctgtatcccagtcgggactcggtcccactggaagaggtggaccacagtgcgggtccttatacactggtgctcatcgatggtacctggcctcaggctaaagccatttacgctagcagtccggctctacaccgcctgcgacaggtgaaactcatcgccgtgggtataagtgactacatcatccgtacacagcctactgaaggatgccttagcacactagagaccgctgcgcaatgcctggcagtgctggaatctcggccagagctgaggcaaacgctcgtgcgaccgctgcacacgctgtgcaagtaccaactagacaacggagccgtggagcaccagtccaaggagtttctattgaagaacaaccagtaccccaagcccattggcaagcggctcagccgtctgcttagaaacaccgcctgcgatggcaatgaggaaacgtga

SEQ ID NO: 21309 - protein, 251 aa, DROSOPHILA
MEDDAWLDLVGISADPPNRRNKCEKCKRPVVVCWCPALPHPPEAVSSQIVILQHPAEEKRSLRTALMLQLGLEPGKCVVYKGKRFPNHRNHADLQRILDSPQTLLLYPSRDSVPLEEVDHSAGPYTLVLIDGTWPQAKAIYASSPALHRLRQVKLIAVGISDYIIRTQPTEGCLSTLETAAQCLAVLESRPELRQTLVRPLHTLCKYQLDNGAVEHQSKEFLLKNNQYPKPIGKRLSRLLRNTACDGNEET

SEQ ID NO: 21310 - DNA, 7451 bp, DROSOPHILA
atttttattaacataaaaaaataaacttaacggaaacactctttataagtaaaactaaagtgtaagcaactaaaataatcattatactcaagtttgaatggcacaggatatagaaaagagcgtatgttgtaatcaacaaccaacaacctcaaattaaaattttcattgctttcagaggttttaatcatatttcaaattaaacaagctccctttagatatgtttattagaaaaaggtgtcttaattactttagaattatttcgtacctttattaacaacgtagagtgagtaccaggtggtttgttttgcctatataaagatagattgatctaaatataagtagagaagctatttagggaaaactacgggttttccatcgatttgcagttgtttttaggcgataactttccaacgtcgagatggtcaacattttggaagtgctaagcacggagggttatcaatcggagtgttctttgtcacttttccatggagtaattgagtgtgtgcatccataccgcatgtttgtctggaagctaggatattctagattcacgactaggttctagatctattgaacctatttaaacggtgtaacatgctagtatggcgtccatcctgatgtgcggaataaagtgtacttagatgatccatgcgctgttcgtttgtgcttactattctattataaaataatagacctctccaccagacacacagttcttattaatcatctttccatttaagtggacatgacttaagaaaatgtgttatctggtttccaggtaatcaaattttttaggttccatattattttattcttacattttctgaatatacaatttattttatgaaaataatttatatatttacacgcaatcaaaaatttatgcactaaaatctaaatataaaaagttatcaatattatatttcaaaaacaattaattgataactaattaatatatacttaaactaacttcttccttttctaaattaattaacaacaattggctgccgttataaaatcgatttatttacattccatttctcaaatgttgtacaaatttttgaagaatgtagctaattcgaaaatgtaatacattattgtgggtttaatgtatgttctctttatcaatctaaccgcattacgaactatctattaaaaattattattcctccggttaaggttgttataagatgggttcaaattggtgttgaagttgaagagtgacgacgttgtcagatcgtttcgcaaaacgctgcttgggttgattgccggtagtttagagccgaattgactattatatccgccggatccgccaaatccacgatcagtcggatacgcgttcgaagtgaaggggttagctaagttagtgctttgttggttgttaaatcgagccacatttccggagtagttttgaccagtatactcactggtcggattgttgtttaaatttctggatgaatgttgtgtcaacaaattatcattgttattggaattgggaatcaagttagtagaagtgctgggcactgaattcacggaactggttgagagtgggatgtcctggcgtttcttctgctcaatcatcgtatatacctgaagtatcttttgaagttcctctcggtttatagatgttttgccttgggacaccaatgaagaagccagttttgccgcaagctcagttttatctaatggtttatcgaggttatgcggtaagtttttggctatctgcaactctggtttctcagcgagctgctctatatctttggatttgttaagtttactggcacattgaagcaaccgttcggtgtcattaatagctctcttcaaagccctttctttagcgggatcataaatatgggagatcaagagaccagtaaatttttctttaacggtctccaaaatagcacagttttcggctgttaaaattgaagtatgcaacttttgtggacaaatcttctgcgattgcagagcttttactagcatctcggtaacaaaaggacccagacttccgagataattctccaaagcagttaaaagacgaaggacatgaatcacattcggcggctcctcaaccggagtctctacatcaacagacactttctgcggttcaatgctagattccggtctgcgctcatcatcgggctcatcagttttgtccaaatgaacgtgatacttttcgtcctccaattcgttattggtcattggcagacatagccgttcgcgacactttattttgatattttcaatatcttgactgtacaattcttcgatacgagcattaaagaaattaatccattcgttttggaagttgtacgtgcgatgattaatgccagccagtataagctcatccttgcggcgcttccaaaacatttgccactcagcttgataactcggatgctgttcgggatcagatttgtatgtgtcgaaggacacgtttagctcacgcaccttgagatctaccatgtgacggtacgcctgccaaatgtcgccatcgcgcaaaggcgacactgacctacgctccacattccagtgccttttgggggcgaccctctttctttgatcaggtgatttggatcttgagcggttccgctttgcgttccgggacttctgtgcatcgcccgaaccatgtctggtgtccctaagaaaattatcgaccattcgcttgtgagtttcatcatcaatagggggtgctgtattattttggggcacattctgatagcccgcatactgtggtacgtatggagggacgtagtaaggattcgaattttcaacgtttatcaagggctgaacgttggttctaatcttgtcgatcaactcctccacctctttagcatctacgacgtgggtgaacaaaggcccaatcttttcagacgagtgctttctattgtatacctgggtgaacaaactctggcgatctttcgaatagacatgttcatagcacagatgggcgttttttcgaccatggtgcgtttcaatggcatgtgcaagcttatcaaaaatgggcatcattattttgcacacctcgctctccggaacatgggacacatactgacggtacagacgcattgcagtggggaaatgcttgtcaaaatactttaaacggtggttatagccaagcaaatggttgtgcatggattgctcatcagcagtgatctcgcagaggcaacattgatatctggcattgttgtcagccaaggtcttaactattttcaaaacgtactctaccccaacgagacccatgacatgacctttcctggattcaaatgtgccaccaggtctagctgttgtgtaatccttgggtgcaacatatgaaggcttaactaccttattgatagtagggcgcacaggttgtgcaacaacattgattggcttcttggccgcaataacaggcttcgggtttgacgtttgaactggaatgggttttttcggtgtttctggcggttttgtagcctcttttggcaaatcgtcaatgattacgagatctttctcgcgctctggtgtagagtttataagcttggctagcggaacacaagatattttcgtggcaagcggatttttgactatatctggatcagtcgttttgctgcgagccaagtccgcgttattcgatttagcattctgcacagctttcgtcgactgtggctttgatggagtctgtgagggaatttgaacagttggctttgtttgctctaatggttgcttttcaatctgaacatttactgcttgctgagaagtagtattgctcacagtagtttttggagcaggacctccagaattctgtgaagttttcgctgtattcattgcagactgtggagcctttttattagcagtgttatttgcgttggccgcattcacatttgccttcttggcttgaatatttcccgggtttgggttaggtcttttcttcgcgtttgcgccaataataggaacactcgtttgtacgggtgcattattccctgtgtttttcttaacaggcgtattatttactgatgtattcttttgattgggtggactgttttctggcacattcttttgaatgtttgttgtgctattctgaatatttttttgagtgtttggattatttactaccttaggggtagcagtgcttttcgttttaccgcccattgcaggttttttattttgcgtcggctgtgtttttgcaacttcatttccagctgcctgcttaacaacgttagtgtttgcattattattttgatttggtacatttttgtttataattggcaaatttttaacagcaggagattgactgtttttgttattattcgcattggtgttagggcccttttttgtgggtggagctacactgggcttgtttcttatttgcaattgctctttgagtttcattacggcaatatgttttttaccactaaggtggctaaacaaatttttgtcgccgaactgaacaacacggcaaatattacaattgtatttccgaagcgggtatgagggggttaccaatgtttcccatttgctagttggattgttacggaattcaagttgtaatatttcctccaatgatatttttgacaacatatcaagaaatttggtcccatccatgggtttgttttcaatgtttttggtattcattttgtggttgtaatacctttaaacattaaacagttttcatgtggctcggagaaagttaatttttctttcggttttgatacaaatttgatttttcttttgatttcagatattgagatgctataaaattgaaggaaaaaatgttttttatatagaatttaagcagtaataacaaaaagttagtcttactctattaagctgattttctattgatctacgaaatcagtaaatactaaatttcttagactacggcatacagttcaaattagaaaagtcggtaaaaatttaggaatatgcgattacatttataggaattatacagtcctggcctttcatgacgtctatttctttcggcaatacaattatatgactacatgcgctaaaattatgacccagcaaaagaggactatgccataactagtggaacttattgaaatacaatgtcagctccttaactcggttatgaaaagcattgaacttaattgaagcgttatgtagtcaaaaagcagggtttctgttgcctttgcttgaatttagcatactatgcgggtaaaacaaaaatataaatgtcgcatattaaaaagttaatattttcttttttagatcagcaaatagatgctttttaaaattcattcgatatggtaaactcgcatcttgactccactttcataaaaagttgaaatcgataatgatgttaaattactcatatatagtaaatcagctttgtatttgtaattaaatacacattctttaaaaagtacctgtccaaagggcataattcttgctgatgcctgagattagtcaactgctttttttgcagaacaagcccctttttttgctgagtagaaggttttatgtgaatgtatccttcttttacagccggaaatccaagatccatgctacatttctaccaagtgtatgaaatgtttcacatcacttgtttccatttgtgatacgctaccatataaggaacatacctactgagggtgcaaaagtaacagttaggccagacgttatctatgagaaggggtagaaccacccctggaaaactcggataaaaaccaaaagtcgacatatgcataaaagcaataggagccgcattgcctgaccgaatatgataatattgtcgatttctgcgcgacacagctccaaaaaaggtagaacaaaaaagtccgtaaatgacatcacgatatttttggcaagtttttaaagcaaattggttttctcacttaaaaactttcaaaaacatgcctgccaaagccagttttgcgcagctgaagaggtcaaggtaaaatccatttagagaacagtaaaatccccaagctccaaaaaaaaaaaaaacaaacaaacgaaattcacaagaactgcatatagcaggcgaagatattgatttttttgtttatgcatgtcccgcgttcacatgaggaaatggggaaaccaactgaaacacacacacttagacttagccttatgaataacttatgaatattatcgaaatggatatgtgtggattgtatcttatttgaggactcaccggcgaaacgcaaacgcggccctctaaccacttgcaaatacttgggggcccgttggacgtaaatgtggatgggggctattgggtgctcgatatccctctcctcttcgtcgcttccaatattccaattcgatgacagtcgctgcttcgctcgtctgctctctcgcggttcggtacgcaatggccacaattcacgatggactcgctttcaattacaaggataatttgcctttacttaaatttattacttgcatcaggccgaagaggacagagaatttcgatggcaacgcatcaaagaaacaaatgtcacatttgtctctacgggcccaaaagttgttctccttctggcgatgggccgactgctagagctggtagtgacctctacctgcaatcgattaatcgattgagtacatttcggtattatttatgaaatggaaatttaaatataatgtgaaattttttgatatagagtgaattattataaatatggaaatcaataattaccattcacattttacgttatttcaaaacaatcgataattaccattattctgtacagttgctcgttactcaccatttggtatctatcggttaaacatttataataatatttggttatattaataaaattgcaacaccttcaaaatagtttaaatttgttatacatttttaaggtataacttttcctaaattattgtaaatatacatatatggtttatttaaggctgtaaattatcaaatcccttttcaaaaaccaaccattgttcagaaaatataaattatatattttaatttttacagatatatactgatattgaaccggcaactatcgattgtcgaaatgcaattagcggagaaacatatcgtggcccttatgtttcctgcaatcgatgtttctaccttcactttcgtttccggcgtggtgcgtaagttgctccgcgttttcgcaattttaagcgattatcactttgtttgaactctaggccggccatgtgcctataagttaacagcaaagcatatcgtcgccattgggaccaaagtaactctcaaatctggttcaattttaatccgtagaaattttacatcatggacaattctggaaataaccgctacgagctgttgttcatggacgacgatgactcctctgggctcgcacagccacagattgccgctgtagtcgcggcgcccaagaagccggaaccggcaaaggcgccaaaggcaccaaagagcaagtcggagaaggagaacaagccggttgtggctgcccgcaaggccaacgctccggtggctaaaaacgctagtccagtgaaaggcggca

SEQ ID NO: 21311 - DNA, 3990 bp, DROSOPHILA
agacaaatgtgacatttgtttctttgatgcgttgccatcgaaattctctgtcctcttcggcctgatgcaagtaataaatttaagtaaaggcaaattatccttgtaattgaaagcgagtccatcgtgaattgtggccattgcgtaccgaaccgcgagagagcagacgagcgaagcagcgactgtcatcgaattggaatattggaagcgacgaagaggagagggatatcgagcacccaatagcccccatccacatttacgtccaacgggcccccaagtatttgcaagtggttagagggccgcgtttgcgtttcgccgcatctcaatatctgaaatcaaaagaaaaatcaaatttgtatcaaaaccgaaagaaaaattaactttctccgagccacatgaaaactgtttaatgtttaaaggtattacaaccacaaaatgaataccaaaaacattgaaaacaaacccatggatgggaccaaatttcttgatatgttgtcaaaaatatcattggaggaaatattacaacttgaattccgtaacaatccaactagcaaatgggaaacattggtaaccccctcatacccgcttcggaaatacaattgtaatatttgccgtgttgttcagttcggcgacaaaaatttgtttagccaccttagtggtaaaaaacatattgccgtaatgaaactcaaagagcaattgcaaataagaaacaagcccagtgtagctccacccacaaaaaagggccctaacaccaatgcgaataataacaaaaacagtcaatctcctgctgttaaaaatttgccaattataaacaaaaatgtaccaaatcaaaataataatgcaaacactaacgttgttaagcaggcagctggaaatgaagttgcaaaaacacagccgacgcaaaataaaaaacctgcaatgggcggtaaaacgaaaagcactgctacccctaaggtagtaaataatccaaacactcaaaaaaatattcagaatagcacaacaaacattcaaaagaatgtgccagaaaacagtccacccaatcaaaagaatacatcagtaaataatacgcctgttaagaaaaacacagggaataatgcacccgtacaaacgagtgttcctattattggcgcaaacgcgaagaaaagacctaacccaaacccgggaaatattcaagccaagaaggcaaatgtgaatgcggccaacgcaaataacactgctaataaaaaggctccacagtctgcaatgaatacagcgaaaacttcacagaattctggaggtcctgctccaaaaactactgtgagcaatactacttctcagcaagcagtaaatgttcagattgaaaagcaaccattagagcaaacaaagccaactgttcaaattccctcacagactccatcaaagccacagtcgacgaaagctgtgcagaatgctaaatcgaataacgcggacttggctcgcagcaaaacgactgatccagatatagtcaaaaatccgcttgccacgaaaatatcttgtgttccgctagccaagcttataaactctacaccagagcgcgagaaagatctcgtaatcattgacgatttgccaaaagaggctacaaaaccgccagaaacaccgaaaaaacccattccagttcaaacgtcaaacccgaagcctgttattgcggccaagaagccaatcaatgttgttgcacaacctgtgcgccctactatcaataaggtagttaagccttcatatgttgcacccaaggattacacaacagctagacctggtggcacatttgaatccaggaaaggtcatgtcatgggtctcgttggggtagagtacgttttgaaaatagttaagaccttggctgacaacaatgccagatatcaatgttgcctctgcgagatcactgctgatgagcaatccatgcacaaccatttgcttggctataaccaccgtttaaagtattttgacaagcatttccccactgcaatgcgtctgtaccgtcagtatgtgtcccatgttccggagagcgaggtgtgcaaaataatgatgcccatttttgataagcttgcacatgccattgaaacgcaccatggtcgaaaaaacgcccatctgtgctatgaacatgtctattcgaaagatcgccagagtttgttcacccaggtatacaatagaaagcactcgtctgaaaagattgggcctttgttcacccacgtcgtagatgctaaagaggtggaggagttgatcgacaagattagaaccaacgttcagcccttgataaacgttgaaaattcgaatccttactacgtccctccatacgtaccacagtatgcgggctatcagaatgtgccccaaaataatacagcaccccctattgatgatgaaactcacaagcgaatggtcgataattttcttagggacaccagacatggttcgggcgatgcacagaagtcccggaacgcaaagcggaaccgctcaagatccaaatcacctgatcaaagaaagagggtcgcccccaaaaggcactggaatgtggagcgtaggtcagtgtcgcctttgcgcgatggcgacatttggcaggcgtaccgtcacatggtagatctcaaggtgcgtgagctaaacgtgtccttcgacacatacaaatctgatcccgaacagcatccgagttatcaagctgagtggcaaatgttttggaagcgccgcaaggatgagcttatactggctggcattaatcatcgcacgtacaacttccaaaacgaatggattaatttctttaatgctctgtcgcgaacggctatgtctgccaatgaccaataacgaattggaggacgaaaagtatcacgttcatttggacaaaactgatgagcccgatgatgagcgcagaccggaatctagcattgaaccgcagaaagtgtctgttgatgtagagactccggttgaggagccgccgaatgtgattcatgtccttcgtcttttaactgctttggagaattatctcggaagtctgggtccttttgttaccgagatgctagtaaaagctctgcaatcgcagaagatttgtccacaaaagttgcatacttcaattttaacagccgaaaactgtgctattttggagaccgttaaagaaaaatttactggtctcttgatctcccatatttatgatcccgctaaagaaagggctttgaagagagctattaatgacaccgaacggttgcttcaatgtgccagtaaacttaacaaatccaaagatatagagcagctcgctgagaaaccagagttgcagatagccaaaaacttaccgcataacctcgataaaccattagataaaactgagcttgcggcaaaactggcttcttcattggtgtcccaaggcaaaacatctataaaccgagaggaacttcaaaagatacttcaggtatatacgatgattgagcagaagaaacgccaggacatcccactctcaaccagttccgtgaattcagtgcccagcacttctactaacttgattcccaattccaataacaatgataatttgttgacacaacattcatccagaaatttaaacaacaatccgaccagtgagtatactggtcaaaactactccggaaatgtggctcgatttaacaaccaacaaagcactaacttagctaaccccttcacttcgaacgcgtatccgactgatcgtggatttggcggatccggcggatataatagtcaattcggctctaaactaccggcaatcaacccaagcagcgttttgcgaaacgatctgacaacgtcgtcactcttcaacttcaacaccaatttgaacccatcttataacaaccttaaccggaggaataataatttttaatagatagttcgtaatgcggttagattgataaagagaacatacattaaacccacaataatgtattacattttcgaattagctacattcttcaaaaatttgtacaacatttgagaaatggaatgtaaataaatcgattttataacggcagccaa

SEQ ID NO: 21312 - protein, 789 aa, DROSOPHILA
MNTKNIENKPMDGTKFLDMLSKISLEEILQLEFRNNPTSKWETLVTPSYPLRKYNCNICRVVQFGDKNLFSHLSGKKHIAVMKLKEQLQIRNKPSVAPPTKKGPNTNANNNKNSQSPAVKNLPIINKNVPNQNNNANTNVVKQAAGNEVAKTQPTQNKKPAMGGKTKSTATPKVVNNPNTQKNIQNSTTNIQKNVPENSPPNQKNTSVNNTPVKKNTGNNAPVQTSVPIIGANAKKRPNPNPGNIQAKKANVNAANANNTANKKAPQSAMNTAKTSQNSGGPAPKTTVSNTTSQQAVNVQIEKQPLEQTKPTVQIPSQTPSKPQSTKAVQNAKSNNADLARSKTTDPDIVKNPLATKISCVPLAKLINSTPEREKDLVIIDDLPKEATKPPETPKKPIPVQTSNPKPVIAAKKPINVVAQPVRPTINKVVKPSYVAPKDYTTARPGGTFESRKGHVMGLVGVEYVLKIVKTLADNNARYQCCLCEITADEQSMHNHLLGYNHRLKYFDKHFPTAMRLYRQYVSHVPESEVCKIMMPIFDKLAHAIETHHGRKNAHLCYEHVYSKDRQSLFTQVYNRKHSSEKIGPLFTHVVDAKEVEELIDKIRTNVQPLINVENSNPYYVPPYVPQYAGYQNVPQNNTAPPIDDETHKRMVDNFLRDTRHGSGDAQKSRNAKRNRSRSKSPDQRKRVAPKRHWNVERRSVSPLRDGDIWQAYRHMVDLKVRELNVSFDTYKSDPEQHPSYQAEWQMFWKRRKDELILAGINHRTYNFQNEWINFFNALSRTAMSANDQ

SEQ ID NO: 21313 - DNA, 2938 bp, DROSOPHILA
gcgagaaatcgaaaactgtcgaaaaattgactcggaaaacgtgatccgggtagtggattacgagctgaagggccaggcggacatagttataaacacaacgagcaccttgttcattgtgcttccctattacaagcacggatctcttgcggaccaccttcagctgcgatcgcggaaacaggaccacatgcccgaggcccagatcctgcaaatctttctgggcgtctgcgagggattgaaggccatccacgaggcaatgccggtgcctctggcccaccgagatctaaaaacggccaacatctgcctgtcggactcttttgagccaattattgtggatctcgggtcaatgacagaagcccgactgcagattgtgggccagacggatgctcagcgcttgcaggacgaagccgaggagaggagctccattgtctaccgggctccagagttatttaccgtgaaaacatattgcacaattgacgagcgcactgacatatgggtaaagcagatccaagagagcgttattgaagttcttccttaacatttccctctttcagagtcttggctgtgtgctctatgcaatgtgctactttaattcaccctacgatcccatctacgagcgaggtgacagcgtggctttggctgtgctcagtgggaacataaacattccagaggattcaatttacacagaggtaataaaccttttttttatattgtaaaggaaactaattccaaatatttgtctaggacatgcacgaattaattaagtacatgctgcgaacagatccaatggaacggccattcgtgtttagtgttatcgaaaggacccacgatctgatacagaaactggagggtcgcttgtagctcccactaactggattacaactcatttatagacattcctccaaaccagatacaccgcttactgttttttgactacttattgtaaaatattttaaacctgctgattttatgaaattatgtgtaagcaatcaagctagtttttttattttattttattgattggagctagtgttcgtcacgagtgagtcctggacagttggagcccagatcttcggcgtcatcgtaatgggtcccacaccaatagcagaagcaataggctgtgcgcaggtagccagtgaggagttctaattgctccgagggactgtatggttcttgcttaggtggcacctcgacttcaggatcgtcggcgtcgctctgtgattcatcttcatcttttggtttaggtggccaaaagaaatcgagatctggttctgtgatagcggacttaagatccaacgattcgcaggtctgctggcaccgttttatgtcatactgtaattttcgctcctccgctttatgggtcgcgcgcctcctataagcctctgtactgacttcctcgtcgcttttaatgccggccttgtttaggagatgtgccctccgcaacttctgccgcttgagggccaactctgcaacggctgcctcgcgcccaagtcctccacgaccgctctttatagttatccccacgggttcagtacgagcatccgaagttatgcccaacccagaaccggctttgtagcccatcttggccagtagctggaatcctttgttgtcggcggaaattggtttgttgagggactgttgaaggcgaacattgtctacgttcccggaagaagctgctgtctcccgttggcgcttcttcagctcatctttcttggactcgacttcaatctgccgctttctgccgcgattgtgcaccaaactcggtcggacatcttgcagactaatgagggaaggatgagagtttttcataaggtggttggttgttagttaggtgtgagtgtaatctcacccaaccaggaatttgtcggacatataatcctcctcctcgtcagacatctgtttgttttgtttacacttctcacttaagtgtgaccattgcatagttatctacagcattatttcgataatttataataacaatgatatctctgctatgaagattgagttccgaaaattgtattttatagtattggttctgtttagtgataaaaaaaacagccagtttgtgtcatttacttatttcttcaaaaacaaagtattttaagtaagcgcatgtaagatactaaacaaaatactatccgcttctgagcagctgttgcgctccgctgacgagtggacagttccgttggcgttccatgtgctcgtcccattcagaaggcaacatttgtgaaaattaactattagttgactaaaacgggtgcaatgggaactgtaagtggaaagtaaaattatttaatgcttattctaatccaaatcattgtagaaaaaggtcaaaatcagctcggtcaagcgggctgctcacctgaagtcgaaaaaaacaccgctttctaagcagcagcaacaaaaacagaagcaaaagcgcgaccaactgaaatcgaagcgcgaacagggtcagaatatattctcccaaaaggcgagaaagcgggacaacttagcacagcgtaaaaagcacaacaaattggcctccctgggcttggatccgctcgaggaagacaacgaggatggcgacgatgagatgcttgaaaacgttgcggacatgctggatggcgatgatcttgccctgctccaggctaacaaacgcaagcgaaaggccaagacgaccggcgagaatgatcctgaccaaggacaatccatcggcttggaaagggcctatgcctctgacacgaaaaaagagcaggacgcgcaaaaaataaagttggatttgctgccaatcaagtccagggatggtcagattatcacccgtacgacagaggtggattacatacctaagcccaagcagaaaaagaagaatgaagaagaagaggaggatgattccgaggaagacggtgatacggagtatgaggacagcgatgacgatgtggtcaatgatgtcgaggccgcc

SEQ ID NO: 21314 - DNA, 869 bp, DROSOPHILA
atgcaatggtcacacttaagtgagaagtgtaaacaaaacaaacagatgtctgacgaggaggaggattatatgtccgacaaattcctggttggtctgcaagatgtccgaccgagtttggtgcacaatcgcggcagaaagcggcagattgaagtcgagtccaagaaagatgagctgaagaagcgccaacgggagacagcagcttcttccgggaacgtagacaatgttcgccttcaacagtccctcaacaaaccaatttccgccgacaacaaaggattccagctactggccaagatgggctacaaagccggttctgggttgggcataacttcggatgctcgtactgaacccgtggggataactataaagagcggtcgtggaggacttgggcgcgaggcagccgttgcagagttggccctcaagcggcagaagttgcggagggcacatctcctaaacaaggccggcattaaaagcgacgaggaagtcagtacagaggcttataggaggcgcgcgacccataaagcggaggagcgaaaattacagtatgacataaaacggtgccagcagacctgcgaatcgttggatcttaagtccgctatcacagaaccagatctcgatttcttttggccacctaaaccaaaagatgaagatgaatcacagagcgacgccgacgatcctgaagtcgaggtgccacctaagcaagaaccatacagtccctcggagcaattagaactcctcactggctacctgcgcacagcctattgcttctgctattggtgtgggacccattacgatgacgccgaagatctgggctccaactgtccaggactcactcgtgacgaacactagctccaatcaataaaataaaataa

SEQ ID NO: 21315 - protein, 281 aa, DROSOPHILA
MQWSHLSEKCKQNKQMSDEEEDYMSDKFLVGLQDVRPSLVHNRGRKRQIEVESKKDELKKRQRETAASSGNVDNVRLQQSLNKPISADNKGFQLLAKMGYKAGSGLGITSDARTEPVGITIKSGRGGLGREAAVAELALKRQKLRRAHLLNKAGIKSDEEVSTEAYRRRATHKAEERKLQYDIKRCQQTCESLDLKSAITEPDLDFFWPPKPKDEDESQSDADDPEVEVPPKQEPYSPSEQLELLTGYLRTAYCFCYWCGTHYDDAEDLGSNCPGLTRDEH

SEQ ID NO: 21316 - DNA, 5034 bp, DROSOPHILA
tttttaatatttgggggttttacaaattttacgctccataatctatcctttttttttttttagttttttatctttattatggtctaatattctgatttaattgccatgagatgattttgaatatgtagaggtggagaatcattgaacccataaacgcctatcaagattgtaaacgattattgacttcatgcgccgcgataagaaccaaactagacccaccacaacccaattgctgttgattgggtatattgattgggcctgtctgtttccaagtagacggaaaatacctatttttgactttttaaagctttaaattaaaataaataaaatatataatgagctgaccgctccgcaaataaacgcttagtaataataaatgttgggcgtgaaaaacagataaaaatgtagttatatatgcaccatataataaccttgtttttacaagtatcgaagcgggaacgtactgcttgccacatcccttctgtaggtaaacaattcaactgagaagctatttcccttagtcgcatcattttgatctgattatttcgattgaaaatccgtattctcgcactgaacagatctctttccaaattctcttataatgggtccaaatattcaaagagcccacttagttctccgtttcgaaaaaaaaaaaaacaatagatagtggcctctgtttctagcaatatcaaatcgtactctgaatatgaaattggatttgttgttccacaaacgtaatgagtgctcggtcccattagacttgtttgttgcacgaaaaaaaagttctctaaacattcatattgtttacacattccatgtttatttgtggtaagcaaacttttgcagcattgataaagataaagatcaaggttctcgattgtaattatagtattcgtaatgtaataaaatttggtatttggtatcagattctatacagttaatggttaacgcttaatgactacaattagtaaatcagaagcaatatcaatatcgtattggcttagaagtaccaggtctcgtaggttccaacccatccctgaatgtaggcatacgacggaaatcgattgatgtagctgctcagcttttcgatagcagtgatatcctgggtcacccagtgacccccaatgccaatctctagggttggcgtgtcaaacgttgatgtcgtcttctgtaaataatcatttaactttttgttacgtagatatttactactagttagcacgcttacttccacatcgatggtaaattccagaggactgtcgtccagtccgtaggagaagtagaccatatacggtggttccgcctgctctcgtatgagagtgtcattgaaggaccagtttagtatcctggcatcgtttttcacattgatgaatattcccatgtgcgagggtccggccagtgtgaagttgaatctcctctgcgcggaagtctctagttcgctagagtcctgcaggaccagcattggatattcggtgggtatctctggcgattccgatgtttcgatccacatactgtattgccgggctttgttccatcggtgattgtaaaggggcatgccgcaaaacatttcctcatcgcaaaagtcgctcacttggtgcgcctccccaatggcagcaatgttatctacaataaaaatggaatttaatttgttaatatcaaaaaccaagcactttatcacaagcttacctttggcaataccgaaacgacggtcctgcggataaatatacaatccagactcatctatgcgcgtacttccatccgcattatgcaagcgacgatgggcatgcttaaaaagtagtttttaaacgattacaaaaaaaaaaaagatttaacaaaagttaagcttacaattaaggagtaacgctgtggagaagttttttccttgtagggaaatcctgcgttggtgacagcaattatgatgaacagaatggtgatgcccaggaagcacaggactatcgttctagtcttgcgaaagaacatgataagcggggcctgttggcaattaaataatagatttttagttaaataattagcagaaaaattaatggttattcacttacaataaaaccggcaaacatgagagaaaatagccagacgagagctgctataaccatatccggatttgtcgatgagcccgaacgtccttgcatgggcattagggtcaccagagcgacggtgcacagatatgtgaagaagactaagggcaggatctggcaaactgtgacggcgattgcaaacaaataggctgtaaggatgaatattataataagtacctcaatgaactctaagacagtaatcattatttacccttgcgatgccactttgtaaccagattgacaattagcgctacaatgtcgaatagaatgcagagcattatcaaataggccgatcgtatactgagtccagtcagggtgagcattatcacaatcaggcagatgcagtgggagtgcataaagagctggatgcgaaatcccaggcccaagggatccctcttggttttctccagatacagagctggcaagatgctcaatccgaatacaatgggcgccaagtacaggccaaagatagtccatgatgaggtgaaccaggacatcgaacgatcaacaccgtccatgaaaagagccactagcaaggcaagaccaatggccaaaatcagggagacaaactgaatggcaatgctgatggaaaaccgaaggaggacacccttccaactgcaaccggaacgaagggacataaagtatatggatatgccgacacccaggagtgccagcaatgtgaccaccacattgacaataatgctcgtcgtctccgtgtagaagatcatgaaccagcccaaaaagtcgtaaaatatattgtgtccctcggagtgggcctgaaattgcattgtgattagatttccccatgtgatatatctcctccagacttacggccgtatcatccaattccggagcattggccaaagctctagccaatgataaaacattatcaccagtgtgctggaaggaagcgcgtggaaaggcattgatcctattgtacttcgtgtgatacacatagccattgaagatgtaagccatgtccagaccgggaacacctccgtagtcacgaaagatgcgaaagtccgtgtccgagggaatatagccagcttgaaagagctcctcggccagggtgttggcaaaaggatggggcacattgcgatagtagttcatcagccacggatgattcggtcccgactggaagagaatctcccggccaccagatccggctgagtccaagttgatgagagctctgtgaagggtaggattaacggaattatatgatttaattactacttaatgcttaaagataatggttacactaacttgcagttcttggcccatttgtgttgggtaatgaaggcatgtgatgcctgcagaggattctcctcagctccattgaacagaaagacaatgggatgggccagtggatcaccagatttggctatcacacgcatcacctccaacatggtaacgaccatggaaccatcatcgccagctcctggacttccgggcaccgaatcgtagtgactattgatcagcaggtaattctcgttggtcgagttcttttcggagagtttcaccaccacattctgaatgccctgatacatgttgaccatctcccagtgcatgtaggctccactggcctgctgcacatccacttcgatctccagaaggtcgctcatttcggactccactttggctacctcggcgcgcaggaactccacggcgctctcctcgttggccatgctgcccaccacccgcggtccaatcctggtcagctcaatcagggtgtcctcggctcgctgggcaataaaggaattgggatgactggcttcatcgctgcgggtcagtgggcgcggcatgtggttcatttgggtgttgaccagcgagagatagagcacaagccaaaagccaaagaaagcaggggcgtaataccactgcagcttcttgggcacctcgaagtccacatcgatgtgatatttggaattgaactggatgtaaaaggtaatcaatgaaatcgttaataataatagtcaaatatttccgctactaaatgcaatttcaatttgaggtgaataagttttaagattatccaataatagctaagcttattagccaaacaatatctaatcttcgtctggcagctgcctgtctagccgaataccacaattcatggctagcttctagttctttgggccaattttaagatctggaacaatccgcgtacgtctatgcaaaccgaatcgagtgtcgttactgatgccgaaattgacggagaattggcgagggtatcagctggtacataaacatttattgccttgcaatccaatccgtcttaatcgataagactcttaattttcccttctgatttcccaagtaaacaatgctcgacattgagaaatcgtgcttcgtcgcgtgttaaattcatgattcacgggcgtgtggtcacttggagattgtgaaggaccataaagccgccgaagtcggtgtcataaaggcgataacgccccaataaataggtaacagcaccttttatcgctctgacatgctaagaaatttgcaacattcgctatactgcggcctttttgaagtaagtcatgttttaatcggtctcctatctttattgccttttatttataattattttttgtaattctttgactctactttgtacattgtgtcctggcaactaacaatgtttaagtgcacttcaaaaatctgcattaattcatttaaattctttgatttcagttgcttaaatttacatttttcgcaattgtttcgattttactttttatttgattatggattgtactggtgtcctggcaactaacaatgttttagagcatttcacaaaactgtatagtcttagtgtgcataaaattatttaaattccttgatggcaggtgctttaattcacattttgggcatgttttcgattagattaatgtcataaacttgcaggtgttcaaatatgaataaaaggtgtttcaaaata

SEQ ID NO: 21317 - DNA, 2513 bp, DROSOPHILA
catccagttcaattccaaatatcacatcgatgtggacttcgaggtgcccaagaagctgcagtggtattacgcccctgctttctttggcttttggcttgtgctctatctctcgctggtcaacacccaaatgaaccacatgccgcgcccactgacccgcagcgatgaagccagtcatcccaattcctttattgcccagcgagccgaggacaccctgattgagctgaccaggattggaccgcgggtggtgggcagcatggccaacgaggagagcgccgtggagttcctgcgcgccgaggtagccaaagtggagtccgaaatgagcgaccttctggagatcgaagtggatgtgcagcaggccagtggagcctacatgcactgggagatggtcaacatgtatcagggcattcagaatgtggtggtgaaactctccgaaaagaactcgaccaacgagaattacctgctgatcaatagtcactacgattcggtgcccggaagtccaggagctggcgatgatggttccatggtcgttaccatgttggaggtgatgcgtgtgatagccaaatctggtgatccactggcccatcccattgtctttctgttcaatggagctgaggagaatcctctgcaggcatcacatgccttcattacccaacacaaatgggccaagaactgcaaagctctcatcaacttggactcagccggatctggtggccgggagattctcttccagtcgggaccgaatcatccgtggctgatgaactactatcgcaatgtgccccatccttttgccaacaccctggccgaggagctctttcaagctggctatattccctcggacacggactttcgcatctttcgtgactacggaggtgttcccggtctggacatggcttacatcttcaatggctatgtgtatcacacgaagtacaataggatcaatgcctttccacgcgcttccttccagcacactggtgataatgttttatcattggctagagctttggccaatgctccggaattggatgatacggccgtaaggacacaatatattttacgactttttgggctggttcatgatcttctacacggagacgacgagcattattgtcaatgtggtggtcacattgctggcactcctgggtgtcggcatatccatatactttatgtcccttcgttccgcattgccattcagtttgtctccctgattttggccattggtcttgccttgctagtggctcttttcatggacggtgttgatcgttcgatgtcctggttcacctcatcatggactatctttggcctgtacttggcgcccattgtattcggattgagcatcttgccagctctgtatctggagaaaaccaagagggatcccttgggcctgggatttcgcatccagctctttatgcactcccactgcatctgcctgattgtgataatgctcaccctgactggactcagtatacgatcggcctatttgataatgctctgcattctattcgacattgtagcgctaattgtcaatctggtacttattataatattcatccttacagcctatttgtttgcaatcgccgtcacagtttgccagatcctgcccttagtcttcttcacatatctgtgcaccgtcgctctggtgaccctaatgcccatgcaaggacgttcgggctcatcgacaaatccggatatggttatagcagctctcgtctggctattttctctcatgtttgccggttttattgccccgcttatcatgttctttcgcaagactagaacgatagtcctgtgcttcctgggcatcaccattctgttcatcataattgctgtcaccaacgcaggatttccctacaaggaaaaaacttctccacagcgttactccttaattcatgcccatcgtcgcttgcataatgcggatggaagtacgcgcatagatgagtctggattgtatatttatccgcaggaccgtcgtttcggtattgccaaagataacattgctgccattggggaggcgcaccaagtgagcgacttttgcgatgaggaaatgttttgcggcatgcccctttacaatcaccgatggaacaaagcccggcaatacaaggagattcaacttcacactggccggaccctcgcacatgggaatattcatcaatgtgaaaaacgatgccaggatactaaactggtccttcaatgacactctcatacgagagcaggcggaaccaccgtatatggtctacttctcctacggactggacgacagtcctctggaatttaccatcgatgtggaagtaagcgtgctaactagtagtaaatatctacgtaacaaaaagttaaatgattatttacagaagacgacatcaacgtttgacacgccaaccctagagattggcattgggggtcactgggtgacccaggatatcactgctatcgaaaagctgagcagctacatcaatcgatttccgtcgtatgcctacattcagggatgggttggaacctacgagacctggtacttctaa

SEQ ID NO: 21318 - protein, 687 aa, DROSOPHILA
MNHMPRPLTRSDEASHPNSFIAQRAEDTLIELTRIGPRVVGSMANEESAVEFLRAEVAKVESEMSDLLEIEVDVQQASGAYMHWEMVNMYQGIQNVVVKLSEKNSTNENYLLINSHYDSVPGSPGAGDDGSMVVTMLEVMRVIAKSGDPLAHPIVFLFNGAEENPLQASHAFITQHKWAKNCKALINLDSAGSGGREILFQSGPNHPWLMNYYRNVPHPFANTLAEELFQAGYIPSDTDFRIFRDYGGVPGLDMAYIFNGYVYHTKYNRINAFPRASFQHTGDNVLSLARALANAPELDDTAVRTQYILRLFGLVHDLLHGDDEHYCQCGGHIAGTPGCRHIHILYVPSFRIAIQFVSLILAIGLALLVALFMDGVDRSMSWFTSSWTIFGLYLAPIVFGLSILPALYLEKTKRDPLGLGFRIQLFMHSHCICLIVIMLTLTGLSIRSAYLIMLCILFDIVALIVNLVLIIIFILTAYLFAIAVTVCQILPLVFFTYLCTVALVTLMPMQGRSGSSTNPDMVIAALVWLFSLMFAGFIAPLIMFFRKTRTIVLCFLGITILFIIIAVTNAGFPYKEKTSPQRYSLIHAHRRLHNADGSTRIDESGLYIYPQDRRFGIAKDNIAAIGEAHQVSDFCDEEMFCGMPLYNHRWNKARQYKEIQLHTGRTLAHGNIHQCEKRCQDTKLVLQ

SEQ ID NO: 21319 - DNA, 4834 bp, DROSOPHILA
cccaaaaaattatcaaaacttcgtaatcatatcttgaaattttatagcacaaataaacacaaaatataagcattgcgagagtcgctaaagtagaatcaatactttttaagtaataaaacccataaaacctataatagagttaaattgtatggttaatttattccttttccaaagaatttttacaatttttagctagtcgattaacttggcttgtctttttaaaatatttccttcgtatttcattttattgattcaaagccaaatcatcatgtcttacttatttttcaaacccacctcttttttgaaaattgaaattgctcttgaatagtctacggattttaatgtgcataataaccattaaaagatatgactatctggcaacttaagcgaatttcgatttctcacacagatcttggtgattagatatggtttgtactcaggaccagggcaacgcaccttaagttgttaccaaaagaaatcgattcacttaattgctggtatcaatcaattatcaacacttattttatgggttcataaatttttatatggaacacgcgtttggtagtaaaatacatattctttatgctatatatttaagctgtaaaatttgcattatatcactgtcttaaaatatccttaaaattaatatgtaacgttttttgtgtttcacggctgataagaaaacgtgtataagaactagtttttgcaatatttcaatttcaattaagttcaacaatgtcgaaaatggaaaatatggtacataaaaagatggctttgagaatatctgaactccatacacatatatataagccggctttagggatctagaaattgatcttgctcgtaagcttaatttatgaataataaatctgaatttcacatgtagaccacccgtatataagatttaaagatactaaagttattattcaatgtttagcagttcattttattgttcgacttgtgtttaaaataattattttcgcgatcgagatcgaagtccttagaaaatgtaacgttggtaggaagctggccaatccactgcagcggcaaatgatggtatcttcttggcaaactcctgactgattgcatcgcctttgttgccaataaaatggacagccaatccgatctgacacaagggtacggcaaagtcggcatccagtttctatgaataataagcaaagattatttcaaagtatttcgcatgtgcattcatctgacactcacataaaagtcaataaagaaagtcaatgccgtgttgttcttgccatatgagaagtacatatgggaggtatcctgctggccaatgtaactcgtgggcaggctccagttggaaatgataacatcttcaagtggctggataaacacactggcatgatccgtagtcgctgattggaaattcatgcgcagtgtattgtttcccagttccgttttggacaatagctcaagtttcggctcatatggcgtaatgatttcctcttctcttggcagccacattatctgcagacgattcttaacccatcggtgatcatatagaggaaatccgcacatcataaccgtatcacagtccgcagcaatgctgaccaatccagtcgtattcaacttggacagtttcaggggtgctggtccccgacgatcctggaagttgaacagatagccggagtcattcttcacaactgtgccatcgtattcgtagaagattcgtcgtacatgctgtgaaacgaaaataacttcattatttgatctttaaaagtagttaggtttaccaaccaggtagggaagtcgctgaacgttggtctttggacggtatggaaaaccaatttgggtggagctagccgtgtaaatggtcacagcgcttatggccaacaaggtgagcaggatcagactggggcgtcggaacatgttaactaggggtatctacaatgagaccataatgatggaataaaaaggtattaaaaatataaatataattttttttcttaccacgaaacccaaagccaaaatggttcccaaagcacacaaagccgatataatcaaatccggattagttgctctgcaaaaaaagtagatttaataacttctgtcctcatgctaatgctctatgaactcaccggccaaaacgacccatcatgggtatgagagtcaccacgaaacagtaaatcaaatagctattgtaaaggaagggaactacttggaatatcttgagcacaccggtccaggaaaagccgcgatcatgcaaagtggtcaacagattgacggccaagggaatgacgtagaagatgagtgtccaggtgggcacataggcgctacgcagtccataaacggtcaatccaatgtccaagatagccagcactgcagcgtgtccatggagaaccagctgcagatgttgggcgaatccgaccttttcctgcaaggatgtcagtatattatatatattttacacaacttaacacctacactacttacacttcgttgcaacttcaggtagatgtaggatggcaagctcaatcccaatagactcgggcaaatatagaggccaattagcaggactggagtgctgaagtaagtgatggatagtccgtacttatcgaaaacataggctacgactatgggcagtccgagtcccagtacaaaagctatgatctgcagcacaaagatcaaaatgaaccagcagagaacgtgtcctatggacacacgggatatgcttgatgtacgccaaatggataagaaaatcaggacaagtgccactccggccacggaataattgagaataacgccattgctctccgtatagctaatgaagtacagtcccaggacatcgaaaaagatggcatgtcctgtggcataagcctaaaatatatcgatgaaatacaatgaatcctttagatttattcatcttacctctgtgttatccagttccgtagaattggctatggatcgcaccagaccaagcaaattatcgcccgtattttgtatggatcctctgggaatattggagaattgatcgtacttggtgtgataggcgaaaccattgataaacttggccatgtccaaaccttcacgtaaaattgtatcatatttatttaaatattctatttaaatatatgcaaaatatgcttaccaataagattaccatacttgacaaagatagcaaaatcagtgtcggagggcaggatgcctgtttggaagatttcctcagccattgtggtagccagatagtgtggtgcattttctttgtatttctacagaaagttcatacattagtgaatgcattcgaaaatattagcaaatgatagttacttctacaagccaagggctattaggtccagtttggaacactatatcactaccgccattgccagctgcatccaaattgagaaccaccctgaatatgatattgtttagttattaatttaatatataattaataaatttttaggcttacttgcagtttttagcccatttgtgttgggtaatgaagccatgcgaagcttgtagtggattctcctcggctccgttcagtagaaagacgactggatgcctaatggcttgcttggttgagcacatcactcgcaggacctccaggatggcaacaaccatctgaccagcatcgccagcagatggactagtcggcttggaatcgaagtgactgttgacgagcaggtaagtggtactcgtggtattcttgggactcagtttgatcacaatattctgaacgccctggtacatattgaccatggtccaatgaatataggatcccgagacctcttgcaaatcgacttcgatgtcgaagtagtcatccaggcaattctcctgtatctcgttcactagacccatcagatagtcaacagttttgttctcattgttatcactgccaacgactttggtaccgatttcggctaatttgtaaagattgctttgggctcgttcggcgataaagacgcccttggatgcatcctcaatggtcaatcctgtgggaatgcggtaaaagagtggtaataccacggccgagaagaggagtgcccaaaacagtagaaaaccagtggccaaataccagggtcctcgtaagtattgttcctggtttttgatttttttagaggatgccgatctaacggcatcttcgattggctcatcagaaatctgtaggacaaaaaggtaaatatattcaggatagtgttgttttttaaacttcttattaccagtttgtctttgtcacccattttatcgatcaacttaaacaactcaagttactgctttgcttaaaatcaaactgacttgctttctctaaacgcaagttcttttatacccacaaaaatcattagatatcagttagaagtcataaaaattataatgcatttattatcacttgagcaatgttcatgtttaggcaaattatgattacttatgaacttttaaagttcataaagattgattatagcccgaggttggctaataatgaacaccatttttttctggctgagaattgaatttcatattaatatgttagggtaggttttttttacattctttttttataatctcatttaattcaagttatagataagaatatatattttacatttaatctatttaatcaaatgaaatcttttattacataatacatttcattccaataaaatactatgaattgaaaaataaatatatgctaattgcctctctttttttaaactaagctgttctgccaaaaaataaaacgtctcttttgtctaataaattgtttcagtatttcagtaaaacattaaaaacggctctcgttaatgggaaatagatttatgtttcaattagtcagtgataacaattctctatatcacttagg

SEQ ID NO: 21320 - DNA, 2298 bp, DROSOPHILA
atgggtctagtgaacgagatacaggagaattgcctggatgactacttcgacatcgaagtcgatttgcaagaggtctcgggatcctatattcattggaccatggtcaatatgtaccagggcgttcagaatattgtgatcaaactgagtcccaagaataccacgagtaccacttacctgctcgtcaacagtcacttcgattccaagccgactagtccatctgctggcgatgctggtcagatggttgttgccatcctggaggtcctgcgagtgatgtgctcaaccaagcaagccattaggcatccagtcgtctttctactgaacggagccgaggagaatccactacaagcttcgcatggcttcattacccaacacaaatgggctaaaaactgcaaggtggttctcaatttggatgcagctggcaatggcggtagtgatatagtgttccaaactggacctaatagcccttggcttgtagaaaaatacaaagaaaatgcaccacactatctggctaccacaatggctgaggaaatcttccaaacaggcatcctgccctccgacactgattttgctatctttgtcaagtatggtaatcttattggtttggacatggccaagtttatcaatggtttcgcctatcacaccaagtacgatcaattctccaatattcccagaggatccatacaaaatacgggcgataatttgcttggtctggtgcgatccatagccaattctacggaactggataacacagaggcttatgccacaggacatgccatctttttcgatgtcctgggactgtacttcattagctatacggagagcaatggcgttattctcaattattccgtggccggagtggcacttgtcctgattttcttatccatttggcgtacatcaagcatatcccgtgtgtccataggacacgttctctgctggttcattttgatctttgtgctgcagatcatagcttttgtactgggactcggactgcccatagtcgtagcctatgttttcgataagtacggactatccatcacttacttcagcactccagtcctgctaattggcctctatatttgcccgagtctattgggattgagcttgccatcctacatctacctgaagttgcaacgaagtgaaaaggtcggattcgcccaacatctgcagctggttctccatggacacgctgcagtgctggctatcttggacattggattgaccgtttatggactgcgtagcgcctatgtgcccacctggacactcatcttctacgtcattcccttggccgtcaatctgttgaccactttgcatgatcgcggcttttcctggaccggtgtgctcaagatattccaagtagttcccttcctttacaatagctatttgatttactgtttcgtggtgactctcatacccatgatgggtcgttttggccgagcaactaatccggatttgattatatcggctttgtgtgctttgggaaccattttggctttgggtttcgtgatacccctagttaacatgttccgacgccccagtctgatcctgctcaccttgttggccataagcgctgtgaccatttacacggctagctccacccaaattggttttccataccgtccaaagaccaacgttcagcgacttccctacctgcatgtacgacgaatcttctacgaatacgatggcacagttgtgaagaatgactccggctatctgttcaacttccaggatcgtcggggaccagcacccctgaaactgtccaagttgaatacgactggattggtcagcattgctgcggactgtgatacggttatgatgtgcggatttcctctatatgatcaccgatgggttaagaatcgtctgcagataatgtggctgccaagagaagaggaaatcattacgccatatgagccgaaacttgagctattgtccaaaacggaactgggaaacaatacactgcgcatgaatttccaatcagcgactacggatcatgccagtgtgtttatccagccacttgaagatgttatcatttccaactggagcctgcccacgagttacattggccagcaggatacctcccatatgtacttctcatatggcaagaacaacacggcattgactttctttattgacttttataaactggatgccgactttgccgtacccttgtgtcagatcggattggctgtccattttattggcaacaaaggcgatgcaatcagtcaggagtttgccaagaagataccatcatttgccgctgcagtggattggccagcttcctaccaacgttacattttctaa

SEQ ID NO: 21321 - protein, 765 aa, DROSOPHILA
MGLVNEIQENCLDDYFDIEVDLQEVSGSYIHWTMVNMYQGVQNIVIKLSPKNTTSTTYLLVNSHFDSKPTSPSAGDAGQMVVAILEVLRVMCSTKQAIRHPVVFLLNGAEENPLQASHGFITQHKWAKNCKVVLNLDAAGNGGSDIVFQTGPNSPWLVEKYKENAPHYLATTMAEEIFQTGILPSDTDFAIFVKYGNLIGLDMAKFINGFAYHTKYDQFSNIPRGSIQNTGDNLLGLVRSIANSTELDNTEAYATGHAIFFDVLGLYFISYTESNGVILNYSVAGVALVLIFLSIWRTSSISRVSIGHVLCWFILIFVLQIIAFVLGLGLPIVVAYVFDKYGLSITYFSTPVLLIGLYICPSLLGLSLPSYIYLKLQRSEKVGFAQHLQLVLHGHAAVLAILDIGLTVYGLRSAYVPTWTLIFYVIPLAVNLLTTLHDRGFSWTGVLKIFQVVPFLYNSYLIYCFVVTLIPMMGRFGRATNPDLIISALCALGTILALGFVIPLVNMFRRPSLILLTLLAISAVTIYTASSTQIGFPYRPKTNVQRLPYLHVRRIFYEYDGTVVKNDSGYLFNFQDRRGPAPLKLSKLNTTGLVSIAADCDTVMMCGFPLYDHRWVKNRLQIMWLPREEEIITPYEPKLELLSKTELGNNTLRMNFQSATTDHASVFIQPLEDVIISNWSLPTSYIGQQDTSHMYFSYGKNNTALTFFIDFYKLDADFAVPLCQIGLAVHFIGNKGDAISQEFAKKIPSFAAAVDWPASYQRYIF

SEQ ID NO: 21322 - DNA, 4036 bp, DROSOPHILA
ataacaaggaaatgtaacggtgatttacgcaatgaaagaccaagagagtgggcaagggaaagagatagacagggcaactcacagtccaagtgcttcttcttcgggccaatgcattcctccgtggtggccttgcaaacggacttggcgagtccttggcccgcaaggctgtgacgggcggccagcagcctgtcgttgatcgtttgccctgccatggtcatgatgaagctgttgctgttgttgtttctgctgccgctcgctggtttttatttacttgattaatttaattatgcaccaaaggagctgaccacaccgacacacacacacactcgaaagcagatacagagagagggagagagagacacacacacacacgcgtatggggcgagcgagagacagagaggtattgattgattgagaatatttcgaacgggaaaactctgctatgcgagcctcacgattaaactaacagtaaagatttagtggttcctacgtcacaatcactacacaatttatcgccgcggtttatgcgctctctaaccggtgcctaacgctgaaacgcgattttttaattctctatttttcctctgccacaaatcgataatggcgactggcaaatggagcgagcgtatgagcaatgtcctaaagcgtccacaaagtggagctaacgcgtgcaatcgacttgagtttacggcgttaggtgggaaaatatcgattgccataacgtaagcgaatacgaaatagctgaacttagcttttacgatgtgttcatataagttctgaaaataaaaaaaaataatgataaataaataaataaaaatataaaatattaagatactataaataaatctttttttataacttagcacttaaaattccccaacagcagttaaaaagtagctagatttgtcggaagtgtagccaaacgtaacgtaagctaaggggctgtcaacaggaatttttagtttcgagtaggcggtcatactggtcattaaaataaataaaattatactaaaaaacagtagttagcacaatcaacagtctcgtaataaaattgtaagatgttgaatggacagattgcacacagttatttggagaactcgtgcacgctgatcataccccgcccgcctgtcctgaatcagtcctcaaagtcggcccagccagcagcagctgctgctgcttcttcttccgctggtgaggagtttggtcaggaagcggggtcggggttggcggaagcggaggcgttgcatgtggatcgcataagaaactgcgatatattcgttgacgcgcacgatctttatttctacgcagatgttaagctgtacaagtgagtcacatccggcaatctgtcgtgcccatggtgggccatggtggcgaaattccagcgatatcattgcgtacttgtactcccttttcggacagattccacagccgtcgcaccttcgacttgcgagagctgaagacgctgttgataaagttcaacacgacagagaatcactaccaaatttgcctgcgctgtctgcccctaacagcgggtgcccaggaaggacccggtggagaaagaggcggaggcggtggtacgggggatgcagccaagcagtggaatagtcgcaaagagtacatagccgcattcctgcacctacccacactgagtgccaatttgccggacaagcagcctctggtgcaggaatggaaactcaaacgaatcaccgatcagtgccaattgcagctcgacgaccacgagcgcacctacaagctgaccaacaattttgggtacggctatgctagcgaatacagcggaccgctagacctgagtgaggtgagttcaattggttaacctgctcttccgcgcactaaacacagatgttttcacagttggacagagccacgtgccgcgtgtcggagccacatcgcatgagccccatccaaaggcggcaagagcgcgtggtcgatgagatgaagcgcttttcccgcgagcagtacaaaataaattttgtggagctacaggttccgtccggtcaccagaatcctttacgctacaaaccgaaaatctacgagacttccatgacccaggagcaagcgcatctgctgcacaacatcagccgaatgcagacacgggagcagcagccgtgcgacgtttttcggcaaaacgagatcgattgcgggctgataagcattctgttggccatatgctatgatgtgcggacgacgaacaatgagccgacgtgtgaatcgggctggacgcgaagcatactgtgcccgctttattgctactttgagcaattcgacaactatcgggacgtactggttgccttcctgcggcgaatgatcacctacccgctgtaccgcaatttcgagttgggccgccaatgtgtacgggatgccatagaagttttaaagggcggtcgcaactggttaattaatcagctgctgctaacgcaccagcagttcgccagcagtgatcccagtcgcgatagcttcaacaactactatttggaggactatatacgatatgtgaccagcccgagcgcctgcagtgatgagcacatgcgccttcttgcccgcaaccttaagaacgtgctgatggacgtaaacaagcaacacttgggcctgggagtgaccgagattgagactgagctgatcaaggagctgatgcaggagatgcgcatcgatgcgggaagccagggttcctcgccgcagcagcagcatggcgatgatgacttggaccttgataacgatacttctggacaggaggacgagactaccactgatgatgaaagcgtcataactgactccttctacagcgtggacatggacatgcgactgatagagaacgaaattgtatatgaggatgacgaggaggacgaagatgacgatgaagatggagatgatgatgaagatggggatggggatgaggatgaggatgaggatgaagacgaagacgacagcagttcttccacaaccaccagtagcgaggcggagggaaacagcgtcatcgagcagtgcagcaacagtgagacagcagccagcaccacataaattgccacttatgtcgagttcggcaagtcctgctcctgccttgcccaaaacaaacaagcaacacaaccaacttaatgtcaaagaacggaggctaaacagtgattacttttaaaattaaaacaaagtaaaatacgaaactaaaaaccaagccaagtaaatgatgtaagtttacacaagaatacccaaaaaagaagaacttcttatatcttaattgtacaataatttaacgaaaagcaaactcaaagatttgttcacgccaaatgcgaaaagatatttgaatattttttcccctttgctctacaattacttcgattataattacacatacaagtaaatcagaactttagcatttagtatggcattagagtatgaaacatttgaattttgaattctgaaaagcgaaatctagttgtgcatttgtatatacatctatcgatattgttggtgctgcaagcaaagaaaacaaaatatgaataaaataaaatggaaatggaaaacaacctccaaacttatctacacagtgggcaaaagtcattaatgatttacatgttaatgttgtatgagtgtcttataaaaagaaagacatgaagtatgaacgaaaattctaataaaatggataatacatatttttttaaaaacatcgcgacatgagttctttattattttattcttcgtatcaaccaagctgtcgtttaaaaaagtgacaaataggtaggtaagctttttgaaggagaagttatttttcattttacttacaaacatttaagtatcagtatttaaaatgcatataaaacatactgttacttttagtacgcttaaatcagaagatcagatactttgtatcttcaacacaattttgatggttcaatccgataagaaaaacatttgcttgggttttattatcttttctttatttatccatactcacatacatacatatatgcatatctatgtacgttttaaaagctaatttaaatatttatggactgttaattgaaga

SEQ ID NO: 21323 - DNA, 1885 bp, DROSOPHILA
aaattatactaaaaaacagtagttagcacaatcaacagtctcgtaataaaattgtaagatgttgaatggacagattgcacacagttatttggagaactcgtgcacgctgatcataccccgcccgcctgtcctgaatcagtcctcaaagtcggcccagccagcagcagctgctgctgcttcttcttccgctggtgaggagtttggtcaggaagcggggtcggggttggcggaagcggaggcgttgcatgtggatcgcataagaaactgcgatatattcgttgacgcgcacgatctttatttctacgcagatgttaagctgtacaaattccacagccgtcgcaccttcgacttgcgagagctgaagacgctgttgataaagttcaacacgacagagaatcactaccaaatttgcctgcgctgtctgcccctaacagcgggtgcccaggaaggacccggtggagaaagaggcggaggcggtggtacgggggatgcagccaagcagtggaatagtcgcaaagagtacatagccgcattcctgcacctacccacactgagtgccaatttgccggacaagcagcctctggtgcaggaatggaaactcaaacgaatcaccgatcagtgccaattgcagctcgacgaccacgagcgcacctacaagctgaccaacaattttgggtacggctatgctagcgaatacagcggaccgctagacctgagtgagttggacagagccacgtgccgcgtgtcggagccacatcgcatgagccccatccaaaggcggcaagagcgcgtggtcgatgagatgaagcgcttttcccgcgagcagtacaaaataaattttgtggagctacaggttccgtccggtcaccagaatcctttacgctacaaaccgaaaatctacgagacttccatgacccaggagcaagcgcatctgctgcacaacatcagccgaatgcagacacgggagcagcagccgtgcgacgtttttcggcaaaacgagatcgattgcgggctgataagcattctgttggccatatgctatgatgtgcggacgacgaacaatgagccgacgtgtgaatcgggctggacgcgaagcatactgtgcccgctttattgctactttgagcaattcgacaactatcgggacgtactggttgccttcctgcggcgaatgatcacctacccgctgtaccgcaatttcgagttgggccgccaatgtgtacgggatgccatagaagttttaaagggcggtcgcaactggttaattaatcagctgctgctaacgcaccagcagttcgccagcagtgatcccagtcgcgatagcttcaacaactactatttggaggactatatacgatatgtgaccagcccgagcgcctgcagtgatgagcacatgcgccttcttgcccgcaaccttaagaacgtgctgatggacgtaaacaagcaacacttgggcctgggagtgaccgagattgagactgagctgatcaaggagctgatgcaggagatgcgcatcgatgcgggaagccagggttcctcgccgcagcagcagcatggcgatgatgacttggaccttgataacgatacttctggacaggaggacgagactaccactgatgatgaaagcgtcataactgactccttctacagcgtggacatggacatgcgactgatagagaacgaaattgtatatgaggatgacgaggaggacgaagatgacgatgaagatggagatgatgatgaagatggggatggggatgaggatgaggatgaggatgaagacgaagacgacagcagttcttccacaaccaccagtagcgaggcggagggaaacagcgtcatcgagcagtgcagcaacagtgagacagcagccagcaccacataa

SEQ ID NO: 21324 - protein, 608 aa, DROSOPHILA
MLNGQIAHSYLENSCTLIIPRPPVLNQSSKSAQPAAAAAASSSAGEEFGQEAGSGLAEAEALHVDRIRNCDIFVDAHDLYFYADVKLYKFHSRRTFDLRELKTLLIKFNTTENHYQICLRCLPLTAGAQEGPGGERGGGGGTGDAAKQWNSRKEYIAAFLHLPTLSANLPDKQPLVQEWKLKRITDQCQLQLDDHERTYKLTNNFGYGYASEYSGPLDLSELDRATCRVSEPHRMSPIQRRQERVVDEMKRFSREQYKINFVELQVPSGHQNPLRYKPKIYETSMTQEQAHLLHNISRMQTREQQPCDVFRQNEIDCGLISILLAICYDVRTTNNEPTCESGWTRSILCPLYCYFEQFDNYRDVLVAFLRRMITYPLYRNFELGRQCVRDAIEVLKGGRNWLINQLLLTHQQFASSDPSRDSFNNYYLEDYIRYVTSPSACSDEHMRLLARNLKNVLMDVNKQHLGLGVTEIETELIKELMQEMRIDAGSQGSSPQQQHGDDDLDLDNDTSGQEDETTTDDESVITDSFYSVDMDMRLIENEIVYEDDEEDEDDDEDGDDDEDGDGDEDEDEDEDEDDSSSSTTTSSEAEGNSVIEQCSNSETAASTT

SEQ ID NO: 21325 - DNA, 2699 bp, DROSOPHILA
cgatattctgcttttgttcaagccggaacaatggcgaatcaattaaagcttgccgcctggccaggcaacttttgtctgccttccgcctgtacatttatcacttatggatcgcgcactttgcgcagacgcaggtaactagttttcaccgcagagatacagccaccgccatcgccacctaaaacacacatttcaaggcaataaaatatgtttggccatgtaattctgcagcgtctggaagtgcacttcggcgcgtgtgtctgctgcgcgaaatgcatttccatttccatttcgttttgtttgactcggtctctgtttattttgagtctccgtggggaatgttgaccgtgcatgtcattcgcgtttagttttgaaagttgtttgcttcctgctgctgcacgtcgcgtcgttttggccattttaattaaaaacacatcacctcctgaggctgctatggcaatttttatgcaaagtgcgttacccactgcttagctgctcgataaatgctcgaatgatatttatttagcaaacgtttcgctgcagcgcaaatttcatactgattgttaaatgtaacagaggaaaaaggcggcagcaaaaggaaatcaatcaatacaaacccacaagagtaggtacttcagcggctcttggcccagtttgtgcgttcaaacgagaccaatgagtggccatttgcacttgaaagtgcatataataggcaaccaagtgaaaaaggatgcgagagaaaaggattggtaaagaccataataagggttcgaagattttattgtcagagtaatgattttgaattaatataatttgcgcgcccatttggtattttaatactgaaaacaggtctcgttttttaactctgatctggcaacgccaggcttgtacactttcaaaagtgcgaaaaaaaacatatgttcgctgcattcttgttgagttgcattttaaataatcaaataaatttgataaattgggagcttgttaatcaaattaactcgaaatggctagcacttctcgcgcagctaggagccagaatgccatcccctcgcaggaagcgcaacaacccgtcgatgtggtcgacgccaaggttcgcgccattctaaactacatccttgatcataccgcccagaagattcccataaaggacaaggatttgatagcggtggctggggacaagagcgaactgaagaaacgcctgccgctggtcactaatctgctggccgaaacattcggtataatactaaccccactggacgcgaccaccaagacgttcatctgcactgcggaggagccggtggcctccattcacgagctgacgccggctcaacggccgcagttcacgctgctgtatattattctcatgtacatcttcctgcgcggcaaccgcatcgaggactcgaaactgtacgttatgctggagatgctcaacatctatccagacgaagaacatggctacttcggccccaatctgcgcaaacagatcgaggagacgtttgtgaagcaacaatatctgaagcgggaacgctcacagctaagtgcttacgatgattccaagactttcttcctttggggaccacgtgccaaggcggagttcacattcgagcaaatggtgcaattcgcctccaagctgctcaatcagcatcccaaggtcttcggccatcacctctccatggcccaagaaggagtaaacgcggagtagaataccattctatgaataatttactacatttgatctaacaaattgaaaaccaaacaatatatataataatctaaaatagagccaatttcccatttatcagcaagaaaagaatattacgatgatcttttaaaaatagcacgtcttttctatttatctaaaacttaagttaatttacttaacaacggaagcagagacccgactctaatacttggcatagtctgtgtccattatgagcttgccatccttgtccttcaaacgaacgcggccgttggagtagcgcgtctcttggctgccatccggatacactagcttcacagtgccgtccggatactcccttcgcttgtttagtttggtgtgaatctccttttggccattgggcagattgagaatcttgtcaccattccggagctgcactagatgggttccatccgcataacgccactcctccagtttctccgtatcgctgggatccacaatcttaatgctgttgttgggaaagtgaatctcaacagtgccatccttgcggcgatgttccgtctgcccgttgggaaactcgagtatttccaagccatctaggtaggaggtgtgccaagtgttggtctcagcgtagtaatacttcactgtgccttccctgatgttagtttccttgatatccttgttgaaatagagcatgcgcaagttcatgccatcggcgcttatcttttttagattgccgtttgggtaccaaatgtccttgctcccatccgcattcgtaatctcccgcttaaagtcactgctggagttggcagccggtgggggggtagcagctttcggagcggtcacgggcggctgaacttcctccgattccacagaactactagaggcgtagctctcatccagagcgtatggtgttttcttattcctgctcagtgagcgactccgacttctcacttgggcactgccgctactctgacgacggttttgcgcctctcgctgcttggcaggcttaccagcagtgccg

SEQ ID NO: 21326 - DNA, 699 bp, DROSOPHILA
atggctagcacttctcgcgcagctaggagccagaatgccatcccctcgcaggaagcgcaacaacccgtcgatgtggtcgacgccaaggttcgcgccattctaaactacatccttgatcataccgcccagaagattcccataaaggacaaggatttgatagcggtggctggggacaagagcgaactgaagaaacgcctgccgctggtcactaatctgctggccgaaacattcggtataatactaaccccactggacgcgaccaccaagacgttcatctgcactgcggaggagccggtggcctccattcacgagctgacgccggctcaacggccgcagttcacgctgctgtatattattctcatgtacatcttcctgcgcggcaaccgcatcgaggactcgaaactgtacgttatgctggagatgctcaacatctatccagacgaagaacatggctacttcggccccaatctgcgcaaacagatcgaggagacgtttgtgaagcaacaatatctgaagcgggaacgctcacagctaagtgcttacgatgattccaagactttcttcctttggggaccacgtgccaaggcggagttcacattcgagcaaatggtgcaattcgcctccaagctgctcaatcagcatcccaaggtcttcggccatcacctctccatggcccaagaaggagtaaacgcggagtag

SEQ ID NO: 21327 - protein, 232 aa, DROSOPHILA
MASTSRAARSQNAIPSQEAQQPVDVVDAKVRAILNYILDHTAQKIPIKDKDLIAVAGDKSELKKRLPLVTNLLAETFGIILTPLDATTKTFICTAEEPVASIHELTPAQRPQFTLLYIILMYIFLRGNRIEDSKLYVMLEMLNIYPDEEHGYFGPNLRKQIEETFVKQQYLKRERSQLSAYDDSKTFFLWGPRAKAEFTFEQMVQFASKLLNQHPKVFGHHLSMAQEGVNAE

SEQ ID NO: 21328 - DNA, 9305 bp, DROSOPHILA
tgtttagataaattagctgcggaaagaccagccccccccccccccccccgtcacgttccataccacaaaattcacaaaatagtttcttttaatatcatcgatttggaaaaaaacagaggagcttctataagtggaattatgctaatgaaattttgaaatattaatattattgcattaataaagttattattaattatatgatcattgcatatgcatgattctctaaaaataagtttaaaaaaaatgaaattaaatattactaaaaatataagctcaataaaatataagctcagtttaaataaaaagattaacagtgcaaacgaaagtaatttctttagttctcatatgttttgttatttaagaattgacgtatttatgttattttttaaaaagttctgttcttcgaattgactttaaatgattctaaatattgtcagtttgttagaaaggagctccactgtacctgcgtcgcatgcaactgcagacatttgggattcaaatcgagaatggaatggaattgtcccaaaataaaggcaaatattatttatgccagggccctgagaactttttctccaacggcctgcgtgcacattgcattggtgttgatgaggggggagtggcggggcatgcatttcagaacaacatcatattttcggctatgtttatttacacttaaagcgctataacaacaaactgaaatgcaaagggcaagttgggcataatgcatgtatggctcacgactgaacagcggaaacaggatcatatgagtggcattcaagcataaagtttacaaagttgcgataattaaaatgcgtgtatatcaattaaattaatttgaaatttaccgcccaaaagtgacgtcacagttgcctacaagaagatgctagccaagtcacacaccccgcgagtactgccagactgcagctagcagagtaccacacccggcagcgttgccacacaaacgatcgtgtgcaatgcactaacgccagtgagcaagcgatctgtgaacttcggcaaacagtcacaccaatccgacgcgaagtgaatcatattgcgcacagcaaaatcagcggataagcaaattaaagcgacaaaagaatattaaatcggctctgccgctgcagcaagaagcgtgaaaacagcaatgcaatcgggctaatctccaaaaaaaacccaaaaacgtttcaagccagtgtgtgtgcgtgtgtttgtgtgtgtgtgcttgcgtgcgctgcgcatgtgtggtgtgtttgtgtgaaaaggaagagaggtggaaacgcacacaaaaaacgaaaagaaaaaaagtgtacagccgacgacgcgcagacgcatctcgaaattgttggaaaaatcgcgtgtgagaagagtgcgcgaagtgagaaaggagcaacaaatcgctaaagacatatttcgaagatgggttgtgccgtgagtacagcacgcgataaggaggccatcgagcggtcgaagaacatcgatcgcgccctgcgggcggagggcgagcgggccgcctcggaggtgaaactgctgctgctgggtgcgttcgccttccatttcaccttttcacctctctagcattattccggtatttcccccctttgcgaattctttgctgaaattcgcgttgtgacctcatttttttttccattcgctcgctttgcttgggcggggtgggtatccgctgggtgccgttgctttgcgctttcggctgtggtgagttggggcaaggatttttgccggcttttccagtgcgaaagggtctggaaaaggctggaaggcatgggatgaaacaatacagtagagttacagtataacgaattagtaagactaaaattagaaaaatgtaatttatttgtttttaagatcactcgttattataagaccatgttattctagctaacagtttaacataaaagtctaaagtccccaactatcccatatttcgactataaatatgcatggaatggagtaagtagactccatgcagctctgtttatctgggaaaaccaatgtttatgtggctgcttggggctaaacaaatccgtctgttcgtagatcgtgcattatgcaatgtctgtgtccaataattcgttggcgataagggaattgaacgtaaattgaaaccaaatgtcggtttgactgtgcggatacactcgattctagattctcggtactcagtgctcgtttctcatctgctggcacgcacttttcagatcttttggatcgatgcaacaagtggatcgaatcggatcccattgccgcaatggaaacatgtttgttgatagcgcagcggtttccactttgcaggaaaaaccattcaagcgacgaggcgccatcgtatcgcatatacaaacatacatgcatacatacatacatacatatatgatgtatgtatggtttttggtgacccgacctctgcggcaaatgcagtgaaactgaatgcctcgctgcgttgcaaccttctgcaattaaatttccactcgccgatttatatgcacggcatatgggaacgatgatatatttcaccgtctgcgtgtgtacttttcatttcattgccattcatttgcgaaaaacaatgccgtggaagttttcctccagcgcggctgattggccaatgaatcgggccaagatgactaaggcaacgagtggtaggctggaaagtacagcaaagactggctatgcaacctacacctttattaagtgaactgatatatagggtttactgtactaaattaattcataatgtcaaatgttatcatttcaaaaggatttttctaaaaaaaaaaatgatgcacattagtaaatgatttttttggaacctagaacatagtgtagttttcatttacactgtaaaacatttatcgagcttatcagcagccaccgcaccttgcactatatttgtttgtgagtaaccactgtatttgcaggcttaaagataataaggaaaactgtttgcctcaatgaaaaacctcgtaaaccggtttggaaaatgcccgctaaaaggtgcaggaaaattctaccattttcatccccattaaaagatatcccctattatcattcagtatcccagctgttttcgtccaaacccccggttgaccagtgtaaatgcttctggtttacatagccaagaaaacagcttgcaccagttgcattttgaaatttagcccaacattttacacttgattcaattgtttgcaccttgtggggcgtgtgttctgtaatttctggatcatgatgaaaaccgatctctgatctccgatctccgagctgctgcagctttcctccgacttccagctgagtaattggctgtttttgttgctgcttcgttgtttgttcgctgacatttcaagtggggtgaacgatattagcgcaaataaatgggcccgccatcaaatgcaactgtcgcggctacacggaaagaaaaagaagaatgtactagtttgctaaaaaaaatatctttaaaaaatatagttttcaaattatgcagtaaagacattgcttataatttagtataaatatatatattattcattgaatttattggtaatttctaccagtgtacagcgactacttacttgaattggaatcggaattggcagcccccaacgctgcgcttattgagtagatttaataaagctgctcagctgacactcaatttatattacactctgctgcctctccccttttccttacccccccccctttccgcaagcctttcaattgaaaagcacaactttttcaaccgtttttcaaccaaacatattgtgcttaagggcaaagatagtgaattactgcattattttgatgatatttgcaaggaaagagcagcaaaccgaagagagaaaacgaattccaatggggggggcatgagtaagaactcggatatctgtaaaaaaaaaaaaaaaaaaaaaaatatgaaaaaaatgggaagaaaataatatataaacaaaatagtgtcatgctgctggcgcaccaatatcaaaatcggcactcagactgtcaacacacagcaacttaataatctacaattatttaagaactcgcttaccaacacatttaaactgaaagtatcattgggcttatcaaaattatcgccaagcgagcgaccttatacatatgtacgtcaatatactatatgtggttaaataattgatgtacatatgtatgtacatcacatataggaaatttcatgataatcgagagatctgcgtgaaagtcactactaggtggggggcttccgttttggggccgcatttcatctgatttaattgtttactttttcggtgggtccgctcaatttcacactccccgctgattaacacatttcccacttcgataactgaggccaggcgccatttaacttgattactcatggcgcaaacactttcttacgattctcctcctcttgctgtctacagctattgttctttcttctcccctcttttttaaatcatcgcatggcgtagccttagtcaccctgtttccaatgaatattctaatttcgataagtaattatctaacgaattggttggtgcagtaaaaactgcatgtcttccttaaatttcctatctagctaaatagtgattttttaatcatttatgacaaattgaacaaatatttgaatgttgtttacaatttcaaattctaataaatataataaaaagtttttttagcaacttctaacaactataaaatatatcaatagaagctagaattcctgcattccccgccgattcttttttcgccgatattcactgtttaatgatgttaattataataccgtttggttgtggccatcgcgatgataatgagcttgtaaacgcggctttgtgcgtatcgccgttgttctgagcccgtctcgctccagccctattgttggcctctcgctcgcacccgcagtcggccgggcgcgtgttatggcacagctaacggtgcattgataaatgaaggcccagccacaccaacacacacgcacacactctttcgcattttgttagtagtgttattattaaattgacctttttccagccgctcatttgtggattgctttgttcgctacttttttccacacggtggcaagtttgaacatcgccttatgtccatattcgtattcaaatctgtcaatttcatcattatgcggcgaccgttgtttgcccattatcagcattcagcaggcgtctctttcgctccaacactttttggtggcaaaattagttagcattgttcggaattggttaaaattgaagtcttaacaataactcaaaaaaatttataaaacaaatttaatgtaatatatattgacagtgaatgtaacagtggccatttagtgtaatatatattaacagtaggtgtaacagtggccagcacattacaattagagtggaccctattctaacacattatggtacctaaaactataggctgaatttcttaatcttcataaatgtacgtaacatatgtattaaacttaccaatcttcattgaatgagcaccatccgccccaagggaacttcaaccatggctgattgatatacgtacgaatagtaaaaacaattaaagtttcagtgcaagtatcgaagccctgaaagttgagaaaagtgaaagtaaagtcgcagttttggctttggcaattacctaatcatccggtggctgggaatggacccaactaccaactgcagcaaaaagtcggcttaatgcgccattgttgcaatgccccaacatcgtgtatatatgtttatatatagctatagatattcgaaattacttggaccggcagatttgccaatttttgtatttgcccatttgctctgcgatttcaacttctttagttttcagcgaaaagggaaactggcgagcacgtaatgcgattatgtttcatatttttttttttatcattcgacgcagcagataatatacatagtactacatatataataaactgcccagacgagcccgtgtgtttgttgtttatcaacgctgacgggtcaggtctcatttaacaattgaaggcactcggcgaataaaattatgcccagttaattttctccgcaatttccaacgcctttgataactaatgggtgggtggttcaacgaactccagggctcggccatgcaagttaataaattataataaattacagagtagtacgcttagaaaatgcatatatctatttggattatctttagcatgatgatgtgcatataacttgatctgttatcacaatattattgacccttatttggtgttcatttgattcgtattgaaatccgacatgctatattaaatgaccatatacacgatgttcattcatttctcaactagaccagcgcaattaagcgtgacctcttgagtcgcgcaattgagcaacttttctcgatcgtctcattcataaattccacttccgttccccttggcaaacttaaaagccccttcccgaaaccgaactcatcgattcattcattcagttttacgccctgaacttggtgcatacaaatattgagctcacacttccttggaatgattctttataaactttgatagtacaccttaactaataaactctgttgaatttcttttgtaggagccggagagtcgggcaagtcaacgattgtgaaacagatgaagatcatccatgacacgggctactcgcaggaggaatgcgaggagtatcgtcgcgtcgtcttcagcaacacggtgcagagtctaatggtgatcatccgcgcaatgggacgcctgaagatcgagtttgccgatccgagccgaacggacattgcccgccagttcttcacacacgcctctgccgccgacgagggcatcctgctgcccgagatcgtgctcctgatgaagaaactctgggcagacggtggcgtacagcagagcttcgcccgatcgcgcgaatatcagttgaatgactcggcgggatactatctaaattcgctggataggatcgcgcaaccgaactacatacccacgcagcaggatgtgctacgcacgcgggtgaagaccactggcatcatcgagacacacttctcctgcaagcagctgcacttcaagtgagttgtcattaattgcccacttccggttgattcgattctaatggttatgtttttttttcgccacagacttttcgatgtgggtggccagcgatcggagcgcaaaaagtggattcattgcttcgagggcgttacggccataatcttctgcgtcgcgctatcaggtaagtcaaatattctacgaatcttaggaatctaatgcaattgttatatatttcgctaggttacgatctagtattggccgaggacgaagagatgaatcgtatgattgagtccctgaagctgttcgattccatctgcaactccaagtggtttgtggaaacatccataatactgttcctcaacaagaaggatctgtttgaggagaagatcaagagatctccgctgacgatatgcttcccagagtacacaggtaagataagagtgtagaaaacgattacatttttgtttaacttgatatacttttaggaaccaacaccttcgaggaggcggccaactacattcgcatgaagttcgaaaacctgaacaagcgaaaagaccaaaaggagatatacacgcatctcacctgcgccacggatacgaacaacgtgaagttcgtcttcgatgccgtcaccgatgtgatcatcaagaacaatctgaaacaaattggcttattctgagagggcggcggagcacaagatcatcattatttagctggcgtcgtagtattaaaggaaaacgcgcataaacatttccattaaacgctaagaactcgatacatttacgctcgtacgatccatatatgttttaaatgcgttacatgcttgacacacgtaattttaataaccgatttggttgccagtagtcgcggaacaaataacctaaccagctgcaatttagttaaccgtgtccattaaattgcacccataagctaactaatttaaacattagcctaaccacacaaatgtaaagttcgacaaaggacagccggtgggttttgtacatcctaaaacctcaacccgatcggctccctttggaatttagttaagtttcgcgggctaatggcggtgaccaaggggagcaccacatccagaaatccccagaggtgtctccttgggcgcaagccattttccggacgtttattctttgccaagagcttgacagcgttatttaaggtgaacctaaggcctggagttgtaagccctaaaatgtaactagtaaacttactaatatgtttagtaatagcctaaataaaagacaatttatacaaaataaccattcgtacttgaatgctgccaatgctgcttattatttcatgtgcgcttacagagctgacaacttagtaaaataaatattaggatccttaaattatgttgatcattgctcagttagtttagtgtatattccaatttagagctatagcttgtgcctattttcataaatatattagaaacagtaattttgttttaggtttagcttttttgaacttagcgttctttcccaaaaaaaatgggattttcttcggaaagagttgcaactctggctgatgattgtcaagttggccttgccgcattctgctttttgtcaggcattttggattaattcgtttgttgaaattgtcaattgcttcagtgaagaatttttaatctgcttaaacttggaaaatgattcgcgccatggtaatgaccaaatggagtaagtcggtggcgggaccactggtcacagcgtggagtaagtgaagcaggcacgtgtttttttcttagcaaactttaacgccttttcccaccataaagactactccacattgaatcgcctcaatggcaatactgtgcgcccgcgtgctctgttcctgaatctcgaccgcaagttctccgccgaaggtggcggcgatgagaagcccaagaacgtgccgcctggatttgcggctccagggtttccatccaccttgggcaataacccagagaacaccacgcgtaaggatgtgcccattggcgaggtgcaggcgccaactatttccgtagtgaacgcaggcggtaaactgggcagagctgagccactggaggccagcaccatcgtgcgcagcaagggcacttcgaacgaggacaagatgaccgaggcgcagaagaaggcatcggaggccaaggaggcggccgccaagcagttgcaggatgtcatggccaacttgcctagcaaggagcagaccgaaaagtatttctttcgcgtggttgccttcttctatgacttgacctacctaaccgccacctggttgctca

SEQ ID NO: 21329 - DNA, 2077 bp, DROSOPHILA
tctgtgaacttcggcaaacagtcacaccaatccgacgcgaagtgaatcatattgcgcacagcaaaatcagcggataagcaaattaaagcgacaaaagaatattaaatcggctctgccgctgcagcaagaagcgtgaaaacagcaatgcaatcgggctaatctccaaaaaaaacccaaaaacgtttcaagccagtgtgtgtgcgtgtgtttgtgtgtgtgtgcttgcgtgcgctgcgcatgtgtggtgtgtttgtgtgaaaaggaagagaggtggaaacgcacacaaaaaacgaaaagaaaaaaagtgtacagccgacgacgcgcagacgcatctcgaaattgttggaaaaatcgcgtgtgagaagagtgcgcgaagtgagaaaggagcaacaaatcgctaaagacatatttcgaagatgggttgtgccgtgagtacagcacgcgataaggaggccatcgagcggtcgaagaacatcgatcgcgccctgcgggcggagggcgagcgggccgcctcggaggtgaaactgctgctgctgggagccggagagtcgggcaagtcaacgattgtgaaacagatgaagatcatccatgacacgggctactcgcaggaggaatgcgaggagtatcgtcgcgtcgtcttcagcaacacggtgcagagtctaatggtgatcatccgcgcaatgggacgcctgaagatcgagtttgccgatccgagccgaacggacattgcccgccagttcttcacacacgcctctgccgccgacgagggcatcctgctgcccgagatcgtgctcctgatgaagaaactctgggcagacggtggcgtacagcagagcttcgcccgatcgcgcgaatatcagttgaatgactcggcgggatactatctaaattcgctggataggatcgcgcaaccgaactacatacccacgcagcaggatgtgctacgcacgcgggtgaagaccactggcatcatcgagacacacttctcctgcaagcagctgcacttcaaacttttcgatgtgggtggccagcgatcggagcgcaaaaagtggattcattgcttcgagggcgttacggccataatcttctgcgtcgcgctatcaggttacgatctagtattggccgaggacgaagagatgaatcgtatgattgagtccctgaagctgttcgattccatctgcaactccaagtggtttgtggaaacatccataatactgttcctcaacaagaaggatctgtttgaggagaagatcaagagatctccgctgacgatatgcttcccagagtacacaggaaccaacaccttcgaggaggcggccaactacattcgcatgaagttcgaaaacctgaacaagcgaaaagaccaaaaggagatatacacgcatctcacctgcgccacggatacgaacaacgtgaagttcgtcttcgatgccgtcaccgatgtgatcatcaagaacaatctgaaacaaattggcttattctgagagggcggcggagcacaagatcatcattatttagctggcgtcgtagtattaaaggaaaacgcgcataaacatttccattaaacgctaagaactcgatacatttacgctcgtacgatccatatatgttttaaatgcgttacatgcttgacacacgtaattttaataaccgatttggttgccagtagtcgcggaacaaataacctaaccagctgcaatttagttaaccgtgtccattaaattgcacccataagctaactaatttaaacattagcctaaccacacaaatgtaaagttcgacaaaggacagccggtgggttttgtacatcctaaaacctcaacccgatcggctccctttggaatttagttaagtttcgcgggctaatggcggtgaccaaggggagcaccacatccagaaatccccagaggtgtctccttgggcgcaagccattttccggacgtttattctttgccaagagcttgacagcgttatttaaggtgaacctaaggcctggagttgtaagccctaaaatgtaactagtaaacttactaatatgtttagtaatagcctaaataaaagacaatttatacaaaat

SEQ ID NO: 21330 - protein, 355 aa, DROSOPHILA
MGCAVSTARDKEAIERSKNIDRALRAEGERAASEVKLLLLGAGESGKSTIVKQMKIIHDTGYSQEECEEYRRVVFSNTVQSLMVIIRAMGRLKIEFADPSRTDIARQFFTHASAADEGILLPEIVLLMKKLWADGGVQQSFARSREYQLNDSAGYYLNSLDRIAQPNYIPTQQDVLRTRVKTTGIIETHFSCKQLHFKLFDVGGQRSERKKWIHCFEGVTAIIFCVALSGYDLVLAEDEEMNRMIESLKLFDSICNSKWFVETSIILFLNKKDLFEEKIKRSPLTICFPEYTGTNTFEEAANYIRMKFENLNKRKDQKEIYTHLTCATDTNNVKFVFDAVTDVIIKNNLKQIGLF

SEQ ID NO: 21331 - DNA, 4757 bp, DROSOPHILA
gcgaaaaaaaacatatgttcgctgcattcttgttgagttgcattttaaataatcaaataaatttgataaattgggagcttgttaatcaaattaactcgaaatggctagcacttctcgcgcagctaggagccagaatgccatcccctcgcaggaagcgcaacaacccgtcgatgtggtcgacgccaaggttcgcgccattctaaactacatccttgatcataccgcccagaagattcccataaaggacaaggatttgatagcggtggctggggacaagagcgaactgaagaaacgcctgccgctggtcactaatctgctggccgaaacattcggtataatactaaccccactggacgcgaccaccaagacgttcatctgcactgcggaggagccggtggcctccattcacgagctgacgccggctcaacggccgcagttcacgctgctgtatattattctcatgtacatcttcctgcgcggcaaccgcatcgaggactcgaaactgtacgttatgctggagatgctcaacatctatccagacgaagaacatggctacttcggccccaatctgcgcaaacagatcgaggagacgtttgtgaagcaacaatatctgaagcgggaacgctcacagctaagtgcttacgatgattccaagactttcttcctttggggaccacgtgccaaggcggagttcacattcgagcaaatggtgcaattcgcctccaagctgctcaatcagcatcccaaggtcttcggccatcacctctccatggcccaagaaggagtaaacgcggagtagaataccattctatgaataatttactacatttgatctaacaaattgaaaaccaaacaatatatataataatctaaaatagagccaatttcccatttatcagcaagaaaagaatattacgatgatcttttaaaaatagcacgtcttttctatttatctaaaacttaagttaatttacttaacaacggaagcagagacccgactctaatacttggcatagtctgtgtccattatgagcttgccatccttgtccttcaaacgaacgcggccgttggagtagcgcgtctcttggctgccatccggatacactagcttcacagtgccgtccggatactcccttcgcttgtttagtttggtgtgaatctccttttggccattgggcagattgagaatcttgtcaccattccggagctgcactagatgggttccatccgcataacgccactcctccagtttctccgtatcgctgggatccacaatcttaatgctgttgttgggaaagtgaatctcaacagtgccatccttgcggcgatgttccgtctgcccgttgggaaactcgagtatttccaagccatctaggtaggaggtgtgccaagtgttggtctcagcgtagtaatacttcactgtgccttccctgatgttagtttccttgatatccttgttgaaatagagcatgcgcaagttcatgccatcggcgcttatcttttttagattgccgtttgggtaccaaatgtccttgctcccatccgcattcgtaatctcccgcttaaagtcactgctggagttggcagccggtgggggggtagcagctttcggagcggtcacgggcggctgaacttcctccgattccacagaactactagaggcgtagctctcatccagagcgtatggtgttttcttattcctgctcagtgagcgactccgacttctcacttgggcactgccgctactctgacgacggttttgcgcctctcgctgcttggcaggcttaccagcagtgccgtccagagattgggtgcgccgaccgttctcatcgaggatatcggacattgtcgcggaaggtaactaaatgaagacattagttacattacgatatacacacaagcatgcacttaccactttgggggcaagccgggctatgtttcgattgatctcctgcagcatcttgctgttgttttcgcggccaatcttgaccagctcttgctctaggcgcttgttctccttgcgcagcagctcgatctcgtcacggtagtttcgctgctccttctcactggcccgcagttgagcgcggagtcgtgcctgtgccgagacatgcgcctgctccttttgtttgagctggagttgcagtccctccacttcctgtttcaaggcggctatctcctttttttccttgctgtttgcattgctcttttgaagtcgcatttgctgctcgaacttgcgtcgttcctcctcaatcttcatgcgctcgtcgtgcagataaatttcagcttgaatcttttcgtcatggacgcgttccatggcctccatgtgatcctgtgtgcactttgccttctccaattcgtgttgctgcctcaggcgaaggagttgggcattctgctccttgaaggtggctatctctgtctccagctcttcgaggcgagtgcgaacgagattggctttctcctgaagatctttggttatgggttcgtctgactccttgctgggacttgacttcttcttctgttccaatgcctggaagagggcggacttgaactgttcaaagagctgaatattggagccgtcgttgaggctggtggcatcggagtactcgtgcgtgtcattggagtcggagaaacgcactcgcactttagtattccccacctggatgggtgtcattgtgagggtctgatcgctggacggttcggtgtcctcctcgtccccctcctgcagttcctgcaccagcatctggtccacctgtggctgcaatcgcatctgacgcacctgctgtgtgactacaatgtgatcggagtcatcagctactcggcgacgctgatctttgcgcgccataaaggttcgaatgcagctggagttcatatcaatgtttccctcagtggccttctgctcgagcagctcgaatatgcttacattgctgtcatcttccactcggatttgagcagagcgtctttggatttgcgctggctttatactctgtgtgtccagcaccttggcccagcaaactcctgtcatgggactagcttccgaggaggcttcatcatcggcatgagtggtttgtcccgccctgctcttctgctctacaaaacgaactctgggcgaggtgctcgaggcggttgtggaggacgcataggaagactttagatctggagtggaactgcaggcgttcttgccgataagcatctgctgaaagcgctgctcgttgagatcgtcgagctgtgctgagggtttgggagctggtggaggcgcaggattgggaggtgacttgacttgcttcttgagaataccctttttcatttgaggcgtgcggaactgagggtgggcattagcgaacttgtatcgcggcaggttttccaggcgcagctggtcgggattgatcttgaaccgctgctttagaccttcgccgcgacgcagaaaagggcgtttaggcttggccggctggggatcagccattgaaatctctggctcgtgctcgtccggatccgccgcgagtcgcggcatttgtatagagtgctcctcgtcccactcctccagcacactgttttcatggctttccgtttcctggtgtagcagtcccagcattttgtacatattacgttgctccaagccgagcaaaacgcggtgattggactgccgctcctgcagcagccgcttctgctcgtcctgccaacgactaagcgccgcgagacgctgtgcgatggcctcctggctcagaggcattccaacaggactttcgccagcctcctgcatgcttttatattcgttcttagaatcgcagttttgtttagacgccgtacgcgtaggggaatttaaaattacggcagcagttgtccaacactgtaccagtggcaactctgcggtcagggatggtgctagacatgcattttgattagatttaattttttattaaaaataaaatattgtacattttcttaagcaatatgaaaaattgatttttttcaatcctgatccccttcctccggttcatcaaagtccttaacgttcacgtctgcatcctcgccgtactgcaagatactgtcaatttgtagcagaagatcgcccacgctctcctcgtcctgggaatccaacgggaaaaatctcaccaaactgtaagtgaataataaacatcaatatttacaatttttgaacgtcacaaaaataaccgattttgataagtggcaacgccaccgcatagctcgcagccctcgtatcccacacaaaagcatttttcgacgcgtcgcaaaagaaaatgtgcttgtgcaattaaaatcgagtgataaaaaccaaatataaacccttttagtgcatcaaactgcaataaatcagtgcgtttgggtaaatggccggcgtttgcaaaaaggcgcgcaaatagtgagctgacgaaataccaccaaaaatcccaaccaacaaatcccaggcagccagccactaaaaaaatcgcctaatttacgatacaaaacacttttcgagggcaaatcgaaaaacgctgaattccgggctcgggccaaacagcgcaccaattcaaaaatggagacgcccgtcgaggagcacggcatggacctgaccaaggtgtccgtggtgcgctccgccaagggcgtggatatgctctgcgtggacgactatctgtaccacttcgatcgcatcgggcggaataacacctaccgatggctgtgcaacaggcgcaaggacaagtccactccctgcaagtcccgcatctgcaccatgctgcccgatccgctggacaagacgc

SEQ ID NO: 21332 - DNA, 2706 bp, DROSOPHILA
atgcaggaggctggcgaaagtcctgttggaatgcctctgagccaggaggccatcgcacagcgtctcgcggcgcttagtcgttggcaggacgagcagaagcggctgctgcaggagcggcagtccaatcaccgcgttttgctcggcttggagcaacgtaatatgtacaaaatgctgggactgctacaccaggaaacggaaagccatgaaaacagtgtgctggaggagtgggacgaggagcactctatacaaatgccgcgactcgcggcggatccggacgagcacgagccagagatttcaatggctgatccccagccggccaagcctaaacgcccttttctgcgtcgcggcgaaggtctaaagcagcggttcaagatcaatcccgaccagctgcgcctggaaaacctgccgcgatacaagttcgctaatgcccaccctcagttccgcacgcctcaaatgaaaaagggtattctcaagaagcaagtcaagtcacctcccaatcctgcgcctccaccagctcccaaaccctcagcacagctcgacgatctcaacgagcagcgctttcagcagatgcttatcggcaagaacgcctgcagttccactccagatctaaagtcttcctatgcgtcctccacaaccgcctcgagcacctcgcccagagttcgttttgtagagcagaagagcagggcgggacaaaccactcatgccgatgatgaagcctcctcggaagctagtcccatgacaggagtttgctgggccaaggtgctggacacacagagtataaagccagcgcaaatccaaagacgctctgctcaaatccgagtggaagatgacagcaatgtaagcatattcgagctgctcgagcagaaggccactgagggaaacattgatatgaactccagctgcattcgaacctttatggcgcgcaaagatcagcgtcgccgagtagctgatgactccgatcacattgtagtcacacagcaggtgcgtcagatgcgattgcagccacaggtggaccagatgctggtgcaggaactgcaggagggggacgaggaggacaccgaaccgtccagcgatcagaccctcacaatgacacccatccaggtggggaatactaaagtgcgagtgcgtttctccgactccaatgacacgcacgagtactccgatgccaccagcctcaacgacggctccaatattcagctctttgaacagttcaagtccgccctcttccaggcattggaacagaagaagaagtcaagtcccagcaaggagtcagacgaacccataaccaaagatcttcaggagaaagccaatctcgttcgcactcgcctcgaagagctggagacagagatagccaccttcaaggagcagaatgcccaactccttcgcctgaggcagcaacacgaattggagaaggcaaagtgcacacaggatcacatggaggccatggaacgcgtccatgacgaaaagattcaagctgaaatttatctgcacgacgagcgcatgaagattgaggaggaacgacgcaagttcgagcagcaaatgcgacttcaaaagagcaatgcaaacagcaaggaaaaaaaggagatagccgccttgaaacaggaagtggagggactgcaactccagctcaaacaaaaggagcaggcgcatgtctcggcacaggcacgactccgcgctcaactgcgggccagtgagaaggagcagcgaaactaccgtgacgagatcgagctgctgcgcaaggagaacaagcgcctagagcaagagctggtcaagattggccgcgaaaacaacagcaagatgctgcaggagatcaatcgaaacatagcccggcttgcccccaaagtgttaccttccgcgacaatgtccgatatcctcgatgagaacggtcggcgcacccaatctctggacggcactgctggtaagcctgccaagcagcgagaggcgcaaaaccgtcgtcagagtagcggcagtgcccaagtgagaagtcggagtcgctcactgagcaggaataagaaaacaccatacgctctggatgagagctacgcctctagtagttctgtggaatcggaggaagttcagccgcccgtgaccgctccgaaagctgctacccccccaccggctgccaactccagcagtgactttaagcgggagattacgaatgcggatgggagcaaggacatttggtacccaaacggcaatctaaaaaagataagcgccgatggcatgaacttgcgcatgctctatttcaacaaggatatcaaggaaactaacatcagggaaggcacagtgaagtattactacgctgagaccaacacttggcacacctcctacctagatggcttggaaatactcgagtttcccaacgggcagacggaacatcgccgcaaggatggcactgttgagattcactttcccaacaacagcattaagattgtggatcccagcgatacggagaaactggaggagtggcgttatgcggatggaacccatctagtgcagctccggaatggtgacaagattctcaatctgcccaatggccaaaaggagattcacaccaaactaaacaagcgaagggagtatccggacggcactgtgaagctagtgtatccggatggcagccaagagacgcgctactccaacggccgcgttcgtttgaaggacaaggatggcaagctcataatggacacagactatgccaagtattag

SEQ ID NO: 21333 - protein, 891 aa, DROSOPHILA
MPLSQEAIAQRLAALSRWQDEQKRLLQERQSNHRVLLGLEQRNMYKMLGLLHQETESHENSVLEEWDEEHSIQMPRLAADPDEHEPEISMADPQPAKPKRPFLRRGEGLKQRFKINPDQLRLENLPRYKFANAHPQFRTPQMKKGILKKQVKSPPNPAPPPAPKPSAQLDDLNEQRFQQMLIGKNACSSTPDLKSSYASSTTASSTSPRVRFVEQKSRAGQTTHADDEASSEASPMTGVCWAKVLDTQSIKPAQIQRRSAQIRVEDDSNVSIFELLEQKATEGNIDMNSSCIRTFMARKDQRRRVADDSDHIVVTQQVRQMRLQPQVDQMLVQELQEGDEEDTEPSSDQTLTMTPIQVGNTKVRVRFSDSNDTHEYSDATSLNDGSNIQLFEQFKSALFQALEQKKKSSPSKESDEPITKDLQEKANLVRTRLEELETEIATFKEQNAQLLRLRQQHELEKAKCTQDHMEAMERVHDEKIQAEIYLHDERMKIEEERRKFEQQMRLQKSNANSKEKKEIAALKQEVEGLQLQLKQKEQAHVSAQARLRAQLRASEKEQRNYRDEIELLRKENKRLEQELVKIGRENNSKMLQEINRNIARLAPKVLPSATMSDILDENGRRTQSLDGTAGKPAKQREAQNRRQSSGSAQVRSRSRSLSRNKKTPYALDESYASSSSVESEEVQPPVTAPKAATPPPAANSSSDFKREITNADGSKDIWYPNGNLKKISADGMNLRMLYFNKDIKETNIREGTVKYYYAETNTWHTSYLDGLEILEFPNGQTEHRRKDGTVEIHFPNNSIKIVDPSDTEKLEEWRYADGTHLVQLRNGDKILNLPNGQKEIHTKLNKRREYPDGTVKLVYPDGSQETRYSNGRVRLKDKDGKLIMDTDYAKY

SEQ ID NO: 21334 - DNA, 2762 bp, DROSOPHILA
acaacgtgaagttcgtcttcgatgccgtcaccgatgtgatcatcaagaacaatctgaaacaaattggcttattctgagagggcggcggagcacaagatcatcattatttagctggcgtcgtagtattaaaggaaaacgcgcataaacatttccattaaacgctaagaactcgatacatttacgctcgtacgatccatatatgttttaaatgcgttacatgcttgacacacgtaattttaataaccgatttggttgccagtagtcgcggaacaaataacctaaccagctgcaatttagttaaccgtgtccattaaattgcacccataagctaactaatttaaacattagcctaaccacacaaatgtaaagttcgacaaaggacagccggtgggttttgtacatcctaaaacctcaacccgatcggctccctttggaatttagttaagtttcgcgggctaatggcggtgaccaaggggagcaccacatccagaaatccccagaggtgtctccttgggcgcaagccattttccggacgtttattctttgccaagagcttgacagcgttatttaaggtgaacctaaggcctggagttgtaagccctaaaatgtaactagtaaacttactaatatgtttagtaatagcctaaataaaagacaatttatacaaaataaccattcgtacttgaatgctgccaatgctgcttattatttcatgtgcgcttacagagctgacaacttagtaaaataaatattaggatccttaaattatgttgatcattgctcagttagtttagtgtatattccaatttagagctatagcttgtgcctattttcataaatatattagaaacagtaattttgttttaggtttagcttttttgaacttagcgttctttcccaaaaaaaatgggattttcttcggaaagagttgcaactctggctgatgattgtcaagttggccttgccgcattctgctttttgtcaggcattttggattaattcgtttgttgaaattgtcaattgcttcagtgaagaatttttaatctgcttaaacttggaaaatgattcgcgccatggtaatgaccaaatggagtaagtcggtggcgggaccactggtcacagcgtggagtaagtgaagcaggcacgtgtttttttcttagcaaactttaacgccttttcccaccataaagactactccacattgaatcgcctcaatggcaatactgtgcgcccgcgtgctctgttcctgaatctcgaccgcaagttctccgccgaaggtggcggcgatgagaagcccaagaacgtgccgcctggatttgcggctccagggtttccatccaccttgggcaataacccagagaacaccacgcgtaaggatgtgcccattggcgaggtgcaggcgccaactatttccgtagtgaacgcaggcggtaaactgggcagagctgagccactggaggccagcaccatcgtgcgcagcaagggcacttcgaacgaggacaagatgaccgaggcgcagaagaaggcatcggaggccaaggaggcggccgccaagcagttgcaggatgtcatggccaacttgcctagcaaggagcagaccgaaaagtatttctttcgcgtggttgccttcttctatgacttgacctacctaaccgccacctggttgctcaactttgtcgagcacaatatcgttcaaaatgccaaggtgcagcactactggaagcgattccacgaaaaaatggagcaggccaagaaggattaactcccagcggagccgaaaaatatattataaaactcatgcgaaagcaaaaaataaaacaactcgctgacgagtacaaaattacacttgacttggccacttttccatcagattaacgccgaggtgtagccatccagtagtttggccaagaatttgagtatcttgttgcgagcggccaccagttgtggcggatcggttttcaccggctcatacatattggcgcagtgagcggttcctaaaaaaaaaaacacaataaatgcttacattacccaagttatatgtgaaaaatgtgttggtaagcacataccttctatgtaaatggtaggaagtgctgcgttcgtggacttgaccaagcccaaagcatgccagggatcaatggaaccgtgcacgtacaacacatttgtggtctttggctttagggcgccatagttatcatttgtggcggacaccaccagtttgaggaacttggcgttcatattcttggagaacacatccatgcactggcgtataaagaagtcgacaccgaagcgatcaccaaatgtgtcagccgggttatccgaggtctgatagaagccgaattcgtggcaggtctgatatgtccactggcgcattcccttggccgtctccgagtcccaggaaacgttcttcatgtccgccaccatcttgtcgtacttgtagtccaggcaggtggtgttcgattccttcaatagcatatcgttgaccaggcccaaacgggtcacaggtggaccagccgtggtgtttagcatgacatcgcagatctatggagttcaaacattcttagtatggacttgatagggatcaaagtgaggatgaaacacacgtcgtcaatggtgatggtggcatggggactgttgtccttgttgtattgcaccactccagcaaagttgccagccagattctcaaagaaattggccatgtccaggtcgttttcaatggagtccttgatgggagtgcatgttctgagtataaaatggtttacaaa

SEQ ID NO: 21335 - DNA, 700 bp, DROSOPHILA
tcgtttgttgaaattgtcaattgcttcagtgaagaatttttaatctgcttaaacttggaaaatgattcgcgccatggtaatgaccaaatggagtaagtcggtggcgggaccactggtcacagcgtggaactactccacattgaatcgcctcaatggcaatactgtgcgcccgcgtgctctgttcctgaatctcgaccgcaagttctccgccgaaggtggcggcgatgagaagcccaagaacgtgccgcctggatttgcggctccagggtttccatccaccttgggcaataacccagagaacaccacgcgtaaggatgtgcccattggcgaggtgcaggcgccaactatttccgtagtgaacgcaggcggtaaactgggcagagctgagccactggaggccagcaccatcgtgcgcagcaagggcacttcgaacgaggacaagatgaccgaggcgcagaagaaggcatcggaggccaaggaggcggccgccaagcagttgcaggatgtcatggccaacttgcctagcaaggagcagaccgaaaagtatttctttcgcgtggttgccttcttctatgacttgacctacctaaccgccacctggttgctcaactttgtcgagcacaatatcgttcaaaatgccaaggtgcagcactactggaagcgattccacgaaaaaatggagcaggccaagaaggattaa

SEQ ID NO: 21336 - protein, 212 aa, DROSOPHILA
MIRAMVMTKWSKSVAGPLVTAWNYSTLNRLNGNTVRPRALFLNLDRKFSAEGGGDEKPKNVPPGFAAPGFPSTLGNNPENTTRKDVPIGEVQAPTISVVNAGGKLGRAEPLEASTIVRSKGTSNEDKMTEAQKKASEAKEAAAKQLQDVMANLPSKEQTEKYFFRVVAFFYDLTYLTATWLLNFVEHNIVQNAKVQHYWKRFHEKMEQAKKD

SEQ ID NO: 21337 - DNA, 4488 bp, DROSOPHILA
aaataggcgaacatattgtgcaggacataattaagaagggtattggtcagatcatcgacaagatcaagacacccgccacagcggaattgctggaagccgagaaggagaccgttgagcgtcgtttccaggcatccgcctccaagggcctaaaagccctcagggaactggacagcaaagtgttccacgttccaccgcatgtgctgcatccggagcacatgttcgtcgagaatcagtataccagcgaagaggaggagcagaagacagccaggttggaggagctgaaggccaaatacagagaggtaacttgtagaaccaatggaaactatcttgtatgcctcattttaatcattataatggggaaaaggatgctttattttatgttttaataatgctaaatcacatcaatttcagaacatggccatgctggcgcatttgaagatcgaggaggagaagtacgccgccatggaggatctcatccagaaggagatcgaaatgcaggatcgcgtgcagcgaagctgctcctccctcaacatcaccaagctgaagcaattctggaatcaagtgcccctgcagataaagaaggagactgattaaataaactaactggatcaagttttttaatctacatttccaatatcttctttcgaaactagttttaaccctggagtcatttataatcactaagactcttctatattccactttacctattattatgtcgttaacttagttttaaacttaaaattaaattaaattaaaattattatgaatccgaaacacctagatgattacttactagttttaaaccaatttaccttagcattatattagttcctttgacaacagcggcaaccaagcaacggtcgctgtttaaattttccaactgccttgttttcaaacagaaaacaagccggttaaaaagtttcaagcacagaacagacacaaaaacccccttatatgttacatttcgaatcgtatattttgctataagcctggaaaaatgggagactcgcacgatgtctgcaggcagctgctgccgcgcgcaatcttcggcatcaatggcaaggtggagaatggagtgcgccagcatccggtcacgggatccatcatctttgcgctgggcaacaaaatcggcatcgccgactacaagaagaatacgcaggagtttgtggccggacacacgaacaccatatcgtgcctggatctcagcaagagtggcaaatacatggcctccggtcagatcaatcacatgggcttccgcggctatgtgatcatctggaattacgatcagcgcaaggagatcgctcgccacgatctgcacaaggtatctgtgcaggccatctgctttactgcccaggatagatgcgttgtgtccatcggtggcgtggatgatggttccgtaattgtcttcgacatggaggcattgtaagttgttcatatcagagctcatgcttgaactccttcaatgacttcgtttgccattacagctctcccatttgccaaacacccgcatcgagggccatctctggaaatgccttgactgtccggccgttgcacaacaatccctacttctttgtgaccgccggcgatcgccatctgcgtctgtggagcatcctgcgtgaggagaagaagctgtacgtacaggatgtcctaatggccagcaagacacgggttttctactgtgcgcgcatcaataagacggatgagtttgcctatctgggcaccggaactggggacattgtaaagatcgtgctcaactgctgcgatcgtgatcatgtgagcaaacaaggctcaaccagctgcatcctcggagccttcggcacccacaatcccaggaagccaacgggcagggactgcaatcgttatgtgaatggtgtgcgtgcactgtatgtcctggaaggcggacgtctgctgattggagcgggaaatggtgatatagagctggtggaggagcgtaccgatgtgccgctcattaactttcgcgattatcccggacccacatggccatatttgcgcaccctgaaaaagacgcacgtttcgggcagaatctcgtcctttgtgcgctcgaaaacggacatgttttacatctgcacggacaccaacgagatctatgggctgaatatcaagacttgggtgctcaagctgctgcgaacgtgccacaccaaatcggtctactgcatcacgtttcccaagtgagtttggatggaactaacccttctacttgcaatctatttgctacaattgatcatatatatgtatttaaggaactactctggtgtctttgccacgtcgggcaaggagtgcatccgcatctggtcgtctggtcgcaagcaggagctgctccgcatcatggtttacaacttcaactgcgcctgcgtgcgctttacccacgatggcactagcatagtctccgtttggaacgatggcatcattcgcgccttcactcccatcaccggtagactcatctacgccatacccaacgcgcacaacaaaggtgaactttgggaataccaatccttctaagccttcttactgaaatcctctcgttcaacacaggttgcagtgcattggccgtggcctcgtcgggtcgcttgatcgtcactggcggcatcgagggacaggtgagggtgtggaagatcgatccgtatcgccaggatctcgtcggcgtgctgaaggatcactcggggcccataacctcgctggatatcaactatctcgacaccgaagtgatctccgcctgcaccgatggctcttgtgtaatctgggacattaagtgagttaatctcagtggcaaagtatagcatgtattcctcattcaccaagtaatccccaccagacgcatgacccgcaaacaagtggtgaccgctaatacgcagttcatgtccgcatcctacttcccaactggagtgcaagtgatcacctgcggctcggacggcagaatcatctactggatggtgtacaatggagcgttgatcagggaactaactgcgtccaagaaatcgtcggtcaactgcttggccatcaacgaaacgggtgactacttcatcaccgtgggcagcgatctgcaggtgaagctgtgggactacaacagtggtgctgtggtgggcatcggatcggagcacgcctcctccgtgatcagttgtgcgtacagtccctgcatgaccatgtttgtcaccggcagcacggacggatcgctgatcatatgggatgtgccgcgtgacttctggggcaggcccaatccgccggatgtcaccaagtattcgctaccaaagacatcgtccaaaaccaggatgagtgacgtgccgtcgcgggtgaactcgggcaccaatctaaagacgaccaagggcgagaacatcgatggcctgctgaaggccactcccaaggacgatctctgctgcgtggagtgcccgccgtgcgccaaaaaggataccaagggcgtggatccctatgccgagtgcggaatcgttcccgatgtccgcaagtgctgagattttcctttccaatttctttttgtcgtgaaataaaggcagttgtcctttctaagcttgatttaactgagattatttatgggagcttgattttctaggatagattggccttctcttttataaatcgtattgtaagtcataaggagatatggctttgaataatagtcttattagattaaattgattgattgctgaaggaaaccaatttcaaattcaatttaatttgatcaaatgagtatttggtcacacttaacaactgtgttgcatcaaacatgttcgtcgaaccaattttcaaacatgaaaatgagcaagcaaaatattttaaacttaaaattaagtctcaatgaaacaaagaatatggtagttcatatgtttatgaactattaatttgtttagaaacgaaagttttatattttagattcacagtatgaccctgctggcgtgtggtgtaacgggcggctcgccccgcggtcacactgaattactattggccagccttgttgttgttgtttttcgtgttcgtaaactaagagttcgtgtgcatggatttttagccgcattggtagtagttactgtcgctccgccgccgcgtgaagtcagatttctccgagcgctcaaacgaacagcacgcgacattcgccggaaaaaaaaacgagaaccataagttgtgggaaattcgcacaagggacagaaggaagaagaagcagcagcagacgaaagggacgaacggcgaagcaaaacaaatcgagcgacgaatagcggtgtgcaacgaaatgaaggtctgctgcattggcgctggttatgtcggcggtccgacctgcgcggttatggcgctcaaatgccccgatatcgtgataactctggtggacaagagctccgagcggattgcccagtggaattcggataagttgcccatttacgaggtacgttcgctttcctccttctcatcgtttgtatgtacataggaagtgccactgttctgtgtgtgtgtgtgctagag

SEQ ID NO: 21338 - DNA, 2229 bp, DROSOPHILA
atgggagactcgcacgatgtctgcaggcagctgctgccgcgcgcaatcttcggcatcaatggcaaggtggagaatggagtgcgccagcatccggtcacgggatccatcatctttgcgctgggcaacaaaatcggcatcgccgactacaagaagaatacgcaggagtttgtggccggacacacgaacaccatatcgtgcctggatctcagcaagagtggcaaatacatggcctccggtcagatcaatcacatgggcttccgcggctatgtgatcatctggaattacgatcagcgcaaggagatcgctcgccacgatctgcacaaggtatctgtgcaggccatctgctttactgcccaggatagatgcgttgtgtccatcggtggcgtggatgatggttccgtaattgtcttcgacatggaggcattctctcccatttgccaaacacccgcatcgagggccatctctggaaatgccttgactgtccggccgttgcacaacaatccctacttctttgtgaccgccggcgatcgccatctgcgtctgtggagcatcctgcgtgaggagaagaagctgtacgtacaggatgtcctaatggccagcaagacacgggttttctactgtgcgcgcatcaataagacggatgagtttgcctatctgggcaccggaactggggacattgtaaagatcgtgctcaactgctgcgatcgtgatcatgtgagcaaacaaggctcaaccagctgcatcctcggagccttcggcacccacaatcccaggaagccaacgggcagggactgcaatcgttatgtgaatggtgtgcgtgcactgtatgtcctggaaggcggacgtctgctgattggagcgggaaatggtgatatagagctggtggaggagcgtaccgatgtgccgctcattaactttcgcgattatcccggacccacatggccatatttgcgcaccctgaaaaagacgcacgtttcgggcagaatctcgtcctttgtgcgctcgaaaacggacatgttttacatctgcacggacaccaacgagatctatgggctgaatatcaagacttgggtgctcaagctgctgcgaacgtgccacaccaaatcggtctactgcatcacgtttcccaagaactactctggtgtctttgccacgtcgggcaaggagtgcatccgcatctggtcgtctggtcgcaagcaggagctgctccgcatcatggtttacaacttcaactgcgcctgcgtgcgctttacccacgatggcactagcatagtctccgtttggaacgatggcatcattcgcgccttcactcccatcaccggtagactcatctacgccatacccaacgcgcacaacaaaggttgcagtgcattggccgtggcctcgtcgggtcgcttgatcgtcactggcggcatcgagggacaggtgagggtgtggaagatcgatccgtatcgccaggatctcgtcggcgtgctgaaggatcactcggggcccataacctcgctggatatcaactatctcgacaccgaagtgatctccgcctgcaccgatggctcttgtgtaatctgggacattaaacgcatgacccgcaaacaagtggtgaccgctaatacgcagttcatgtccgcatcctacttcccaactggagtgcaagtgatcacctgcggctcggacggcagaatcatctactggatggtgtacaatggagcgttgatcagggaactaactgcgtccaagaaatcgtcggtcaactgcttggccatcaacgaaacgggtgactacttcatcaccgtgggcagcgatctgcaggtgaagctgtgggactacaacagtggtgctgtggtgggcatcggatcggagcacgcctcctccgtgatcagttgtgcgtacagtccctgcatgaccatgtttgtcaccggcagcacggacggatcgctgatcatatgggatgtgccgcgtgacttctggggcaggcccaatccgccggatgtcaccaagtattcgctaccaaagacatcgtccaaaaccaggatgagtgacgtgccgtcgcgggtgaactcgggcaccaatctaaagacgaccaagggcgagaacatcgatggcctgctgaaggccactcccaaggacgatctctgctgcgtggagtgcccgccgtgcgccaaaaaggataccaagggcgtggatccctatgccgagtgcggaatcgttcccgatgtccgcaagtgctga

SEQ ID NO: 21339 - protein, 742 aa, DROSOPHILA
MGDSHDVCRQLLPRAIFGINGKVENGVRQHPVTGSIIFALGNKIGIADYKKNTQEFVAGHTNTISCLDLSKSGKYMASGQINHMGFRGYVIIWNYDQRKEIARHDLHKVSVQAICFTAQDRCVVSIGGVDDGSVIVFDMEAFSPICQTPASRAISGNALTVRPLHNNPYFFVTAGDRHLRLWSILREEKKLYVQDVLMASKTRVFYCARINKTDEFAYLGTGTGDIVKIVLNCCDRDHVSKQGSTSCILGAFGTHNPRKPTGRDCNRYVNGVRALYVLEGGRLLIGAGNGDIELVEERTDVPLINFRDYPGPTWPYLRTLKKTHVSGRISSFVRSKTDMFYICTDTNEIYGLNIKTWVLKLLRTCHTKSVYCITFPKNYSGVFATSGKECIRIWSSGRKQELLRIMVYNFNCACVRFTHDGTSIVSVWNDGIIRAFTPITGRLIYAIPNAHNKGCSALAVASSGRLIVTGGIEGQVRVWKIDPYRQDLVGVLKDHSGPITSLDINYLDTEVISACTDGSCVIWDIKRMTRKQVVTANTQFMSASYFPTGVQVITCGSDGRIIYWMVYNGALIRELTASKKSSVNCLAINETGDYFITVGSDLQVKLWDYNSGAVVGIGSEHASSVISCAYSPCMTMFVTGSTDGSLIIWDVPRDFWGRPNPPDVTKYSLPKTSSKTRMSDVPSRVNSGTNLKTTKGENIDGLLKATPKDDLCCVECPPCAKKDTKGVDPYAECGIVPDVRKC

SEQ ID NO: 21340 - DNA, 7038 bp, DROSOPHILA
cgagctgtgctgagggtttgggagctggtggaggcgcaggattgggaggtgacttgacttgcttcttgagaataccctttttcatttgaggcgtgcggaactgagggtgggcattagcgaacttgtatcgcggcaggttttccaggcgcagctggtcgggattgatcttgaaccgctgctttagaccttcgccgcgacgcagaaaagggcgtttaggcttggccggctggggatcagccattgaaatctctggctcgtgctcgtccggatccgccgcgagtcgcggcatttgtatagagtgctcctcgtcccactcctccagcacactgttttcatggctttccgtttcctggtgtagcagtcccagcattttgtacatattacgttgctccaagccgagcaaaacgcggtgattggactgccgctcctgcagcagccgcttctgctcgtcctgccaacgactaagcgccgcgagacgctgtgcgatggcctcctggctcagaggcattccaacaggactttcgccagcctcctgcatgcttttatattcgttcttagaatcgcagttttgtttagacgccgtacgcgtaggggaatttaaaattacggcagcagttgtccaacactgtaccagtggcaactctgcggtcagggatggtgctagacatgcattttgattagatttaattttttattaaaaataaaatattgtacattttcttaagcaatatgaaaaattgatttttttcaatcctgatccccttcctccggttcatcaaagtccttaacgttcacgtctgcatcctcgccgtactgcaagatactgtcaatttgtagcagaagatcgcccacgctctcctcgtcctgggaatccaacgggaaaaatctcaccaaactgtaagtgaataataaacatcaatatttacaatttttgaacgtcacaaaaataaccgattttgataagtggcaacgccaccgcatagctcgcagccctcgtatcccacacaaaagcatttttcgacgcgtcgcaaaagaaaatgtgcttgtgcaattaaaatcgagtgataaaaaccaaatataaacccttttagtgcatcaaactgcaataaatcagtgcgtttgggtaaatggccggcgtttgcaaaaaggcgcgcaaatagtgagctgacgaaataccaccaaaaatcccaaccaacaaatcccaggcagccagccactaaaaaaatcgcctaatttacgatacaaaacacttttcgagggcaaatcgaaaaacgctgaattccgggctcgggccaaacagcgcaccaattcaaaaatggagacgcccgtcgaggagcacggcatggacctgaccaaggtgtccgtggtgcgctccgccaagggcgtggatatgctctgcgtggacgactatctgtaccacttcgatcgcatcgggcggaataacacctaccgatggctgtgcaacaggcgcaaggacaagtccactccctgcaagtcccgcatctgcaccatgctgcccgatccgctggacaagacgcgccacgtcgtcgtggacgtcgttctggcccacatccacccgcgctgcagcgatcacgaggtcaacaaggtggcccagcgcaagcggctctccgtaatgatgatgaacgacgcttacagcaccacccagccgaagagagcacgcctgtacgagcgcgccaacgccggcatgaatccgccggagttcatctacggaagcatcgacacctccaccgtggaggcctcgttccagttggactttgaggtacggccccaggccaactgtacctggctcatgcccctgaatactcaactcaaccatttatttagaatctagctgggtctctttttcagaaagaacattgatattaatattgattcatatttcggtaaccaccgctactttgaacatttgataatgtaaaaaaaaggttaatttgctcaccttagtaatgagatggtttcccgccaatttgttttttatatttattttcctatttgcaaatccaccggctaggccgttaaaaggacaataaataccaaagcttaatcatttatgattcaaaaaatactatatatctccaaacgaaactaaatattagggatttttgaaaaaaatgggacccaatcattttataacatgcaccctactgaagggaatatccaagggaatgaaatacttttgaacttacacttaacttaattttacacctaaatagatttcccatgatgtaccatttttaattcatatacaattttacagcacaaaaatgactaacacgaactctaattccgcaggacaaggatcgtgtgtacatgctacggcgccgcgacggccgcgtgatggtctgcatcgacgggcatctgtactacctggccgggaaatcctacaagggcgacatattccgatggacctgtgtgcgcaagcgtgacattgagtgcacggccaggatctgcacggaggcgactttggcgggggcacatcgcctgcatgccgtcgacacggatgcgcacattcatccgcactactcggccgccaagctgatgcacatgttttcgaagcaccaaatcgtgttggtggaggacgaaaatacctctgatgtgctggcagagtgccccaatcttgagtacttcgatccggaaaacactttcgacacagctcagcggggcgatgacttggaatccataataatcgaggagtgcgaggataactacgatatatacatgagaacggacggaagccaaggtggagggattcaaggcagcgaagagctcgagagccaggaaggggatgacgagtcttcgctggtggacccgaaaatgcatcacagctccaagtggccagcggcattcgacgtaattgccaactatctgccgccgccgagccacaatccactcacggaaaccgacttgaccaagttcacatttctaccatcggccaagggtcgaaaggtgctgtgcttgagtcagcatctgttccacttcgactcgcaaagcaggtcaaacggccacatgttcttcacatgcataaaccgacgcgacaaggccaacacttgtcacgtccgcattaccctagacccggttgaaaacggaccagtagtgcttcgaatcaatggggagcacacgcacaatccggatataaaagaaattgctcgccggctaaagcagcaggccaagctggatcaggacaatgtgcacaagctgcaaaagatcgagcactctgaagagatcagtttcgaaagcgatgagggatcggccagccagggaggcgataccttcgaggcggagaacagcgtcgacgaaagctacggacacattgacacgcgtaatgtggttatgaagaaggtgattagcatcgatggcgccatcaaaatggaaccagaatcgaaagcgaacatgatagtgcagtaccttaaggacggagcgaacaacataagcgccaagatcgagatactgcccgacgcactagatgagctcgacccacattcacacactgcttattcatccacacctttgccgaaagttcgacagccgcagatcacgaatattcgtaggcgacgcgatgtagcagagccagcaaagggcgcccagccggacatggacctctcaaagatttgtaccctgagatctgccaaggggcacgaactgctgtgcgtcgatggctatatataccatgccaagaaccgtggcgtcatctcgcgcaactattgggtgtgcatcaaaagccgcgatccggacatcaattgcaagagccgcatctcgacggccacccaaaaggatggctctattcgtgtgctccgtgtttacaacagtcatagccatcctttcagcgaggacgacatcaagcggagactctacaacgagatcaacaagaagaacaacaagaacctaaagtttcggccgctgcactttatcggcaaatcgttggatcagattcagcaggagtatggtgatttggccatcgagcgcctgaatgtgtctaatatcagcagcgacattgtggttcacaagaagcctcgagttagcggcagtaataatagcagatctgcatcattatccgtgtcccacagagcggactctcaccatgaggaagatgatgttgttatcgtggaggaagagtaccaggagcaagaggaaggcgtcgaaatgaccatggagggcgatcaacaatacatggatgtggacaacacagatgggatcattgaggttgtcgaggaagtagccgatgaaatggaaagctacggctctattgtgtatgtataccatcccgaaagaaagaaaacataacaatctttttaaaaaacgtacttgcatgaataaaaacaagaacactaacaatgagatagaacttttggcacacttacaacacctacccttattcgaaacaaatattcatagcctcgattcattataaagaattcgtgactgttaagggtcgacaaattaggcagagtatttgcgaacctatgttagcataatgcctttcaaacgcaaaacaagtttggattgtcattgaaatgaacacctgcaatatctggcaagttaattcagcacatcagtatggtttgaaagctgctcgaacgtacaacattaattttgggtttgttattattcagtatttaaaaatatttcttaaaaagcccagaaattctttgacagaatttttgcgatagaatacacactgaatacagacagcatcagcaataattaaaccaaatatatatatagatatatagaaaatagacagtagaggcaaattgctttcacttttaagctacaagcaaaccggtcgaacaagagacaaatacacaaaactaacgatcgctgtgtacccacagacccatctacacaatgaaactctacgccgtatccgatggtccgccttccctggccgttcgcatgaccctgaaggccttggatatacaatatcaactcatcaatgtggacttttgcgccatggaacatcgctctgaggagtactcgaaggtatgtgcatatggagtcatgaatttgattttcaagtcattaaaaattcaaatcattgcagatgaatccgcaaaaggagatacccgtgctggacgacgacggtttctatctatcggagagcattgccattatgcaatacctctgcgacaagtacgcgccggattcaacgctatatccgcaggacgtcaatgtgagagcagtaatcaatcagcggctatgctttaacatgggattctactatgcccccatatccgcccacagcatggcgcccattttcttcgactacaaacgtacgcccatgtcgctaaagaaggtgcagaacgcacttgatgtgttcgaaacctatttgcagcgactgggcactaagtacgcggcaggcgagaacataaccattgcagacttcgctctcatttcggccacgatctgcttggaggcaattaactttgacttgcaccagtttacgttggtgaacaagtggtacgaaaccttcaaggtggaatacccgcagctgtgggagatcgccaacagcggcatgcaggagataagtgcgtttgagcagaacccaccggatatgtcacacatggaacacccattccatccgacgcgcaagtctatgggcctgaagttgtagattgtagttttagaacttaagaccctgccagcaagggaagtgaaaaacgttctccttttaattcttgtgaaatattcgatatatatatatatattgatataataataataacataattatataataatatataattataggttgttttgccttccaaattgacatgaacaaagaagttcagaagtctaagaaaaaatagtattaaaatgtgcccacaaaattttatgcgattgaaattgcaagtcgaactggaggtcaagcttaaattttttcaacaaaatacatatttccattatttttgtcttattagaaaatattatcatttcttgctaacaatttgaagttattttatggcaagaatccctttaaatcaaccttggttattataaggactaatcaacctgtgtttatcatttaaaataaaacatttcgataaaaccaaaaatgtgtttcctttgatatgattgtattaaaaaatcttctgataaaaaacctaccgatgttaataaaatcataatgttggtgattaaatcgaactaactaaaacgaaaatattaacaaccatagtcgactttttcgtgtattttctgcggctaatcgcttacaatagtctctcttcaaatgtaattaacttttggattttttggactgtaatttttgtaaaatgctcagtaaaactccactccgctaccaccgatttaagtatcaattaattataattgattagctcacctgaaatcctcaattagcgcgccaatagcctgcgtaagctttgcgtatttctcgccaaaaccagtcccgatggtcagctcgcccatcagactgtgggcatccggttccaggtacatctccagctgtttccgcgcatcgctgctcagcagatccactttggtcagcacattgatgtgcggctgctccatgttggccatcacactgagcgcggccatggtgccggaaatgaacttggccccgtccaccatgaactgcgagtccaagcagaagacgacgcatgtgcggaagttccaggactcgagcagttccaccagctgtctgcccatctttaggtgagtgaagagctcgatctggccgggcatgtcgaacaggatgtagtcatcatccggctcgcccaccatcagctcgttctcgccgccgcagagctgttccttcagccattcctggttctcgatcaagaactccaggcagaagatgaggccgccgttcggtccgtagtgcagctcttcgtcctccatggcatcgtccaggtggattagatcgcgaatgtccgtcagcgggttgtaggtgaagtgctctgccgccggatcgaggttcaccacctgaacatttctcttgcagtccatcgcatattgctgcattaagctgcagtacgtcgactggggagaatattg

SEQ ID NO: 21341 - DNA, 3859 bp, DROSOPHILA
ccacacaaaagcatttttcgacgcgtcgcaaaagaaaatgtgcttgtgcaattaaaatcgagtgataaaaaccaaatataaacccttttagtgcatcaaactgcaataaatcagtgcgtttgggtaaatggccggcgtttgcaaaaaggcgcgcaaatagtgagctgacgaaataccaccaaaaatcccaaccaacaaatcccaggcagccagccactaaaaaaatcgcctaatttacgatacaaaacacttttcgagggcaaatcgaaaaacgctgaattccgggctcgggccaaacagcgcaccaattcaaaaatggagacgcccgtcgaggagcacggcatggacctgaccaaggtgtccgtggtgcgctccgccaagggcgtggatatgctctgcgtggacgactatctgtaccacttcgatcgcatcgggcggaataacacctaccgatggctgtgcaacaggcgcaaggacaagtccactccctgcaagtcccgcatctgcaccatgctgcccgatccgctggacaagacgcgccacgtcgtcgtggacgtcgttctggcccacatccacccgcgctgcagcgatcacgaggtcaacaaggtggcccagcgcaagcggctctccgtaatgatgatgaacgacgcttacagcaccacccagccgaagagagcacgcctgtacgagcgcgccaacgccggcatgaatccgccggagttcatctacggaagcatcgacacctccaccgtggaggcctcgttccagttggactttgaggacaaggatcgtgtgtacatgctacggcgccgcgacggccgcgtgatggtctgcatcgacgggcatctgtactacctggccgggaaatcctacaagggcgacatattccgatggacctgtgtgcgcaagcgtgacattgagtgcacggccaggatctgcacggaggcgactttggcgggggcacatcgcctgcatgccgtcgacacggatgcgcacattcatccgcactactcggccgccaagctgatgcacatgttttcgaagcaccaaatcgtgttggtggaggacgaaaatacctctgatgtgctggcagagtgccccaatcttgagtacttcgatccggaaaacactttcgacacagctcagcggggcgatgacttggaatccataataatcgaggagtgcgaggataactacgatatatacatgagaacggacggaagccaaggtggagggattcaaggcagcgaagagctcgagagccaggaaggggatgacgagtcttcgctggtggacccgaaaatgcatcacagctccaagtggccagcggcattcgacgtaattgccaactatctgccgccgccgagccacaatccactcacggaaaccgacttgaccaagttcacatttctaccatcggccaagggtcgaaaggtgctgtgcttgagtcagcatctgttccacttcgactcgcaaagcaggtcaaacggccacatgttcttcacatgcataaaccgacgcgacaaggccaacacttgtcacgtccgcattaccctagacccggttgaaaacggaccagtagtgcttcgaatcaatggggagcacacgcacaatccggatataaaagaaattgctcgccggctaaagcagcaggccaagctggatcaggacaatgtgcacaagctgcaaaagatcgagcactctgaagagatcagtttcgaaagcgatgagggatcggccagccagggaggcgataccttcgaggcggagaacagcgtcgacgaaagctacggacacattgacacgcgtaatgtggttatgaagaaggtgattagcatcgatggcgccatcaaaatggaaccagaatcgaaagcgaacatgatagtgcagtaccttaaggacggagcgaacaacataagcgccaagatcgagatactgcccgacgcactagatgagctcgacccacattcacacactgcttattcatccacacctttgccgaaagttcgacagccgcagatcacgaatattcgtaggcgacgcgatgtagcagagccagcaaagggcgcccagccggacatggacctctcaaagatttgtaccctgagatctgccaaggggcacgaactgctgtgcgtcgatggctatatataccatgccaagaaccgtggcgtcatctcgcgcaactattgggtgtgcatcaaaagccgcgatccggacatcaattgcaagagccgcatctcgacggccacccaaaaggatggctctattcgtgtgctccgtgtttacaacagtcatagccatcctttcagcgaggacgacatcaagcggagactctacaacgagatcaacaagaagaacaacaagaacctaaagtttcggccgctgcactttatcggcaaatcgttggatcagattcagcaggagtatggtgatttggccatcgagcgcctgaatgtgtctaatatcagcagcgacattgtggttcacaagaagcctcgagttagcggcagtaataatagcagatctgcatcattatccgtgtcccacagagcggactctcaccatgaggaagatgatgttgttatcgtggaggaagagtaccaggagcaagaggaaggcgtcgaaatgaccatggagggcgatcaacaatacatggatgtggacaacacagatgggatcattgaggttgtcgaggaagtagccgatgaaatggaaagctacggctctattgtacccatctacacaatgaaactctacgccgtatccgatggtccgccttccctggccgttcgcatgaccctgaaggccttggatatacaatatcaactcatcaatgtggacttttgcgccatggaacatcgctctgaggagtactcgaagatgaatccgcaaaaggagatacccgtgctggacgacgacggtttctatctatcggagagcattgccattatgcaatacctctgcgacaagtacgcgccggattcaacgctatatccgcaggacgtcaatgtgagagcagtaatcaatcagcggctatgctttaacatgggattctactatgcccccatatccgcccacagcatggcgcccattttcttcgactacaaacgtacgcccatgtcgctaaagaaggtgcagaacgcacttgatgtgttcgaaacctatttgcagcgactgggcactaagtacgcggcaggcgagaacataaccattgcagacttcgctctcatttcggccacgatctgcttggaggcaattaactttgacttgcaccagtttacgttggtgaacaagtggtacgaaaccttcaaggtggaatacccgcagctgtgggagatcgccaacagcggcatgcaggagataagtgcgtttgagcagaacccaccggatatgtcacacatggaacacccattccatccgacgcgcaagtctatgggcctgaagttgtagattgtagttttagaacttaagaccctgccagcaagggaagtgaaaaacgttctccttttaattcttgtgaaatattcgatatatatatatatattgatataataataataacataattatataataatatataattataggttgttttgccttccaaattgacatgaacaaagaagttcagaagtctaagaaaaaatagtattaaaatgtgcccacaaaattttatgcgattgaaattgcaagtcgaactggaggtcaagcttaaattttttcaacaaaatacatatttccattatttttgtcttattagaaaatattatcatttcttgctaacaatttgaagttattttatggcaagaatccctttaaatcaaccttggttattataaggactaatcaacctgtg

SEQ ID NO: 21342 - protein, 1045 aa, DROSOPHILA
METPVEEHGMDLTKVSVVRSAKGVDMLCVDDYLYHFDRIGRNNTYRWLCNRRKDKSTPCKSRICTMLPDPLDKTRHVVVDVVLAHIHPRCSDHEVNKVAQRKRLSVMMMNDAYSTTQPKRARLYERANAGMNPPEFIYGSIDTSTVEASFQLDFEDKDRVYMLRRRDGRVMVCIDGHLYYLAGKSYKGDIFRWTCVRKRDIECTARICTEATLAGAHRLHAVDTDAHIHPHYSAAKLMHMFSKHQIVLVEDENTSDVLAECPNLEYFDPENTFDTAQRGDDLESIIIEECEDNYDIYMRTDGSQGGGIQGSEELESQEGDDESSLVDPKMHHSSKWPAAFDVIANYLPPPSHNPLTETDLTKFTFLPSAKGRKVLCLSQHLFHFDSQSRSNGHMFFTCINRRDKANTCHVRITLDPVENGPVVLRINGEHTHNPDIKEIARRLKQQAKLDQDNVHKLQKIEHSEEISFESDEGSASQGGDTFEAENSVDESYGHIDTRNVVMKKVISIDGAIKMEPESKANMIVQYLKDGANNISAKIEILPDALDELDPHSHTAYSSTPLPKVRQPQITNIRRRRDVAEPAKGAQPDMDLSKICTLRSAKGHELLCVDGYIYHAKNRGVISRNYWVCIKSRDPDINCKSRISTATQKDGSIRVLRVYNSHSHPFSEDDIKRRLYNEINKKNNKNLKFRPLHFIGKSLDQIQQEYGDLAIERLNVSNISSDIVVHKKPRVSGSNNSRSASLSVSHRADSHHEEDDVVIVEEEYQEQEEGVEMTMEGDQQYMDVDNTDGIIEVVEEVADEMESYGSIVPIYTMKLYAVSDGPPSLAVRMTLKALDIQYQLINVDFCAMEHRSEEYSKMNPQKEIPVLDDDGFYLSESIAIMQYLCDKYAPDSTLYPQDVNVRAVINQRLCFNMGFYYAPISAHSMAPIFFDYKRTPMSLKKVQNALDVFETYLQRLGTKYAAGENITIADFALISATICLEAINFDLHQFTLVNKWYETFKVEYPQLWEIANSGMQEISAFEQNPPDMSHMEHPFHPTRKSMGLKL

SEQ ID NO: 21343 - DNA, 8552 bp, DROSOPHILA
gtgggcagcgatctgcaggtgaagctgtgggactacaacagtggtgctgtggtgggcatcggatcggagcacgcctcctccgtgatcagttgtgcgtacagtccctgcatgaccatgtttgtcaccggcagcacggacggatcgctgatcatatgggatgtgccgcgtgacttctggggcaggcccaatccgccggatgtcaccaagtattcgctaccaaagacatcgtccaaaaccaggatgagtgacgtgccgtcgcgggtgaactcgggcaccaatctaaagacgaccaagggcgagaacatcgatggcctgctgaaggccactcccaaggacgatctctgctgcgtggagtgcccgccgtgcgccaaaaaggataccaagggcgtggatccctatgccgagtgcggaatcgttcccgatgtccgcaagtgctgagattttcctttccaatttctttttgtcgtgaaataaaggcagttgtcctttctaagcttgatttaactgagattatttatgggagcttgattttctaggatagattggccttctcttttataaatcgtattgtaagtcataaggagatatggctttgaataatagtcttattagattaaattgattgattgctgaaggaaaccaatttcaaattcaatttaatttgatcaaatgagtatttggtcacacttaacaactgtgttgcatcaaacatgttcgtcgaaccaattttcaaacatgaaaatgagcaagcaaaatattttaaacttaaaattaagtctcaatgaaacaaagaatatggtagttcatatgtttatgaactattaatttgtttagaaacgaaagttttatattttagattcacagtatgaccctgctggcgtgtggtgtaacgggcggctcgccccgcggtcacactgaattactattggccagccttgttgttgttgtttttcgtgttcgtaaactaagagttcgtgtgcatggatttttagccgcattggtagtagttactgtcgctccgccgccgcgtgaagtcagatttctccgagcgctcaaacgaacagcacgcgacattcgccggaaaaaaaaacgagaaccataagttgtgggaaattcgcacaagggacagaaggaagaagaagcagcagcagacgaaagggacgaacggcgaagcaaaacaaatcgagcgacgaatagcggtgtgcaacgaaatgaaggtctgctgcattggcgctggttatgtcggcggtccgacctgcgcggttatggcgctcaaatgccccgatatcgtgataactctggtggacaagagctccgagcggattgcccagtggaattcggataagttgcccatttacgaggtacgttcgctttcctccttctcatcgtttgtatgtacataggaagtgccactgttctgtgtgtgtgtgtgctagagagagagagagagagagcgagagggcacgataggtagtgtgtgtgtgtgtgtgctcacgccttagccttgcaatttgtgtttttttctgcttttcggggcttccactaatcataaacaaacaagtcatcatccctcaatcaattcccgatccgaaccatcgagcacaaactaaaacgtcgatgaccgctcatatccaagtcggtgaataccccacacctccctccacactccccttaagtaaaccagttccctgcacacagaaaatgccagatctatttggagatttcttgaataattccatcctatgagatggattacatggtttatagatatacttagcatttattttgtaacacattgaaatactatttgtaatttagccataaataagtttgctgctatcctgcttgttttactagtaatcatttgatatttagccagacctacaaaactccattgagttttcgcgcagtgtagtccgtcttcacttgaacaacgctgcgtgtccggcattctactaaacttcaggtgcttaacgcacttggcccacaacaaggtcaatggtcagtccattagtcactcaaaataaaccatgaaaagcgcgcagagccgtttgattgctgaaatatgattcggaacggaaaagtagcgtgggaatcgattttactttccagactgcgtgaccatcggcgtcgctccattaggcctaaaattccagatactacaaaatgcgccaaacgaagccataaggtgcaagcggattgcctcccatccaccacaccactggcgcatttccgtcctggcttccgtccgccctcatttcccactgtacatatgtcgagctacccactcttcttatcggctctgcgccaaaacaaagtctcgggtcgagataagctcgctgggcatggcgtttcttttcttatattttttttttttggtctagcgagcgcacattagttggaaattgtccaattacccacgttcccgacaaacagccagtatctctggtgaaaaaaagcacgaatagaagtatgtacaatcagccaaacactcagtatatatgttttgttttcaattagacaataatttggtatttgtatcctatagcagtagtaaccattatcagttaaaaacccatacattttggaagatggtatagggcatatatttagttcattcttatcgccctcctattgtatccctaaaaatagttaaaaacccattaagaaaatacactattgactgcagtctagaccgtaaatgttcttacctagaccgagtaattcaaaaatatacttttcaagataaattccacttaatgaagttcgattgtaatcaataccaatgttatgtacgcaaaaaaaaaaaaagatgctgttgggtgcacttgtaaccattagaggaggctgtctagccagtttgccattatcgctactcaccaagattgcagcaccacaagcaaacaattatggccagcacttggagtacttcaatgcaatttgctggcgatggcgatgtcagggcgagcatgtcaacaacatcctcttgtttatggaatttgcacaattggcgtactttccattgacaccgaaatattgtcaacatttcctaatcgttgcactcattaatgttccattagctttttcgcacatcgcaaaaacttatcgggcaaacagttgatatatttttctgtttgatttgcttttctatctaagttttcagctagaattgtttagactgatagattgtttatcgcttagtcgtatctctcgattgaaatgcgatgtagaaagacagttattaacacctgccctccatggagaaattcgtataaatacgtatgcaaatttggctgggcacgcaaaacgagttcaatgaacattcaaatcgtatctgaaacggaaacaagtctggctgaaactgaatgcgttgaatgagaatggtgaatgggtgggtgaatcaggggttcgtgtgaatacacgtattgcataagcggcttggtcatgggatagggtcttccatagcttctaaattaatcactaaatgccaacaagtggaccactccaagtgcgatggcagcacgtaaacagaagtagagcaaagttaattgtgagatagctttcttgggaaagccaatcggataagatcgacgtacaaagtatatatatatatatatatccatacagaatggttataatcttatcggacgacgaagtgggaacgtcaccaagtgctcagctttgggcgcgggttgtcgtgattggcattttaaagcactgcaaagcactgactgcaaactaggccaacaacttgtggaataacttctaaattatattaatgaggcaatttggttcttctttgtggcagcccggcttggatgaggtggtgaagaagtgccgcaatgtgaacctcttcttctcaacggacatcgagacggccatcaaggaggcggacctcatcttcatctcggtgaacacgcccacaaaaacctgcggcaatggcaagggtaagtactaagtaaacaaatataaaaaaaatagagaaattatcatataatatagcattattccaatttgaaggctacaatctgttgatcataaagcttcacaagcttgaattatggctaatatcatgtcatagcttaaaaataactgcctattaaagcatagatttgttagttaaatagccataaaataaccacaaatagctaagctaagctaacataaataattacagcatgagttaacacttgaaaatattaattctaaaaataaagagcatagtgcgagtttaatcagaaatcgtttgataatcacacgccactaaaatcaaattaattgaaaaagtaattaaagtcatcaaaatgttgaacatttcatgatttcaaacacacgtttatcattgctggtggaaaaatactttaaattagatcaaaagtaaacattgacatacttaagatcacttagtaatccactttttcaatctgcaggccgagcggcggacctcaagtacgtggagagcgcagcgcggatgatcgccgagatcgcgcagtccaacaagattgtggtggagaagagcacggtgcccgtgcgggcggcggagagcatcatgcacatactgcgagcgaaccagaagccgggcatccactacgacatactgtccaatcccgagttcctcgccgagggcaccgccatcaatgacctgctaaatgcggatcgtgtgctgatcggcggcgaggagacgcccgagggccaccaggcggtggagaagctgtcgtggatctacgagcactggatacccaagcagaacatactcacgacgaacacgtggagcagcgagctgtctaagctggcggccaacgcattcctcgcccagcgaatctccagcatcaattcgctgtcggcagtgtgcgaggccacgggcgcagatgtttccgaggtggcgagggccgtgggtctagactctcgcatcggttccaagttcctgcaggcgtcggtgggcttcggcggcagttgctttcagaaggacatcctcaatctgatttacatctgcgagaacctcaatctgcccgaggtggccgcctactggcagcaggtgatcgacatgaatgagtaccagaagcgtcgattctcgcagaaaatcatcgagagtctgttcaacacggtgtcggacaagcggatagcgatcctgggctttgccttcaagaagaatacgggcgatacgcgcgaaacagccgccattaccgtgtgccaaactctgctggaggagggcgccgcgctggatatctacgatccgaaggtggaacccgagcagatcatcgatgacctcacgcatcccagtgtcacggaatcgccggagaaggtgaagaaggcggtgcagatccacagtgatccgtacagcgcagtgcgtgccacacatgcgttggtcatctgcacggagtgggatgagtttgttgatctggactttaagcgcatataccaatcgatgatgaagccagcctacatcttcgacggccgcaagattctcgaccacgagcgcctgcagcagatcggcttccacgtccagaccatcggcaagaagtaccagcgcaccggactgctccgctcgtggggcattgtgccgcagctttaggcgcgtcgggcggcggaggtggtggcatttacacttaaagttggcgaaatttccagtatttgcgagactaaactgtaaatatccgtattcttttctgtagctgagtgtatgttagattgggtcgattaagcttaagttgaatcatgtttaggagaatagaatcgtttcaaatcatcagaggactctgtcagttttaagtgaaaagtaaagttgaattcttgcattttgtatattagtttctaaaggatataagcttttaaaacatttctgtatataactagaaagcgaattacttatttgaacaacataaggcaatgattgattaaccacaaagttataaaacgtagtaactatttttgatcagacaatataatattatgtagctttccccatatcgacccaaactaacgagtgtgtttctaaatagttaaagtattcaactaggcacacccgcaagggaaaccctcgaaccgtatttgtattcatattcctattcctattcccctgtcgatccgccactcgaggatcggtagttgcaatattaagtcccagcaggacaataatcccctcctgcggcgggccaataaaaaccagcatttacacgagagcatgtaaatttttataataaaaataacaacagtgcgtttgatttgggttccctttttcagaagggtatcctcttgactatttggcggtaccacaaaaaggaggtggccgccgatagactgaaccaggtcaccaggtacgacagatgatcgttgcgcagggtaacgcgtgtctgtccaccgattggagcatgtgcagccgtttgcggatcgtagacggcgtccaggaacacaggagctgctcctgtggcggcgcacatgcgcgccaagtcgcgatagagatagacattgcccttgtggtcgggtgtgaactgcggacgcgcctctcctttgcgcacgacggcggtgagctccacttccgcctgttgttggcccagcggcctggtttccggctccacttgcttgcgggacacccagccccgattgacgagcactatgtcgctgggggcgaaacgatattaagatgattctatgggatttccttgagcacaacttactctctatctgccagctgaaaaggggttactattagatagccattgcccgagtcgcgctgcgagaagagtcctccttgggtttccacgccatcgggccgtatcagcgatctcggacccaggcgcatctccttgtcgtgaaggaaacgtccacggatcttgaccaggcggtactccatttgggccaagtcagtgagactacaggagggaatacactatagtgggtgggtatatagtggagaatatgtgggcaaacctactcgtctggtagagccacaggcgccgtgctcagctgcttgttgagatccttgatcaactgctccttccaaatcttgcgcttcacttgccagcagcccaagccaaaagtggtggccggtatgagctggggattggttaatggacaacaaggattagttgtgtgtataggtagaggagttggtgtctacccaccaggaggaaccatcccaaaggagctatcttctccttgtccttcgccgcctgattgggaatactggttgtccaattcaccggcggtcgctgttgtgtcatctttctggtgattaatctcggattgttcgcggtgcccgggtttcggaatacagtctgtatattaaaggccacttgccggcacatttggttccccaaacgtatcatactttcttttattttgctctaaattttctatttatttatttatttacatttccaactggaagttgatagtaagaccgttttgcactgttatgaacggataataacttcatgcggtcacaccacttccgaatgtaagctcttcttgattttatgaattaagactgcaaaggtttaaagtatataaaaaataaagtaatagttattacttttcacatgcaaaaaaaaaaacatttttctttctttacaaagatttgtatctgttactgttaatcatatgttagcaagtcactgttaacatgtcgttatacccaagttggcagccccgttacgatcagctgttttagtctgttgtcgcgtgcaattggattttttaaacgattttgttttagtaaatttaggatacatttaagaatgcagtgcactcgtgcagttgcaagactggccggcggcctagcgagaaccgcatgggtatgtttaaagcaggggttgtactttatttagtcaaaacacggtcatccgaatgcaccgccatcaactcttatataaacggatataaaatttttaaattaaacatattataggcaacacaacatacgtataagcacaggccagcgatactgggactgctggagcagccatgccgcttgtgttcatccaccggcgttgtggataataccaataaaacgaaacccggcacagcggaagccgcagaaggcggtattctgaagagagtgctcaacaaagtgggcttcacaccgaacacaaaggcggtaggactcggattactttgcccatttgattaatattcatcgaagtgatcccatttcagcgcctcaaggtaaccagtcatctgctgtacgaaagcgtcgccgacaagatcaactatgtgacctttttccgcgacttcaatctgcccaatacctttaactcctggttcttggtcaccgaactgcatgtttggctactcctgatgcgctccatggccgagggctccgaaacgggcgaggatggacgcttcctgcgcaactgcattgtggaggcgatgtggggagatgttaacacacgcgccaagaaattgggagtaggttttactttagttcacctttatatatataatctttatgctcttcatatgtgtttcccaacaggctcacaatccttcacgcacccgtcagcaaatcgagaccttatccgagcagttccaagcggccctaatcgcctacgacg

SEQ ID NO: 21344 - DNA, 2275 bp, DROSOPHILA
gtagtagttactgtcgctccgccgccgcgtgaagtcagatttctccgagcgctcaaacgaacagcacgcgacattcgccggaaaaaaaaacgagaaccataagttgtgggaaattcgcacaagggacagaaggaagaagaagcagcagcagacgaaagggacgaacggcgaagcaaaacaaatcgagcgacgaatagcggtgtgcaacgaaatgaaggtctgctgcattggcgctggttatgtcggcggtccgacctgcgcggttatggcgctcaaatgccccgatatcgtgataactctggtggacaagagctccgagcggattgcccagtggaattcggataagttgcccatttacgagcccggcttggatgaggtggtgaagaagtgccgcaatgtgaacctcttcttctcaacggacatcgagacggccatcaaggaggcggacctcatcttcatctcggtgaacacgcccacaaaaacctgcggcaatggcaagggccgagcggcggacctcaagtacgtggagagcgcagcgcggatgatcgccgagatcgcgcagtccaacaagattgtggtggagaagagcacggtgcccgtgcgggcggcggagagcatcatgcacatactgcgagcgaaccagaagccgggcatccactacgacatactgtccaatcccgagttcctcgccgagggcaccgccatcaatgacctgctaaatgcggatcgtgtgctgatcggcggcgaggagacgcccgagggccaccaggcggtggagaagctgtcgtggatctacgagcactggatacccaagcagaacatactcacgacgaacacgtggagcagcgagctgtctaagctggcggccaacgcattcctcgcccagcgaatctccagcatcaattcgctgtcggcagtgtgcgaggccacgggcgcagatgtttccgaggtggcgagggccgtgggtctagactctcgcatcggttccaagttcctgcaggcgtcggtgggcttcggcggcagttgctttcagaaggacatcctcaatctgatttacatctgcgagaacctcaatctgcccgaggtggccgcctactggcagcaggtgatcgacatgaatgagtaccagaagcgtcgattctcgcagaaaatcatcgagagtctgttcaacacggtgtcggacaagcggatagcgatcctgggctttgccttcaagaagaatacgggcgatacgcgcgaaacagccgccattaccgtgtgccaaactctgctggaggagggcgccgcgctggatatctacgatccgaaggtggaacccgagcagatcatcgatgacctcacgcatcccagtgtcacggaatcgccggagaaggtgaagaaggcggtgcagatccacagtgatccgtacagcgcagtgcgtgccacacatgcgttggtcatctgcacggagtgggatgagtttgttgatctggactttaagcgcatataccaatcgatgatgaagccagcctacatcttcgacggccgcaagattctcgaccacgagcgcctgcagcagatcggcttccacgtccagaccatcggcaagaagtaccagcgcaccggactgctccgctcgtggggcattgtgccgcagctttaggcgcgtcgggcggcggaggtggtggcatttacacttaaagttggcgaaatttccagtatttgcgagactaaactgtaaatatccgtattcttttctgtagctgagtgtatgttagattgggtcgattaagcttaagttgaatcatgtttaggagaatagaatcgtttcaaatcatcagaggactctgtcagttttaagtgaaaagtaaagttgaattcttgcattttgtatattagtttctaaaggatataagcttttaaaacatttctgtatataactagaaagcgaattacttatttgaacaacataaggcaatgattgattaaccacaaagttataaaacgtagtaactatttttgatcagacaatataatattatgtagctttccccatatcgacccaaactaacgagtgtgtttctaaatagttaaagtattcaactaggcacacccgcaagggaaaccctcgaaccgtatttgtattcatattcctattcctattcccctgtcgatccgccactcgaggatcggtagttgcaatattaagtcccagcaggacaataatcccctcctgcggcgggccaataaaaaccagcatttacacgagagcatgtaaatttttacaaaaaaaaaa

SEQ ID NO: 21345 - protein, 476 aa, DROSOPHILA
MKVCCIGAGYVGGPTCAVMALKCPDIVITLVDKSSERIAQWNSDKLPIYEPGLDEVVKKCRNVNLFFSTDIETAIKEADLIFISVNTPTKTCGNGKGRAADLKYVESAARMIAEIAQSNKIVVEKSTVPVRAAESIMHILRANQKPGIHYDILSNPEFLAEGTAINDLLNADRVLIGGEETPEGHQAVEKLSWIYEHWIPKQNILTTNTWSSELSKLAANAFLAQRISSINSLSAVCEATGADVSEVARAVGLDSRIGSKFLQASVGFGGSCFQKDILNLIYICENLNLPEVAAYWQQVIDMNEYQKRRFSQKIIESLFNTVSDKRIAILGFAFKKNTGDTRETAAITVCQTLLEEGAALDIYDPKVEPEQIIDDLTHPSVTESPEKVKKAVQIHSDPYSAVRATHALVICTEWDEFVDLDFKRIYQSMMKPAYIFDGRKILDHERLQQIGFHVQTIGKKYQRTGLLRSWGIVPQL

SEQ ID NO: 21346 - DNA, 2858 bp, DROSOPHILA
tataagacctatttaatatgtaaccatttttaagaaacttgaaccaactatgtaacttggggaaataccttggtagaaacttttagaagttattttcacttcagtacctgtggcgtttatagacccaatgaaatgttttctctgttgtataattcttgggaaatagttttgtatcatctttttagataccataatttagaaaacagataccacttcgcaccatttaaattattccatgagtatgagtattcccgtagctgtaaattgtaatacaaatcaccttactgatggggttctctacattctaaaaccagttcgaattcaactttaaccagttcaaattcatgttgtgacatggatgaataaaaaaaaaattgtttaaaaaaaagtgacattttttaaggactatacataacactcaataagcaacgttacccctttctcatcccaaaaccccaaatcgacacccttttggcttgccaagtggtccgtctattagctatgcagatgccttccaaggatcgcaaagcccaggatctcaccgctggctgcagtgtcatacattttgaataggaaaattattaaccaaaaaaccgtgaccaaagcaacttttatgagccggcacacggaacacccaaatccaggccattgtatccagggtgccaggccacatccacatccgcatccgtactctcacatcctcgatgatcgatgcgacggcaatgagcaaaacaattttccttgactggcaggcacgcaaagcccgcaatgcgaacccagaaccccgcgcgaaaagtgtgaaaattctaattagttacacttaggcagacacggcagacccaaaatcgttggcatgatgcagcccagcatcccccgtttcgttcatgagtcctattcatcgctactcgcatccattccagcgataacctttgaatgagcccagtgccccggatgaattatgttattaaatgtgtaccaggtccactgaccatccgcccacctaaacgctacatggcatttgattgattgacaactcactgcgatccttgaggataattttcttgggcggctccttttggtagttacgctgcagacttaggcccggctcgttgccgttcttgtccttcttgaccatctcgctgaggaaggttatgtagcttatggccagcttgagtgtgtccacctgcggagaacccgaatataagtgattacgttaaagatattagacctatggatattgataagttataaaactatgaataaaacaacggagttatgtcattgaataactaattattgtttacaaggttcgaaaactttcaataacatttaacatttaaatttgtcaccaatgaattcaactgtaaacaccatctgatgttccatatcaggaatataagatgttaagaatgtactgtagatatctttttcctgatgggtaattaccttgcttagtcgcttctcgtagggcagcgtgggaatgtgggtgcgcagaccctcgaacgcctcgttgatgctctgcatccggcggcgctcgcggagattggccgcctgccgctgctgggccatttgggaggcgcacttcaagcgccggggcttgtggctccgccggctgaatgggcagaagctgaagtggattagtgaggctcgaggacgcaaatcaacgccatacttacgtcttctcggtgttctcctggtcgctgttgaagccactgctataggcatcgtcctcgtcatcgctctccgagctgtgctcgtccccaaaaaaatagtcggagctggaggtggaggcgttggtggcctgcgatccctcgaagaagtggcgcgccatcgtggcctccaagtcgaaattgtccatggaaaacatggtaaatctgttgcgcttctgtttgtgtgcctaattgccagttaagtgcataacggtaaagctaacacttccgatccgctgattggcgacgcgtgaccagcacgtgtcacaaggtttgagattctggagggggtgtagcaggctgaacaagtgaaacgtgtgttcttcgtccttgacttttgcctttctgcgaaagagtatttttaatattccggggtgttacttcctctgcatgaacttattcagttgccgatatatcggtaataaacatgttcaacacacctttgattagataagataggattttgtggctaatagatataaaatgtatcatttacatggatatgaatgtaatttactatcgagttggtaaacagaataaacgaagataagatataaatgatgtggtacaatatcagattaccgaaatcctataaaataagattcaataaatatatttaaataaagctgcacttcttatataaggcttaaaatcattaaacggattaatagctcaagttttgttcaatagcgtaatgatataaattgaaaactgattactctttgatttcgtgttttattgtatatgcgtttatatatttactaatttattaccacgccaacgataaatttctattgaaatttgttataattctaactttttttttaagcccttcttaattgttttaacttacctaggagtttgctataatcctctgactagacttggttcaaaataattccgatgctttctcaacctctacgaaatggttcaccacagtaacctttcgaattgcacatcacctaagcagtaaacactccgcactcgcgaaccaattataatatagttatttcccagtggccaacaccccagtaatccttatagatgcaacgatgccgcgcactctaacatcgaaacgcgccgtgttgcgaactctctgactgccgggaagcgaatgcctgagcctggaacttccacaggacctgtctg

SEQ ID NO: 21347 - DNA, 531 bp, DROSOPHILA
atggacaatttcgacttggaggccacgatggcgcgccacttcttcgagggatcgcaggccaccaacgcctccacctccagctccgactatttttttggggacgagcacagctcggagagcgatgacgaggacgatgcctatagcagtggcttcaacagcgaccaggagaacaccgagaagacccggcggagccacaagccccggcgcttgaagtgcgcctcccaaatggcccagcagcggcaggcggccaatctccgcgagcgccgccggatgcagagcatcaacgaggcgttcgagggtctgcgcacccacattcccacgctgccctacgagaagcgactaagcaaggtggacacactcaagctggccataagctacataaccttcctcagcgagatggtcaagaaggacaagaacggcaacgagccgggcctaagtctgcagcgtaactaccaaaaggagccgcccaagaaaattatcctcaaggatcgcagtgagttgtcaatcaatcaaatgccatgtagcgtttag

SEQ ID NO: 21348 - protein, 176 aa, DROSOPHILA
MDNFDLEATMARHFFEGSQATNASTSSSDYFFGDEHSSESDDEDDAYSSGFNSDQENTEKTRRSHKPRRLKCASQMAQQRQAANLRERRRMQSINEAFEGLRTHIPTLPYEKRLSKVDTLKLAISYITFLSEMVKKDKNGNEPGLSLQRNYQKEPPKKIILKDRSELSINQMPCSV

SEQ ID NO: 21349 - DNA, 4389 bp, DROSOPHILA
gggtaccctgcaaagccggcatgtaacggttaagctcccccctcccatcccccttactaacatcttacagcccgatttgtaaataaacaattagttgaatataatgctcattgcacgaggggcgtagacatgggcgtgggcgtggatcttgggcgagagcgcaatgagaaatatgaccaaaattagaaacgaaaggcatgaaggtgcaaaggctgggaaatgatagagatgcgatttgactaaggctgtgcgtttgtgtgtgtgtacatatcgaaaatagaaaatgaatttattacgacatgagaaaaacacgaaagttatgaaaacaacgagccgtacgagaaaatagaagccagcaacaaagcgaatatatccacccacccaatcccccaccgtaacgaaccgacccaaaaagtatccaaaccgaaccgaaacatatagcaaatatagcagatatagcagatatagccgatatggccgatatagtgggagaacaggagagagagagagagcgactcgctgagaatgagcaaacgagtgtgagtgtgctggaggcgcctccttgccttatacggcactttttgagactgcaaacgatcgtgagcaggcagccgatcgtgcccgatcccaaccgatacgatctccacgctcgatcacgccgaactatactgcgctatatgctatatggtattcctatacgtatagcatgccataccatattgtgcctctcgctcgttcgccttatgttttccaaagagccccctatgctgaaggatctatttttaggcggatcggccggtgggcagcattatcgcatccatgagcatatttcctcgctgtgtgtattcgtttgagtatttcttttgccattggtatgggggcgtggcgggggcggtggcggcggggggcatggcgacggcgcttcttggacgagatggcatttcggcggcggtataaaatccgagtaccaacgcggcgatactttagtcagtcagttgtgttccaagccgtacacaccgtaactcttgatttaattcacccgtggtgccgtaaaaaaaacaaaactaaaacaaaatgtgtgacgatgaagttgctgctctggtcgttgacaatggtgcgtattccccatcgaacggattatcgtcttggcttttgctaaaagagaaaaaaaagaaagagaaatagacaaaggacccaacagcgaaaggatattcccgcatctagtgctaaagtgatcgcaaagtgaacgattttcgagttgtgattaactcacgcatccttcgggacacaagcaattagaaatttgaatataacaaaaaaaatattccaatgccttggatgatttcgagaaatatatattttaaatattagttattgagcaatattttcaattcaagtcaaagaatcataaatattcagataaagaaaagctaaaatattatattttgcacagaatcaaaaccgatttgcataagttttataaagattttttgtgcccgaatcactttcataagttttgatgcttgaaagcttttcaagagatcatgatattagagaagaggaatatttcagaaatcatatatcttcagatatttctctatacgagagaagaagacagatcacatattttcatgagagaatttttctctccgccccaaacttttccagttttttcgacttagtcgccagactttttcacgctgtccgttagagcaaatgttagactcccagtgtgggaaaccccacatgaagcactcgagcgcccactaatggacccctgttcgattgtgttatcctgcaggctccggcatgtgcaaggccggtttcgccggtgatgacgctccccgtgccgtcttcccctccatcgtcggtcgtccacgccaccagggtgtgatggtcggtatgggccagaaggactcgtacgtcggtgatgaggcccagtccaagcgtggtatcctcaccctgaaataccccatcgagcacggtatcatcaccaactgggatgatatggagaagatctggcaccacaccttctacaacgagctgcgtgttgcccccgaggagcaccccgtcctgctgactgaggcccccctgaaccccaaggctaaccgcgagaagatgacccagatcatgtttgagaccttcaactcgcccgccatgtacgtcgccatccaggccgtgctctccctgtacgcctccggtcgtaccaccggtatcgttctggactccggtgatggtgtctcccacaccgtccccatctatgagggttatgctctgccccatgccatcctccgtctggatctggctggtcgcgatttgaccgactacctgatgaagatcctgaccgagcgcggctactctttcaccaccaccgctgagcgtgaaattgtccgtgacatcaaggagaagttgtgctatgttgccctggacttcgagcaggagatggccaccgccgccgcctccacctccctggagaagtcgtacgagcttcccgacggacaggtgatcaccatcggcaacgagcgtttccgttgccccgagtccctgttccagccttccttcctgggaatggaatcctgcggcatccacgagaccgtctacaactccatcatgaagtgcgatgtggatatccgtaaggacctgtacgccaacatcgtcatgtccggtggcaccaccatgtaccccggtattgccgatcgtatgcagaaggagatcacctccctggccccatccaccatcaagatcaagatcattgctcccccagagcgcaaatactccgtctggatcggtggctccatcctggcctctctgtccaccttccagcagatgtggatctccaaggaggagtacgacgagtccggccctggcatcgtccaccgcaagtgcttctaagcagttgcagttgcctagcaccaacactagcaccacccggtctactcacctgtctcctgctcatctggtcctgctatttgtggtggttctgggtgtgtgggcggctggtgctccaccggcaaaaacaacaaacaccaccaccatccaaccatttgtttttgaatgtcattatttaccaacgtgtcatccttggttcgagaatactcttttgtactgactgaacacaacaccatcaatcaaaatgaattgtcaatctaatgccacggaccgcgatccccatccacttgttaatcgctcgcggtttccttaaatgttgatcgccatttgattgttttacgaatgaaccgacaccctcatgtattttgtacagaacctaacaacttccccgatagagcggatggggtctattgactacgaaatgtaaaataatctcatgattgtaatattaattaaaacaatttataattatttataaataaaaacgattttttagatttaattttttctaaaaacatagagattttggaaaaaattgggggggggcatctagccgggaaagcaaatcctagccgaagctttccatcgatcagtagttcaagatacatacaatatatatgtacatttatggatctatgtgtgatgtgtgagcttttttcacctccagacgcgacggtgcgtttcaaatttcccgaataccataccgtaaagctttctattcccaaaatatttctggtttcgaaacgattttcgaatatttttagacgcattccaaaatgggtgaggcggcggacaggcgagcgattttttgtttgtttatgccatgaggaaatacgatcggagatgacgcaagtcggatggatgatcaaaggcggcggccaaaacaaattgccaatgtcaatttgttgccgctctcggcaaactgattaccagaaatgcatttcactttgaggaataatggatggaatatatacatatatagtgtatggtggcaatgccagagacaaatgttctcgccgagattgccaagacaattagtcaaaatggcgttgggccgtttaattagaactcgatgtgcattatgaatgaaatttgtattcgcggtcgtgtcgcctgttgcaatttcagttgcagccacatacaaatgggtaattaatgggcccaaatcgctggcacttggccaaaaaggggcgacagatgccgctaatgagttgcacgacgagatgggcaaaaatgggcgcaacttgcccgttcggaattcactttctcaagcgaatcactttacgccgcgctgcacaacaacaaacaggattgggaatcagaaatcgggaaacagaaatcccaaatccgaaatcaggaaacaaatgccggaatgagaagttaccaaccctcgacttaaacgggcttaacccactaatcaatttgcacaaaaacaaaaataaacacgtacacaatatcgtcgacgtcgtcgtcataatgcaatattcagttcttaatttc

SEQ ID NO: 21350 - DNA, 1702 bp, DROSOPHILA
ttccaagccgtacacaccgtaactcttgatttaattcacccgtggtgccgtaaaaaaaacaaaactaaaacaaaatgtgtgacgatgaagttgctgctctggtcgttgacaatggctccggcatgtgcaaggccggtttcgccggtgatgacgctccccgtgccgtcttcccctccatcgtcggtcgtccacgccaccagggtgtgatggtcggtatgggccagaaggactcgtacgtcggtgatgaggcccagtccaagcgtggtatcctcaccctgaaataccccatcgagcacggtatcatcaccaactgggatgatatggagaagatctggcaccacaccttctacaacgagctgcgtgttgcccccgaggagcaccccgtcctgctgactgaggcccccctgaaccccaaggctaaccgcgagaagatgacccagatcatgtttgagaccttcaactcgcccgccatgtacgtcgccatccaggccgtgctctccctgtacgcctccggtcgtaccaccggtatcgttctggactccggtgatggtgtctcccacaccgtccccatctatgagggttatgctctgccccatgccatcctccgtctggatctggctggtcgcgatttgaccgactacctgatgaagatcctgaccgagcgcggctactctttcaccaccaccgctgagcgtgaaattgtccgtgacatcaaggagaagttgtgctatgttgccctggacttcgagcaggagatggccaccgccgccgcctccacctccctggagaagtcgtacgagcttcccgacggacaggtgatcaccatcggcaacgagcgtttccgttgccccgagtccctgttccagccttccttcctgggaatggaatcctgcggcatccacgagaccgtctacaactccatcatgaagtgcgatgtggatatccgtaaggacctgtacgccaacatcgtcatgtccggtggcaccaccatgtaccccggtattgccgatcgtatgcagaaggagatcacctccctggccccatccaccatcaagatcaagatcattgctcccccagagcgcaaatactccgtctggatcggtggctccatcctggcctctctgtccaccttccagcagatgtggatctccaaggaggagtacgacgagtccggccctggcatcgtccaccgcaagtgcttctaagcagttgcagttgcctagcaccaacactagcaccacccggtctactcacctgtctcctgctcatctggtcctgctatttgtggtggttctgggtgtgtgggcggctggtgctccaccggcaaaaacaacaaacaccaccaccatccaaccatttgtttttgaatgtcattatttaccaacgtgtcatccttggttcgagaatactcttttgtactgactgaacacaacaccatcaatcaaaatgaattgtcaatctaatgccacggaccgcgatccccatccacttgttaatcgctcgcggtttccttaaatgttgatcgccatttgattgttttacgaatgaaccgacaccctcatgtattttgtacagaacctaacaacttccccgatagagcggatggggtctattgactacgaaatgtaaaataatctcatgattgtaatattaattaaaacaatttataattatttataaataaaaacgattttttagattt

SEQ ID NO: 21351 - protein, 376 aa, DROSOPHILA
MCDDEVAALVVDNGSGMCKAGFAGDDAPRAVFPSIVGRPRHQGVMVGMGQKDSYVGDEAQSKRGILTLKYPIEHGIITNWDDMEKIWHHTFYNELRVAPEEHPVLLTEAPLNPKANREKMTQIMFETFNSPAMYVAIQAVLSLYASGRTTGIVLDSGDGVSHTVPIYEGYALPHAILRLDLAGRDLTDYLMKILTERGYSFTTTAEREIVRDIKEKLCYVALDFEQEMATAAASTSLEKSYELPDGQVITIGNERFRCPESLFQPSFLGMESCGIHETVYNSIMKCDVDIRKDLYANIVMSGGTTMYPGIADRMQKEITSLAPSTIKIKIIAPPERKYSVWIGGSILASLSTFQQMWISKEEYDESGPGIVHRKCF

SEQ ID NO: 21352 - DNA, 3442 bp, DROSOPHILA
gaacgccagtctgatttcagcgacgtagtcatctctaaaatattctacctgcttttgagcttctgaaatttaatgaattttaatttaaaaaagaagtcatatatgtatatgtatgtgctataaacaaagcgttgttgaaatttccaaactccttgagatgtattttattgtggatgccgtcaaaattgaaatcaaccaaaaagtctagggcgagtataagatgaaattgttttttgaaacctccaggtcggggtgacccaccgaaccaccgggtttcaaaatgtttcgcatggtttgaatctaggtaatagaaaacactttataaagaatgctcaaactgaatgtttaaatttacttaaatcaatgatttgatgggatcattcatttcctcttccatcttctctatttgttccaagttctttagtcgaaatagttgaggtgaccagcctcccggttcagcaggactcatcatgtgtcgcatgctactgatggaaagtatttgaggtcctggagaatcagttggttgagccgtcagttggctggaaacaggaaaaattttaacaataccagaaaagttcagaaaactcaatatatcaaatatatcaaaatcaatatcggggcgaagaacgtaattggagtttcaatcaatccgtccaattctgtcaaatttatgaatataaatacgaacaaacagagtttgcttacactattaagttcttagtaagcaattaggattataacagcagtgtgaccgtttgttgagcagaatgttaagtaaatagttgcagaagcatgtgagggggactccatccttttcgaaaatctattttcaattatagaactatatgtaaaacgattagaattaaggcataattaaagtgcctctttaaagtaaagaaaacttcagaatgttatcaagaatacctcaaatgccgtccatatttccgctatttacaacactgcctgatcagctgtttggttttttttaataatacattggatttgttattgttgcgagtcaatcataaaagctttctaaagacaactctcaaaagtgcaatatagtagatagaaacataaggctgtgatcaaaagccaatcctgatgtgttgccctggcaaccgggcgcaaacaaacgaaatcgggaaatctaattagttctcttcgccgccttagtaaaatgtttattctcgaccgaatactgccttttatttttagctatataaggccctttataaagtggttcctgcacgccttcaccaggctctcggagctccagaggatttgctatggagcgaaggccggagccagccgaaccagccaggtggaaaggtccctcacattgtccaaaaggccgcagatacgacgacttgtacttgaccttgatgaggcggcgccatatgtgagcaacgcggagctgctggatttcggttagtccaaggaatagtataatctctgtgcacaaagcaccataatcattacaagcttacactaagttaaatattattaatcattacccaatactttcagctcctcgcgctgctcgcattgtgatgcaggcgaaacgcatcaagaacaatgtccacccggattttgctcggctcttcggcacatgcgtgacgagtatctggggctaccgcagactgatgcatcaggtggaacagctgcgggcggagaaatacgactcggataacctcgaccacgagcaaaagctgttgcgattgtggcaactgctgatgccagacactcccctcaccggtcgcgtgaccaaacagtggcaggacatcggcttccagggcgacgatccgaagacggactttcggggaatgggcatgctcgggctagagaaccttctctactttgcaactgcctataacgacgccgccaaacatgtcctgctgcactcgatgcatcccaccctgggttacacctacgccattgtcggcattaacctcacctccatggccttcaatctagtgaaaacgggcgccgccaaaacccacttctacaatttggtggtgcagcacagacaggactttagcaccgtggaggatttccacaagttgtactgctatctgttcttcgagtttgaccgcttttggatggagagcgacccacgaaacattatggacttccgcgagatttaccagtcatttgaaattacaaaactagaggccttgcacaatgatagcactatttttaagaccaatttggttgtagaatccgtctaaaaacacgaataggtcaattaatgtgaaaatgaatttgtatctcgctgtatctgaataatttctaactctgacgatattgggaattgattgaatcagatcaggctgaccatttttgtaaatacatgtttagagtggggctaaataaaataattatcttgtcatttttcaatttaaattatcaattcatttcgcttctaaatcactttgtaataaaaaaaaaaggaatcctaaaataagtatccaaatacgacaagcccttttaatttttgtataaatgcagattttatgcgtttatttgagagccatatataatgtatatttgtatatgtattcatatatatttgaatgcaagtatgtaaatcgttaaactaagcctggaatgtcacacaataatactttaaattcaagtcggagattgcccactgagacagaataaataataatttaaatatcacgcaaaagcataaaaactaaacgaaataaaatcagtagagattgcacaagaaaatattttgacgactaaagcctatttggtaatgccataagaatgctcaagtcaaatcccgatgctcaatagagcttgcaagctagtttttggagtatccatatagatagtattcgttggtctagcgatagaacttgacttccgcctcgacacagtccttgagcagttcgtccagctcgtcactggcgtgatcctgcagagagaaatagttatttagctcgtccacgcaggagagctccaagctgcgcaagtgctccaaggcggccggcttgcgttgcgagtgtagcttgtgcagcaacgtcaagtccgcttccgcttgcacttgggttagcggcgagatcctcggatttggggcaaaaacgaacggcttaaacacagactcggcggcattgggcgtcccggtgaaccaatggcatgagattcccttcaccgacagcaccgaaacggtagccgccctcgagctgctcgcattactggcggatcgcagcgtctcgaacatgtcgtgctgggtatatgttccatcgccagctggcttgggaccacaccaatccactgccggggcctgggcctctgcatcgtgagcagcggcaaaactggcagcgtcatctaatccctcgcttgacttgttcaccacagtggtcacagccagtcctccggagggcaaacgcaagaagctggcctccaatttctcagcggcccatacctt

SEQ ID NO: 21353 - DNA, 1342 bp, DROSOPHILA
atttgttattgttgcgagtcaatcataaaagctttctaaagacaactctcaaaagtgcaatatagtagatagaaacataaggctgtgatcaaaagccaatcctgatgtgttgccctggcaaccgggcgcaaacaaacgaaatcgggaaatctaattagttctcttcgccgccttagtaaaatgtttattctcgaccgaatactgccttttatttttagctatataaggccctttataaagtggttcctgcacgccttcaccaggctctcggagctccagaggatttgctatggagcgaaggccggagccagccgaaccagccaggtggaaaggtccctcacattgtccaaaaggccgcagatacgacgacttgtacttgaccttgatgaggcggcgccatatgtgagcaacgcggagctgctggatttcgctcctcgcgctgctcgcattgtgatgcaggcgaaacgcatcaagaacaatgtccacccggattttgctcggctcttcggcacatgcgtgacgagtatctggggctaccgcagactgatgcatcaggtggaacagctgcgggcggagaaatacgactcggataacctcgaccacgagcaaaagctgttgcgattgtggcaactgctgatgccagacactcccctcaccggtcgcgtgaccaaacagtggcaggacatcggcttccagggcgacgatccgaagacggactttcggggaatgggcatgctcgggctagagaaccttctctactttgcaactgcctataacgacgccgccaaacatgtcctgctgcactcgatgcatcccaccctgggttacacctacgccattgtcggcattaacctcacctccatggccttcaatctagtgaaaacgggcgccgccaaaacccacttctacaatttggtggtgcagcacagacaggactttagcaccgtggaggatttccacaagttgtactgctatctgttcttcgagtttgaccgcttttggatggagagcgacccacgaaacattatggacttccgcgagatttaccagtcatttgaaattacaaaactagaggccttgcacaatgatagcactatttttaagaccaatttggttgtagaatccgtctaaaaacacgaataggtcaattaatgtgaaaatgaatttgtatctcgctgtatctgaataatttctaactctgacgatattgggaattgattgaatcagatcaggctgaccatttttgtaaatacatgtttagagtggggctaaataaaataattatcttgtcatttttcaatttaaattatcaattcatttcgcttctaaatcactttgtaat

SEQ ID NO: 21354 - protein, 316 aa, DROSOPHILA
MFILDRILPFIFSYIRPFIKWFLHAFTRLSELQRICYGAKAGASRTSQVERSLTLSKRPQIRRLVLDLDEAAPYVSNAELLDFAPRAARIVMQAKRIKNNVHPDFARLFGTCVTSIWGYRRLMHQVEQLRAEKYDSDNLDHEQKLLRLWQLLMPDTPLTGRVTKQWQDIGFQGDDPKTDFRGMGMLGLENLLYFATAYNDAAKHVLLHSMHPTLGYTYAIVGINLTSMAFNLVKTGAAKTHFYNLVVQHRQDFSTVEDFHKLYCYLFFEFDRFWMESDPRNIMDFREIYQSFEITKLEALHNDSTIFKTNLVVESV

SEQ ID NO: 21355 - DNA, 4927 bp, DROSOPHILA
ctcataggccaactcctccagagctcttcgtaatctgctcagagtgcgctcgtatctgtataaatttctaagggtttcactgctggaagagatctctggatgagcatccccttcattggcatcacttagttgttgaatctgttccgctgatgtgaaacgatcttggggataaccgagcacaagctcaatgatcacaaaacaggcaataagttggaaaataatctattatatggatacatatattagcaacaaatactttaaaggttgccaatcgaacataccttgttgcaacgcattttaatggtaagttttttagattttaagtactgatataaaatcgacttgttctttgctgaactgctggttgttaagtgtggttcaacttggctaattcccacattttatactattggcaaagtttttttgcccgccgttattagcacctgcaattgttcttgtttcccgccttgattttcgcactggaagcggaggaaattagcgtataagtgtggaaaaatccagagcattttccgctctcagtcgagtctgattgaaaagccaggtgatgtgcacgcggtctgttgtattttcccctgctagtagtctgttgtcaacaagcggaatttcaacaatgagtaatttgtatttattcattcagtcgcgtgtcaaaagaaataattagccagtgatctcaggaaatgcgattccgagatcaagtgtcaacgtctaatttctaaagtaaacttataagccaaatctatagctgtaggtggatcccaatcgttacctaaacgtgtggcttgcaaatgcacagattcaatacaaatatacatatatacaaaacagccaaggagaaaggatctcttgaagtaattattattcaaatgcaattttcaaatataactgcagtttagaaaattaaaccagcaataccgctctggaaacatactaaaatatacaagacgtagcatctgtggtcacactggcagcacatatcgatagtcgcgggcagcagtcgatgtttctccacctttattttgttattttccgacggagtaatgtttactgcagctgtttagtgtgtgtttaacggtaatattaagtggctaaagctgtttttcaatgtcgccgtgtttattcccaagcaatctgttagattccgcaagaaattccatctggtggcgacaacaaacaaagacttagaaatccgacaagcgtcgactatgaaatactctgtaaattgatgaggacaagtgaacagaaaagtaaataaacattgatggattacgttaaaaacaagagacttctatgataacagtataggaataaaacgatcggcgttcgttgagataaaaaacgtgcggtttcttatcacaaacggcaaaacactatctaagttgaatatttttcgccaacgcagcagaatagtaaagccagcggaaacgcatttcgttttacgactgcgatacgaagcttcattgtttgagcggaacgacgacgtaaacaagaaaactggggagcagaaacatatgtatggtgataagttcggaaattttatccgcgacctcagcagaaaccgcaacccactccgctgtacctgcaccttccaccccttaaagccgaaaatgtatctcgaactgagtcaccacatcactcaccacctacctgttgatcattgttcttttaggtagctggcattactcgcaaccgaaacggattcgggaacccagccacctggacgagcagcacttgcacctcgcccactgtccgcgccggtcgatgagagcttcactgggattgggcagaacgcgaaagatgagcaataactacaacgacgtgccattcggcatccgggctgtgcagcggctgtcccgacaatgctgcacccgcttccatgcccgcagagatttgctgtgagtatgcgataacttctaaatataagatttcattgcaaatgagtgctgagcgttaagttgaccccatattatgaataactatattgggtagatattgatattatgtctatttcagctacaagatgtcagtgtttgtgctaactttcctggcctacgcctgctatcacatgtgccgcaagcccatctccgtagtcaagtcggtgctgcaaggaaactgttccacagcgctggctgcatcgggtcaggattgtggatatgcgccctttggttagttcttcccttaacacttctaacgtgttaccctataaacaagtggccaatttacagatgttcccgatgccaccacactctttggaatgctggactcggccttcctcttctcctatgccatcgctatgttcgcttctggtttcgtggcggaacgcgtttccctgcgatacttcttgtccatgggcatgatcctcaccggagtgttcacttacatgttcggcattgctcgcacctccaatatccatagtttgtggtatttcataatagtgcaaatattcgctggcatcttccagacgaccggatggccaggtgtagtggccctcgtgggtcgttggtttggaaagtcgaaacgcgggctcatttttggtatatggaacagtcatacgtctattggaaacattcttggcacgctgatagcggcgcattatgtggaatccgattgggcgctgtcgtttgtggtacccggcattatcattgcagccgttggatttttactcttccttttcctagtggatcagccggagattgtgggctgttatccacaagccggacagcatgagcgtcgcgtggccaacgagtctgatgtggaacaggacgacgaggagcaggtgcgccataacgatgcggtaagtatcagattcagatttttcattgatgttccgcatgcgatgtacattacacccggtctcccaatatgttgcaattatgatttcaaaaacgtactttgctcggcgttagtgtgtgatcagttttgggtacgaaacttcgagaactgtaagtgcatgactatttccatggttttcttgttatgtctgccatttttgcttatgtaaatcttgcgctttgcacgccactccattttaaatagtttaaaaattcgtcttattttattttaggaaatcaactatagatctgctcccaccgaacgtactccaatccttccacgatctcaaccagaggcggtgccaaggggtcgcggacgtcccatcagtctgatcgatgctttattcatacccggtgtggtagagttttcgctgtgtttgttctttaccaagctggtgagctacaccttcatgtactggctgccactttacatacaaaaatccagtaagtgcccagaaaatagtatacaaaacagtcaataaagcgattcctcttatgcaggcacattgggtccagaactgtccgctgatttgtccactcttttcgatgtgggtggtattttgggtgcaatagctgcgggctatctatcagatgtgagcggaatgtcggccaccgtctgcacaggcatgttgttcgttgcctcgcccattgtaagtactctagacaagccacagaaaccattactaggaacatgtattcgtttcagctgctgatgtatcaacaatatggtgcattgtcgatgacaatcagcatagtgctcttgattgtggtcggcatctttgtgaacggaccatatgccctgattacaacctctgtaagtgcagagctgggccagcacagctccttggagggaaatgccaatgctctggccacggtgacggccattatcgatggtactgggtcaatcggagcggcagttggtccactgcttgccggccttatctccaccgccggatggcagtatgtcttccacatgctcatcgctgccgacatcattgccatggtgctgctggggcgactggtcttcaaggagttcgctgcactgcgtcgtgcatcgcatcgtattcggattgaatagcaggaagaagctgaagcggatgtggtttgaccatatatatatttttgtttctagcgttctctgtacataccatagcatttgtatagctaacataaagaacgttttcttttcattcgagagcatatcagagtgtttctgatcctagttttacccatacatgtcaatacctaatgttattttaaatggaatgttaccatcatcttaggctatccatcaagtttacaattttgatatattacctacatacatatatatatatatttatatatacatacatctatgttgtaatcttgtgtgtgcgcgcgtgtgtcagagtctcctcgttttaagtgccgaactatcattagtactagcgtaattctactgctatgtaaatacactttatcgtacacttttcgtaccaataaaaccgaatttgactgttctccgcggcagtacaatttctcaatggcgatgcttaagttaaatcctgcttccgctggcgatccttgctcattcttcggaaatggtcaaggagtctcttctgttgcggcgcatataactctctgatgcaatcctcttgaggaactttacggtggtcgcatcgttctgattgacgagcttaagaagggctccatccttgcgctgcaggagcttgtgaggtgctccgaactccacaatctggccagcatccatgaccaggacgctgtcattgtccatcacagtgtgcaatctgtgagcgatcgttagaaccgtgcactcagcaaacttggtctggatggtttcttggatcaggatatcagttctaagagataaagtgttaattacgaaaaaaatgaaaataatatcttaagaacctactctgtatccacatttgcagttgcttcgtccatgaccagaactcgattctgtcgtagaatggctctggccaagcagaccagctgcctctgacccatgctgaagttggagccaccgtcctgcatgcgacaggagagacctccttccaatgaggcaacatgct

SEQ ID NO: 21356 - DNA, 1519 bp, DROSOPHILA
agtcgcgggcagcagtcgatgtttctccacctttattttgttattttccgacggagtaatgtttactgcagctgtttagtgtgtgtttaacggtagctggcattactcgcaaccgaaacggattcgggaacccagccacctggacgagcagcacttgcacctcgcccactgtccgcgccggtcgatgagagcttcactgggattgggcagaacgcgaaagatgagcaataactacaacgacgtgccattcggcatccgggctgtgcagcggctgtcccgacaatgctgcacccgcttccatgcccgcagagatttgctctacaagatgtcagtgtttgtgctaactttcctggcctacgcctgctatcacatgtgccgcaagcccatctccgtagtcaagtcggtgctgcaaggaaactgttccacagcgctggctgcatcgggtcaggattgtggatatgcgccctttgtgcaaatattcgctggcatcttccagacgaccggatggccaggtgtagtggccctcgtgggtcgttggtttggaaagtcgaaacgcgggctcatttttggtatatggaacagtcatacgtctattggaaacattcttggcacgctgatagcggcgcattatgtggaatccgattgggcgctgtcgtttgtggtacccggcattatcattgcagccgttggatttttactcttccttttcctagtggatcagccggagattgtgggctgttatccacaagccggacagcatgagcgtcgcgtggccaacgagtctgatgaaatcaactatagatctgctcccaccgaacgtactccaatccttccacgatctcaaccagaggcggtgccaaggggtcgcggacgtcccatcagtctgatcgatgctttattcatacccggtgtggtagagttttcgctgtgtttgttctttaccaagctggtgagctacaccttcatgtactggctgccactttacatacaaaaatccagcacattgggtccagaactgtccgctgatttgtccactcttttcgatgtgggtggtattttgggtgcaatagctgcgggctatctatcagatgtgagcggaatgtcggccaccgtctgcacaggcatgttgttcgttgcctcgcccattctgctgatgtatcaacaatatggtgcattgtcgatgacaatcagcatagtgctcttgattgtggtcggcatctttgtgaacggaccatatgccctgattacaacctctgtaagtgcagagctgggccagcacagctccttggagggaaatgccaatgctctggccacggtgacggccattatcgatggtactgggtcaatcggagcggcagttggtccactgcttgccggccttatctccaccgccggatggcagtatgtcttccacatgctcatcgctgccgacatcattgccatggtgctgctggggcgactggtcttcaaggagttcgctgcactgcgtcgtgcatcgcatcgtattcggattgaatag

SEQ ID NO: 21357 - protein, 432 aa, DROSOPHILA
MSNNYNDVPFGIRAVQRLSRQCCTRFHARRDLLYKMSVFVLTFLAYACYHMCRKPISVVKSVLQGNCSTALAASGQDCGYAPFVQIFAGIFQTTGWPGVVALVGRWFGKSKRGLIFGIWNSHTSIGNILGTLIAAHYVESDWALSFVVPGIIIAAVGFLLFLFLVDQPEIVGCYPQAGQHERRVANESDEINYRSAPTERTPILPRSQPEAVPRGRGRPISLIDALFIPGVVEFSLCLFFTKLVSYTFMYWLPLYIQKSSTLGPELSADLSTLFDVGGILGAIAAGYLSDVSGMSATVCTGMLFVASPILLMYQQYGALSMTISIVLLIVVGIFVNGPYALITTSVSAELGQHSSLEGNANALATVTAIIDGTGSIGAAVGPLLAGLISTAGWQYVFHMLIAADIIAMVLLGRLVFKEFAALRRASHRIRIE

SEQ ID NO: 21358 - DNA, 2559 bp, DROSOPHILA
ggaatggctccacatagagctggtgctcgttctcctagtttgccaacgaataacggcaacgtttgcgctgagagctgcaccattttcataagggcgccccgtcgaatggcctccttatttccagcgttgcgagctgtggaatatgcgagattaaatcctgtttatacatcccatcactaacccaccttggatgcgcctctcattgcgaatgcttcgaatctcgtggattttcgccagtgcggctcggattgtggcctcctcctgcgcagcctccgttaaactggccttgagcaggggcttaaccttctgattggtggcgtgcagagatcgcaccagactagcaatggagttttccgcacgacgacgctcctcgtccacattgtgaatgttttgttgaatgtccttcaggcgatcctgtaaatgccatataaatatagtatatatcgacatttattgttaacatctttacctgaatctgttgggcggcactctccgcagtcagtggcatgttgtttcgatattataacaatataataaatttgttttttgaacactttgtttacctacgcaatgaaaacaaaaacaagcataagcgtaaagtcgacaacgcgttagtattaactatgcgatagttttatattttacctcagtatttttttaatcttagcaaattttattttacagagtaaaacagagtaattattgttaagatttttgtaccgtataatctcattatttgactttagtggatctttttctcaaactcgaatatttacttttcaaagttgtttacgtttcttacattggagatggaagcaagtgcgcctaacagcacgcagataacagcacgatatcttcacgtggttggcgttatttagtcccttttctgcgctctatgacagcctctctggctttcccttcttttccatcgcgtttccgtaagtgtgctccgcgtttttccaattggctatttttatttataatatcttcaattgcagctaggaattccagtgtgcgaaaaacgtaggtgcctaatacacgagaaatgcaacgaaaatttcaacagttgttggctttttgttcaactggcgttggctaaaagtgaactccaagtgttaaccccaagctaaaattataatggcgaacattttttctgttttcatgtgccgccccatcaacgaatctttggatacccggagtagtttaagatggccaagtccaagaaccacacaaatcacaaccagaacaagaaggcccatcgtaatggcatcaagcgcccgctgcgcaaacgccacgagtccactctgggtgtaagtattcaaaaatatgcatatttagttagcatctagagttgattttaacaaccttcccgtctttagatggatgtgaaatttctgatcaaccagcgctacgcacgcaagggaaacctttcccgcgaggagtccgtgaagcgctacaacgagcgcatcgcttcccagaagggcaagccaaagcctgttactctgtagatgattgccccgcgtgtggataattaaaggacaattcagtttaacaaagaaccgtctttatttgtgttgccgtcgttagtagtagatgctcagcaccttgtggaagggaatgtgctccaggtcggcattgtgccgacgccggtagtcccacagatattggtcgatcacaatggagttgacgttgtccagtgagatttcggggtgctgctccttgagtatcttcaccacagcatccctaacttgttcgatgatgtatatagatgcgccgcgtatctccacctctcggggatcgccgttctccagaatagtatccgtctttaggaactccattagctcactggtgtactccaaactgccgaagtgcactagcacctggggaattcggtagtcagcgaacatggttatctgatcgatgtcattaaagaacccaagtccctgacctctgtagcaggaccacacatcgcccactaggatttgcgctcgttttaggatggaaactcgctttccagcaaactcagcctcatcgcgaaaacagggaaactcctccacaacgagatccagcaagcgaactgccgatttctccgccttcttgataacattctcaaaactgccgtcgtacttgtcgatcagaacttttcccacttcatggagcgattccagacgcttttggagcagcggaatcactgtctcgccatcgtcagagcggaaaatgttctccacggttttcagatcaatctgggaatagaacttgggattgatcacatccacgccttccttgatggctctcttaatcgcagcacacagcgcaaagtagccggtatagccatcgaccttatatttggtgtagttatctgcggaagattaccattgaagatagtggatgctgctataaatatcaattactcactgggggtccaaaagcaaaagttcagggtgtccaacacaaagacccagtcggctgctttggaataatcctccggctgatttggattgggatgtaattcgtgctgcgagaagttttccacagcaatgcgtttttctattaggcctt

SEQ ID NO: 21359 - DNA, 311 bp, DROSOPHILA
aggaattccagtgtgcgaaaaactttaagatggccaagtccaagaaccacacaaatcacaaccagaacaagaaggcccatcgtaatggcatcaagcgcccgctgcgcaaacgccacgagtccactctgggtatggatgtgaaatttctgatcaaccagcgctacgcacgcaagggaaacctttcccgcgaggagtccgtgaagcgctacaacgagcgcatcgcttcccagaagggcaagccaaagcctgttactctgtagatgattgccccgcgtgtggataattaaaggacaattcagtttaacaaagaa

SEQ ID NO: 21360 - protein, 76 aa, DROSOPHILA
MAKSKNHTNHNQNKKAHRNGIKRPLRKRHESTLGMDVKFLINQRYARKGNLSREESVKRYNERIASQKGKPKPVTL

SEQ ID NO: 21361 - DNA, 11756 bp, DROSOPHILA
ggtgttccgggattacctcaccattaaccgtttgtaattgccataaccatgcggcgcacgcccaaacttcagctggtgggccgtgcctactcggagatgtcacccctgaatccggattcgctcacggactctccgaccacgagcagtgctggacaggatcgtcgggccgatcagagcggctacggcagcatctttcccttcgggctcctacgcggctccttcggccgcggtggtaatgccagccaggtgggttcagccagcatatgttacgtcccaatgcccaatggcgactgcttatcggatactgctccatacgtttgccgaagcagattgcttaaccgatagcgccatatgtttgttttatcgtcacaattagtcgcgccgtcgcgaatcacccacacccttcaatatcaagatatacccgcgtgtgcacgtagaaatcaagttactcccaactgtcgatattaattctacatcagttgatggcccaatcccgaaagtatgctgtctttcaataaaaccattaccacaaactgcgccaaaaggcatctaaagaggctttcgaagcgagcaaattcgattcctcaaagtagacaatataatatagatgattactccaatcctttgaccccatttagtattaacaatcctataggtaaggataatatgtgaccctataaagtttcaattaccaaaaaatctttgaagataaccgaatctgttcatccctttccggtgtgaatctcaacttctatttgactttgggggaaataaaaaggtaattaacacgatacgataatcactgtgtggtgttgtctgttgtttatagggaagcggttatatacaggccagtatccattgcttatccgacttatcagactatccggcctgtttgcccaattaatgaaaactaaatagagatcgtttggtgcccgtcgcccaggcatttatacgatgcttccatgcgaagtgccggcagttcactggcggcactcgatgcccaacgttcgtttgactccaaattgaatttcggcatacacacaagtagtatatcttctccatcgattgcaaggcggccttcaagacggaactgagcggcgagagtttggcgaaaatgttcaaatcccgcctaaagacgaatccgggtgggagtgaggtgtgttccgggtgcaatgtgtccgcgacaagtgtagtgcaatgtcagaactttatagccgagatgcgctcccttactatcagcgaaactagccggagatatcatgtgatagcaagaacagttgtcagttactgggtattaggttcgtcttatcggcctgtccgcccttcttctctcttttcaaggcaaccgcggagaaaagccagcttgatcgacaggtccaccccaatccccaatggaattgcatcaatcagtcaattatgaatcatttagggaatggctttcattgctattccgttcagtcagccttaattagaccaagacatgtcagtcatagtagcattaacaattccataaagctaaactgccgtagagcgcagagctttcgtagcgatttaagtcacgtaaataatgatatactaactaagccacgtcctagataaacgagagcactagggcatctcgcgattgtcaccgtacacacagaataacccagatcagcagtcatgccgaaagatggtcactcacgtaagccacaaaagagggcgtccatcgcagaggaaactcctgtctccgattccacaactccagccacaacagcatcacccagctcacccagcagaactgctggccactccaccatcggtgctttggtcagcaacctgcaccaccatgacattcagtccctgcatcaaccactgctggagagcgaggagcgggtgatagtcgcggttaaccacaggaatcctcgccagccacatcggagttatgggaccgagcggaagccgcacagttccctgccccgtttcgtgatcaacattgaggaggagacggatgcagcggtggctgcggctgagggaaagagcagtcccgctcctaaccaggagcacgaggagcactccaaccagagtccttcccgccgtttcagtcacttcaatctggccctgcgtcgcttctcccacatccatgcccacgtaaatgccgattatcctggctatgttggtgttgtaaccttgttgctctaccgcttgttggatcctaacccccgagattggcctaaccccatgtgtacatagatactcgatattcacatacacacactcacaatgccatcgactaaaaaccagtatgggtcgcgtgcaccgcatctaaaaataaacattctagttgcagtcgcttcttcgttcccgactttggttaactgcttcgctctgtgccactaatgtcccaagaatggttgttctttcactcttccactctgctcgcacgcccaagacgggtgctttggtccacagttgcgggtagcaaaataagtactactcccagcactgcatattaaatcgatggaaccatcgatcacgaagaacacctagctgtgcacttgcactgcaccattttcagttgaaagggtgttttaatagcaaaaagacaaagatgtttagatacagtaccataattgatatagccactacattcacaaggttacaacggatttgtagtttttagaaaacgctttgcatttaaggttgtgtaagctgataataatatttttaaagcgctaattaaatgcacatcatttaaaacatgaaaaatgctgcacaattacattgagccaaagcaattaaaacgattcgtgaaccacattttggtgtctgacaaatgtttcgcttatcagctcgaactagtgtacacgtaaattccccttcttatataaccccatacactattggtgtaccggatggtgtgatagcactttgctgatgttcctctggattgtgattcctctgatgcagcgaaacttaacccattacaatgttactatgcaaaccctcgacactgagaatccattaggcaaactcaagtgacgtgcgactgcgactcaataattgcagccactcgagtcgagtcggaagacaaacatccgaattggccatccatcgttcatttaacgtcttcatcttatcgatcgcgctcagtcagtgtcgccagtacttctggcacttcgagtgcattcagtataaacttatcgcctgaagtgacgcgtaattatcgagatacagatactccgcacaccccaaactaattagctgattggtttaaatggtttaaaggccaaaggatacgccgtgctggtagccaatggagtcggcggggccagcggcctaagcaccagttcaagtgaaactctttgcgcaaggcagtgcaagcataaccagacccgatgtggtgaccacaaaacctggtcggtcaatcagtcttggtgcaacgctcgtggcagcaggagcggcggccaaaagcaacagctccaaaatcggcaaacacgtttcgagtgtccaattacattacatttaccacatttgcggcacgaagcgcgggccaccaccagcaataaaccagcgcttaagtggccaacgtatctcggccaaaaaaaaagcacccacatcgagcgtaatcggccagaaaacagcgatgctcgcttcgggtcgcgtgtaaacctaaaatcgcactgtccggcagcaaaacgcttgataacccagttgtctcagacgtcgacgggccaccaaggcgacaggttgcattggaaaacagcagcacaaaaagtgcgcagtgtacgccgcagcacagccagaaagcaaatacccggcggaattaatttgtcaattaactggcagtgcggaaaaagtggcatacagttaaaaaatacaacaaaatcaaaaaaacaaaaacacaaagctacaaggaaaaatgcagaaataatatgcacatactggcacttgattagagtgccattcagtgagagtgtgtgtctggcaaaactagtgatctgtgtggcaaaccagtgcggagaatgccgagttttatcagctcgacgcacgtacaacagcccgcgaataaagccaaataatatatacaatttatcaaatcacaatcgaaatcaaaatcaaagtcaaaactgcagacggagagtgtggaacgagtgtcagctgacaagatgaaactatccaagagcttcgatgaattgattctcaatgcctcgcgattgagtttgaataacttgcgatcgccggcgaagaaaaaggggaaaaatgtaaagtattcgctgatttaattagtcggtggtattagaaccacacttcatttcagttaattaggctttggaaataagttgaaagaccctctcttcctgttttaatgggaaataccactgcataggcgaaaaacgcagagataaaaatataaataaacatattcgagactaataaaacttactcacgcgccccacacacacacacacactcgcagtcgtaaattggagctatctgaataatcttatgtctatctattcctttcggccagacaactccggcactgatacgccatgacttgactcgttctagggtgctttaagtcagcaattagatctaacataagtctattcggcggtactttgtttgccaataaatatacctatacctgtatctattgatatttagatatttacttcccttcgttatgcccgagtgcattttaacacctcgaatgaaacccaaacccatggcgaaagcgaacccataatccaaatctgaatacaaccagagcgactgtcttggcccgccaataagccaataaccaaccaataagccatactgttgatgttttattgatccaattgtatgtttcgtttctcgaacgagcgaaggttctacacaattaattagaataggcaaataaaaaataaattaaagccaagccactgcagtgcgtgtgggacggaacgctgcttggcaattgttcaaataacaaataaggcaatctgtgacgttatcgttaagatgagcgattacctgaccatacgagtgtctatttacccagggactacgagatcagaatcgtctggggagtcgtttacgttagatggcatgtgtcccaggaattaccctttgatatttttagaaaactcccattaaaaacggcactactttgtatttgatttcttggagaactgattatttccacaattacccatcgatgagtggcgttggtggcttttttataacccgcataatttgtttattggccctaaagctcgatgagtcaatcatggacctgtggataattttggcagtacaccattatttagcactaagataaactacttttctatatgcataagaataattgcttcctaatgttgtggttccttttggcttaaactaagcatgcacaatgttcaactttgacccctggagacaactgaagtctctaattgatatcccctatttcaccccccaccaaatgttacaacattttcaaatatgagttatggtttctgtctcttaaatgcttcttaacacgaataactggtacaagttttgctaaaactaaacgatatttatttgcatgaagtttgtttcggtttttgagtgagaatatgaattgtgaaaatacatttgaaagtccattaatatcataaactcttcgtgcagaacataaatcgcttcggagactccatgggttcgctgggacatcgtgccttgttgcagtacatcgataataatgatatatccggtctgcgcgccattttggacagccgacatcttaccatcgatgatcgggacgaggtgagtcccctcaagcttaatattatttaagacttgactctattccaaatctcttatagaatgccaccacggtgttgatggtagttgctggacgaggcttaactgcctttgttcgcgagttcctggcccgcggtgccgatgttcaagcggaggatctggacaactggacggcactgctgtgtgcctcccgaaacgggcacttagatgttgtccaactgctgctggaccatggcgctgaagtggagcatcgcgatatggtaagtcttctcatccacataagtttctgagtctgtcttattcccaaactttttccagggtggctggaccagtttgatgtgggcagcttaccgtggacacacggagctggtgcgactgctgctggacaaaggagccgatggcaatgcccatggtaactaccacctgggcgcccttttgtgggcggcgggccgtggctacaaggacatcgtggagctgctggtgcaacgcggcgctaaagtgaatgtgggtgataagtacggaaccacagccctggtgtgggcatgccggcgcggaaacgttgagattgtggataccttacttaaggctggagccaatgtggacaccgctggcatgtattcgtggacgccactgctcgttgcggccgccggtggccacacagattgcgttagttccattctcgagaagaaaccaaatgtaaatgccttggacaaggatggaatgactgccctttgcatagcgagtcgagagggtttccaggatattgccgcctcccttattgcggctggtgcctacataaatatccaggatcgcggagcagacacgccgctcatccatgccgttaaagcaggacatcgaactgtagtggaggctttgctcaaaaaacatgccgatgtggatatacagggaaaggatcgcaagacggccatttacaccgcggtggagaaaggacatacgccgattgttaaactcctgttggccaccaatcccgacctcgaatccgccaccaaggatggcgacactccgctgctgagagctgttagaaaccgcaacttggagattgtgcacttattgctagatcgaaaggccaaggtgaccgctagcgacaaaaggggcgacacctgcctgcacatcgcaatgcgggcgaggagcaagacgattgtggaggcccttctgcgaaatcccaagcacagtcagcttctatatagagccaacaaagctggagaaacgccctacaacattgactccctgcaccagaagaccatattgggtcaagtgtttggcgccagacgtctgaacaccaacgaggactccgagggaatgctgggctacgaactgtactcctctgccttggcggatgtgctcagtgagccgacattaaccactcccattaccgttggactctacgccaaatggggcagtggaaagagtttcctgctaaataagctgcgcgacgagatgaacaactttgcgcgccaatgggcggaaccaccgattcgaaccagtggtctgctcttcatcgtctgtcttcatgtggcattgctcattggaactattgtgggactgagcacttggtcagcggttgtgggcgtgtcggcggccgtcggcttcttgctgctcgcctatctgctcctggcagctgttagatactgtaattaccaaatggacatgcagtgggcctactctgtgcaacacggtctggagaagagaatgacaagattgcgtttgatacttcaggtggccttttgccatcccccgggaccccaatcggattcacaggcaaagcccgttcggtttcactttgcggaggccaacagcgcttcgcccacaggtgatggagcagtggctcatatgctggccgctctcttagatgctatagaatctcactacggttggctggccacgcgattgtaccgagccttccgtccaaagtgcttaaaagtggatgttggctggcgttggcgtcgcatgtgctgtatcccaatcgttttgatcttcgaacttgctctcgtcaccgtggttactggcatctctctcaccgtggcctacttcacgtttgccgatgagaaggaaaaggaacatatattagtggctctctatgtaattgctgccgtgatgggcacgctgatctgtacgcatctccatgttctggccaaggtgtttgtatccctgttcacctcccacattcgagtactaaaaagggcagttcggtccagtgagtcggctccattgactatgctgggtgccgaggtggccgtgatgacggacatggtcaagtgcctggacgcgttcaccaatcagcagagccgcttagttggcgtgatcgatgccttggattcctgcgacacggagaggattctcacccttctaaatgcggtgcaaacgcttctttcttcacctaaccgaccatttgtcttgctcatttctgtggatccccatgtcatagccaaagcagcggaggctaatagtcgacgactctttacggagggcggaatcggaggacatgacttcctgagaaacttggtgcatctgcctgtttatctgcaaaactccggactgagaaaggtgcaacgagcccagatgacagcgctgctgttcaagcgaagtggcggaggagattaccagacagacgatggacccacattgggtcactctgtatccgctcgtcgactgtccaatgcctctgaaataatctccagtcaggagaagctgcgcggacccgcccgtggaggtggtggaaagaagctgcgtctctccgaatccgtggccagctcaactggttccaatctccatcgcctgggtcagaatccccagaccgtgctcgatctatcgcgcattgtgctcacggatgattacttcagcgatgtgaatccacgaagtatgcgtcgcctaatgaacgtgatctacatcacggtgcgcttgctcaaggccttccagattgagttcagctggtatcgcctgagttcgtggatcaatctgactgagcagtggcctttgagagcaagtatgatagtgctgcatcacgatcagttcatggacagcaatgcggatgagagtgtatcgctgcaaagcgtttacgagaagtgagtttaagaccttcatcacagttttatttagaaagaatctacttatatctacttcaatcctttagattgcgacccaaactcgcttacttgcgagaagctgctccacttctagagttggatagggatgaacgaaagctcgacgccttcctgcagctgcacaaatcagatttactcgtggcggatctccgcatcttcttgcccttcaccattaatctggatccctacttaagaaaggtcttaaagggtgagttataaaaaaaaataaaagtctggcgcaagctaaatagtgtttatttttcagaggatcagcaaaccatcgaggacgagggctccctagtgatacaagcaaggcccagcgtttccaatacaatgcgtcaattcccagcgcccaccacttacgtgccttcgccgcaggcttatccaccctaccaaatgttccagaacgagtatcctgccaatgagttgcgctccaggaatctcagcacgagcacagagcctgtcaccccgctcattaactcacctagtgattcgtttggtgtaagttatttgagtttaaatttatagaaacatagacttaaatgcatgcttttcatttgctacaggatgatatcctgcaaaccaagctgaccgatttgaccgttgagggagtcatcagcctgctggatcggattgaggacatgaagccagcgttgcccaaactagcgcccgtgctccgcgagaatgcaatcaatggacgtgtgctgaagcactgcgatatgccggatctgaaatcggtaaggtgttgctaacattttgaagttttttccgtattaatcgacgagttacgaacaggttctgggcctgagctttggccactgggagctgttccgcctgctgatcaccacgttgcgggaatgcgagcgattgccacggaagcaacagcgtcagcagcagcagccgggtgcgttggaggcaccatcgaatgtcccgatgattaaggatgtgacggatgccctgatgcagccacccagagagtccctctcgcgaaagaactccgtcagtcatatggaaaagcaggtaaggcgacccatcaaaagtcttagaattgtaggatcggaaagttgtatatttaaaagaacaattcgctctaactcatgtgctttgatctattcttatttcgaccattttaacaatccgatatgaaatgcagtcaaaagtgcatgactacgagtatctgcaggtaaagctcagacactaagcgacacagactgaaacccaaaattccaagcccacatttgtgcaaacccataacagatcaatatcaaatgcctcagcaaacccattagcttatgagttttatctattgccaggtcacgctggaggagcagatgatctgcggcaccttgcagactctgaatgaggaggcgtacgaggatgtggccagtagcgagcgaccgagtcccacaggtgagatgttggcagcagtcgcacaactgcaattagcacccatccgcgagtcttccgagttcggatcgccttccgacgatcagaagcagtatggggtcaagataagcaacaacaacaacaacaaccagtacttgcatgcggagtacaaccggagcgtcagctcgcattccctgcagagtctgagcactctggtgggtgcacccgttggtcatggtggttcaggtggcagtcacctacacctgggcaatggtaacgatctgagcgatagcacgctcgatctaatgcatgtagactcggtatttggtggtggtggtggaggtggttatcatcgggcatcgcgccagatctcgataagcagcgagctgctgcacgagtccagttccttgcccatggtggtggtcattcccaatgcctcgggcgaacaggcctacgacgacaccaagctctgagaggcatggggctaacgactgcacttggacaactattaaagctgcatggggttgagtcgtacttacattttaaagtctgacaaactaaaccattttaatggctggaccaaaaaccaatatcatatcatccgaaacacgatttctcgtattacttgttttattcttgctttgtcatggtcagtattattgacaattactaatagttgcgttgtgcgattactaaattattccaatgtttatatgccgaagattagttattaattatttgcaacacatcccacacacaaacacacacacacacacacgatatatttaaaattgttaatcgcccacaacacatgaacaactaacctaatggtattctaaccactccactaaatcctatgtctatccctagcgttagatgaagcatcaaataaatgataaattttatgaacaactcgttacctcttgcattttattgagctttatatctgtgtttatgttacgcctttaacctttgttctgagttaattggttgctttaattcacgtggttaacatacataaatttgttgggaaatagcaccctttgcaatgggtaatccctccaagaaccctaacttaatcttcctcatccctatgatttttagaactcgacacaccgagtgccggagcagcaatgacgaccccattgctcggtgcctccggctctgtgccagcgccgtcaggtcgggaatctattttaaagcagcagggaagcgtcaaagcagacaagcgagtatcgattcaacaaatggcgaccagcaacaacaacaacaataatagtaccaagctaacgccaaatgtggagtatgtttccgaacgccagccggaagtccaaggtgccggcaaacgcttgacaaccaagccgccaccaggtaatgttcaccaggtctaaagccaaaacacgtacataataataagcaaatccttaataggacctcgacccgcctcgctgatcatcaccagaaacgattcca

SEQ ID NO: 21362 - DNA, 4611 bp, DROSOPHILA
ccaacgttcgtttgactccaaattgaatttcggcatacacacaagtagtatatcttctccatcgattgcaaggcggccttcaagacggaactgagcggcgagagtttggcgaaaatgttcaaatcccgcctaaagacgaatccgggtgggagtgagaacataaatcgcttcggagactccatgggttcgctgggacatcgtgccttgttgcagtacatcgataataatgatatatccggtctgcgcgccattttggacagccgacatcttaccatcgatgatcgggacgagaatgccaccacggtgttgatggtagttgctggacgaggcttaactgcctttgttcgcgagttcctggcccgcggtgccgatgttcaagcggaggatctggacaactggacggcactgctgtgtgcctcccgaaacgggcacttagatgttgtccaactgctgctggaccatggcgctgaagtggagcatcgcgatatgggtggctggaccagtttgatgtgggcagcttaccgtggacacacggagctggtgcgactgctgctggacaaaggagccgatggcaatgcccatggtaactaccacctgggcgcccttttgtgggcggcgggccgtggctacaaggacatcgtggagctgctggtgcaacgcggcgctaaagtgaatgtgggtgataagtacggaaccacagccctggtgtgggcatgccggcgcggaaacgttgagattgtggataccttacttaaggctggagccaatgtggacaccgctggcatgtattcgtggacgccactgctcgttgcggccgccggtggccacacagattgcgttagttccattctcgagaagaaaccaaatgtaaatgccttggacaaggatggaatgactgccctttgcatagcgagtcgagagggtttccaggatattgccgcctcccttattgcggctggtgcctacataaatatccaggatcgcggagcagacacgccgctcatccatgccgttaaagcaggacatcgaactgtagtggaggctttgctcaaaaaacatgccgatgtggatatacagggaaaggatcgcaagacggccatttacaccgcggtggagaaaggacatacgccgattgttaaactcctgttggccaccaatcccgacctcgaatccgccaccaaggatggcgacactccgctgctgagagctgttagaaaccgcaacttggagattgtgcacttattgctagatcgaaaggccaaggtgaccgctagcgacaaaaggggcgacacctgcctgcacatcgcaatgcgggcgaggagcaagacgattgtggaggcccttctgcgaaatcccaagcacagtcagcttctatatagagccaacaaagctggagaaacgccctacaacattgactccctgcaccagaagaccatattgggtcaagtgtttggcgccagacgtctgaacaccaacgaggactccgagggaatgctgggctacgaactgtactcctctgccttggcggatgtgctcagtgagccgacattaaccactcccattaccgttggactctacgccaaatggggcagtggaaagagtttcctgctaaataagctgcgcgacgagatgaacaactttgcgcgccaatgggcggaaccaccgattcgaaccagtggtctgctcttcatcgtctgtcttcatgtggcattgctcattggaactattgtgggactgagcacttggtcagcggttgtgggcgtgtcggcggccgtcggcttcttgctgctcgcctatctgctcctggcagctgttagatactgtaattaccaaatggacatgcagtgggcctactctgtgcaacacggtctggagaagagaatgacaagattgcgtttgatacttcaggtggccttttgccatcccccgggaccccaatcggattcacaggcaaagcccgttcggtttcactttgcggaggccaacagcgcttcgcccacaggtgatggagcagtggctcatatgctggccgctctcttagatgctatagaatctcactacggttggctggccacgcgattgtaccgagccttccgtccaaagtgcttaaaagtggatgttggctggcgttggcgtcgcatgtgctgtatcccaatcgttttgatcttcgaacttgctctcgtcaccgtggttactggcatctctctcaccgtggcctacttcacgtttgccgatgagaaggaaaaggaacatatattagtggctctctatgtaattgctgccgtgatgggcacgctgatctgtacgcatctccatgttctggccaaggtgtttgtatccctgttcacctcccacattcgagtactaaaaagggcagttcggtccagtgagtcggctccattgactatgctgggtgccgaggtggccgtgatgacggacatggtcaagtgcctggacgcgttcaccaatcagcagagccgcttagttggcgtgatcgatgccttggattcctgcgacacggagaggattctcacccttctaaatgcggtgcaaacgcttctttcttcacctaaccgaccatttgtcttgctcatttctgtggatccccatgtcatagccaaagcagcggaggctaatagtcgacgactctttacggagggcggaatcggaggacatgacttcctgagaaacttggtgcatctgcctgtttatctgcaaaactccggactgagaaaggtgcaacgagcccagatgacagcgctgctgttcaagcgaagtggcggaggagattaccagacagacgatggacccacattgggtcactctgtatccgctcgtcgactgtccaatgcctctgaaataatctccagtcaggagaagctgcgcggacccgcccgtggaggtggtggaaagaagctgcgtctctccgaatccgtggccagctcaactggttccaatctccatcgcctgggtcagaatccccagaccgtgctcgatctatcgcgcattgtgctcacggatgattacttcagcgatgtgaatccacgaagtatgcgtcgcctaatgaacgtgatctacatcacggtgcgcttgctcaaggccttccagattgagttcagctggtatcgcctgagttcgtggatcaatctgactgagcagtggcctttgagagcaagtatgatagtgctgcatcacgatcagttcatggacagcaatgcggatgagagtgtatcgctgcaaagcgtttacgagaaattgcgacccaaactcgcttacttgcgagaagctgctccacttctagagttggatagggatgaacgaaagctcgacgccttcctgcagctgcacaaatcagatttactcgtggcggatctccgcatcttcttgcccttcaccattaatctggatccctacttaagaaaggtcttaaaggaggatcagcaaaccatcgaggacgagggctccctagtgatacaagcaaggcccagcgtttccaatacaatgcgtcaattcccagcgcccaccacttacgtgccttcgccgcaggcttatccaccctaccaaatgttccagaacgagtatcctgccaatgagttgcgctccaggaatctcagcacgagcacagagcctgtcaccccgctcattaactcacctagtgattcgtttggtgatgatatcctgcaaaccaagctgaccgatttgaccgttgagggagtcatcagcctgctggatcggattgaggacatgaagccagcgttgcccaaactagcgcccgtgctccgcgagaatgcaatcaatggacgtgtgctgaagcactgcgatatgccggatctgaaatcggttctgggcctgagctttggccactgggagctgttccgcctgctgatcaccacgttgcgggaatgcgagcgattgccacggaagcaacagcgtcagcagcagcagccgggtgcgttggaggcaccatcgaatgtcccgatgattaaggatgtgacggatgccctgatgcagccacccagagagtccctctcgcgaaagaactccgtcagtcatatggaaaagcaggtcacgctggaggagcagatgatctgcggcaccttgcagactctgaatgaggaggcgtacgaggatgtggccagtagcgagcgaccgagtcccacaggtgagatgttggcagcagtcgcacaactgcaattagcacccatccgcgagtcttccgagttcggatcgccttccgacgatcagaagcagtatggggtcaagataagcaacaacaacaacaacaaccagtacttgcatgcggagtacaaccggagcgtcagctcgcattccctgcagagtctgagcactctggtgggtgcacccgttggtcatggtggttcaggtggcagtcacctacacctgggcaatggtaacgatctgagcgatagcacgctcgatctaatgcatgtagactcggtatttggtggtggtggtggaggtggttatcatcgggcatcgcgccagatctcgataagcagcgagctgctgcacgagtccagttccttgcccatggtggtggtcattcccaatgcctcgggcgaacaggcctacgacgacaccaagctctga

SEQ ID NO: 21363 - protein, 1498 aa, DROSOPHILA
MFKSRLKTNPGGSENINRFGDSMGSLGHRALLQYIDNNDISGLRAILDSRHLTIDDRDENATTVLMVVAGRGLTAFVREFLARGADVQAEDLDNWTALLCASRNGHLDVVQLLLDHGAEVEHRDMGGWTSLMWAAYRGHTELVRLLLDKGADGNAHGNYHLGALLWAAGRGYKDIVELLVQRGAKVNVGDKYGTTALVWACRRGNVEIVDTLLKAGANVDTAGMYSWTPLLVAAAGGHTDCVSSILEKKPNVNALDKDGMTALCIASREGFQDIAASLIAAGAYINIQDRGADTPLIHAVKAGHRTVVEALLKKHADVDIQGKDRKTAIYTAVEKGHTPIVKLLLATNPDLESATKDGDTPLLRAVRNRNLEIVHLLLDRKAKVTASDKRGDTCLHIAMRARSKTIVEALLRNPKHSQLLYRANKAGETPYNIDSLHQKTILGQVFGARRLNTNEDSEGMLGYELYSSALADVLSEPTLTTPITVGLYAKWGSGKSFLLNKLRDEMNNFARQWAEPPIRTSGLLFIVCLHVALLIGTIVGLSTWSAVVGVSAAVGFLLLAYLLLAAVRYCNYQMDMQWAYSVQHGLEKRMTRLRLILQVAFCHPPGPQSDSQAKPVRFHFAEANSASPTGDGAVAHMLAALLDAIESHYGWLATRLYRAFRPKCLKVDVGWRWRRMCCIPIVLIFELALVTVVTGISLTVAYFTFADEKEKEHILVALYVIAAVMGTLICTHLHVLAKVFVSLFTSHIRVLKRAVRSSESAPLTMLGAEVAVMTDMVKCLDAFTNQQSRLVGVIDALDSCDTERILTLLNAVQTLLSSPNRPFVLLISVDPHVIAKAAEANSRRLFTEGGIGGHDFLRNLVHLPVYLQNSGLRKVQRAQMTALLFKRSGGGDYQTDDGPTLGHSVSARRLSNASEIISSQEKLRGPARGGGGKKLRLSESVASSTGSNLHRLGQNPQTVLDLSRIVLTDDYFSDVNPRSMRRLMNVIYITVRLLKAFQIEFSWYRLSSWINLTEQWPLRASMIVLHHDQFMDSNADESVSLQSVYEKLRPKLAYLREAAPLLELDRDERKLDAFLQLHKSDLLVADLRIFLPFTINLDPYLRKVLKEDQQTIEDEGSLVIQARPSVSNTMRQFPAPTTYVPSPQAYPPYQMFQNEYPANELRSRNLSTSTEPVTPLINSPSDSFGDDILQTKLTDLTVEGVISLLDRIEDMKPALPKLAPVLRENAINGRVLKHCDMPDLKSVLGLSFGHWELFRLLITTLRECERLPRKQQRQQQQPGALEAPSNVPMIKDVTDALMQPPRESLSRKNSVSHMEKQVTLEEQMICGTLQTLNEEAYEDVASSERPSPTGEMLAAVAQLQLAPIRESSEFGSPSDDQKQYGVKISNNNNNNQYLHAEYNRSVSSHSLQSLSTLVGAPVGHGGSGGSHLHLGNGNDLSDSTLDLMHVDSVFGGGGGGGYHRASRQISISSELLHESSSLPMVVVIPNASGEQAYDDTKL

SEQ ID NO: 21364 - DNA, 3074 bp, DROSOPHILA
ctgccagctgaaaaggggttactattagatagccattgcccgagtcgcgctgcgagaagagtcctccttgggtttccacgccatcgggccgtatcagcgatctcggacccaggcgcatctccttgtcgtgaaggaaacgtccacggatcttgaccaggcggtactccatttgggccaagtcagtgagactacaggagggaatacactatagtgggtgggtatatagtggagaatatgtgggcaaacctactcgtctggtagagccacaggcgccgtgctcagctgcttgttgagatccttgatcaactgctccttccaaatcttgcgcttcacttgccagcagcccaagccaaaagtggtggccggtatgagctggggattggttaatggacaacaaggattagttgtgtgtataggtagaggagttggtgtctacccaccaggaggaaccatcccaaaggagctatcttctccttgtccttcgccgcctgattgggaatactggttgtccaattcaccggcggtcgctgttgtgtcatctttctggtgattaatctcggattgttcgcggtgcccgggtttcggaatacagtctgtatattaaaggccacttgccggcacatttggttccccaaacgtatcatactttcttttattttgctctaaattttctatttatttatttatttacatttccaactggaagttgatagtaagaccgttttgcactgttatgaacggataataacttcatgcggtcacaccacttccgaatgtaagctcttcttgattttatgaattaagactgcaaaggtttaaagtatataaaaaataaagtaatagttattacttttcacatgcaaaaaaaaaaacatttttctttctttacaaagatttgtatctgttactgttaatcatatgttagcaagtcactgttaacatgtcgttatacccaagttggcagccccgttacgatcagctgttttagtctgttgtcgcgtgcaattggattttttaaacgattttgttttagtaaatttaggatacatttaagaatgcagtgcactcgtgcagttgcaagactggccggcggcctagcgagaaccgcatgggtatgtttaaagcaggggttgtactttatttagtcaaaacacggtcatccgaatgcaccgccatcaactcttatataaacggatataaaatttttaaattaaacatattataggcaacacaacatacgtataagcacaggccagcgatactgggactgctggagcagccatgccgcttgtgttcatccaccggcgttgtggataataccaataaaacgaaacccggcacagcggaagccgcagaaggcggtattctgaagagagtgctcaacaaagtgggcttcacaccgaacacaaaggcggtaggactcggattactttgcccatttgattaatattcatcgaagtgatcccatttcagcgcctcaaggtaaccagtcatctgctgtacgaaagcgtcgccgacaagatcaactatgtgacctttttccgcgacttcaatctgcccaatacctttaactcctggttcttggtcaccgaactgcatgtttggctactcctgatgcgctccatggccgagggctccgaaacgggcgaggatggacgcttcctgcgcaactgcattgtggaggcgatgtggggagatgttaacacacgcgccaagaaattgggagtaggttttactttagttcacctttatatatataatctttatgctcttcatatgtgtttcccaacaggctcacaatccttcacgcacccgtcagcaaatcgagaccttatccgagcagttccaagcggccctaatcgcctacgacgagggcatcatgtccgacgatcgggttttggcctgcgccttgtggcgccgcttcttcgagatgaactgtgatgattacgcgcagatcgagcgactggtgaagtacgtccgccagcaggccagcatgctggacagtttgccgcgcgatcagttcattgtcaagccgaaagtggcatggttggaattggacaagtgcaaggtttaatcttagttatattctgttttttaaaaataaagtttgagagtatgtgaactggaaactagatgctaaggtcctccacggactgattactcaaggcacgcagctggcacttgagcagaaatgctgtaatccttcgttctgcccttctccgctgcggttcctttagttgggccagtatttggtccatctggagaaagctgcttctgggcgagattatttcagcgggctcttgttcctcgtagatgatttcctcttggatgatctgttcactgggctcctcgatgacctcctcgattatgaacgtactcgactgctgtggaacatccccatcctcaaaagtgtcccacaaaaattgcacaggagtttccgtctggatggtcgcctcctgtttgtttgttttgggtttggttttcactttggagggcggctggatctcggccaaaaatcgcaggcgttccaggtacggccaggtggatccactggtgtccgcgcggcgaaactccttgcgaaactgatagtgcagattgttccagcgcatcaggcagaagtccactaagaggattataactttaaatatatatatcttattcttttattagctgacttaccatcacagcccatcatctcggctatgcgagcccagatatcggttttcgccttcatggcatcgtagttcgagagtccagatctcttatagagcacaggattgggttccaccagatcaattagcttgaagtcgaaaggtctgtttttcttgtaactggtgcgcatggctaccaaattgaattaaactagcttgaacttgataattaagaatcccttgcttgagccatgtttatttaccttatgaagtacagcagagctacgattaagcgaaaaccatttggcacgtattgtatgtcataattgcgggcttaagatacttaacaaatgaagggaaattacataataataaattatattttaactgcattattagaaccttgtttattagttattactt

SEQ ID NO: 21365 - DNA, 835 bp, DROSOPHILA
tgcaattggattttttaaacgattttgttttagtaaatttaggatacatttaagaatgcagtgcactcgtgcagttgcaagactggccggcggcctagcgagaaccgcatgggcaacacaacatacgtataagcacaggccagcgatactgggactgctggagcagccatgccgcttgtgttcatccaccggcgttgtggataataccaataaaacgaaacccggcacagcggaagccgcagaaggcggtattctgaagagagtgctcaacaaagtgggcttcacaccgaacacaaaggcgcgcctcaaggtaaccagtcatctgctgtacgaaagcgtcgccgacaagatcaactatgtgacctttttccgcgacttcaatctgcccaatacctttaactcctggttcttggtcaccgaactgcatgtttggctactcctgatgcgctccatggccgagggctccgaaacgggcgaggatggacgcttcctgcgcaactgcattgtggaggcgatgtggggagatgttaacacacgcgccaagaaattgggagctcacaatccttcacgcacccgtcagcaaatcgagaccttatccgagcagttccaagcggccctaatcgcctacgacgagggcatcatgtccgacgatcgggttttggcctgcgccttgtggcgccgcttcttcgagatgaactgtgatgattacgcgcagatcgagcgactggtgaagtacgtccgccagcaggccagcatgctggacagtttgccgcgcgatcagttcattgtcaagccgaaagtggcatggttggaattggacaagtgcaaggtttaa

SEQ ID NO: 21366 - protein, 259 aa, DROSOPHILA
MQCTRAVARLAGGLARTAWATQHTYKHRPAILGLLEQPCRLCSSTGVVDNTNKTKPGTAEAAEGGILKRVLNKVGFTPNTKARLKVTSHLLYESVADKINYVTFFRDFNLPNTFNSWFLVTELHVWLLLMRSMAEGSETGEDGRFLRNCIVEAMWGDVNTRAKKLGAHNPSRTRQQIETLSEQFQAALIAYDEGIMSDDRVLACALWRRFFEMNCDDYAQIERLVKYVRQQASMLDSLPRDQFIVKPKVAWLELDKCKV

SEQ ID NO: 21367 - DNA, 7521 bp, DROSOPHILA
ggttcctttagttgggccagtatttggtccatctggagaaagctgcttctgggcgagattatttcagcgggctcttgttcctcgtagatgatttcctcttggatgatctgttcactgggctcctcgatgacctcctcgattatgaacgtactcgactgctgtggaacatccccatcctcaaaagtgtcccacaaaaattgcacaggagtttccgtctggatggtcgcctcctgtttgtttgttttgggtttggttttcactttggagggcggctggatctcggccaaaaatcgcaggcgttccaggtacggccaggtggatccactggtgtccgcgcggcgaaactccttgcgaaactgatagtgcagattgttccagcgcatcaggcagaagtccactaagaggattataactttaaatatatatatcttattcttttattagctgacttaccatcacagcccatcatctcggctatgcgagcccagatatcggttttcgccttcatggcatcgtagttcgagagtccagatctcttatagagcacaggattgggttccaccagatcaattagcttgaagtcgaaaggtctgtttttcttgtaactggtgcgcatggctaccaaattgaattaaactagcttgaacttgataattaagaatcccttgcttgagccatgtttatttaccttatgaagtacagcagagctacgattaagcgaaaaccatttggcacgtattgtatgtcataattgcgggcttaagatacttaacaaatgaagggaaattacataataataaattatattttaactgcattattagaaccttgtttattagttattactttacagatagaaatttacaggttaactacattgagcgatcactgtaatattccaatttatgtccacactttggtttttgggtcgttctataggctggtcacatttttcttgctgaccattattatcgaagttgctttacccgataggttccagacaaacaatatcagacgtctttgttttgcttaaaaaattaatagttcttattgttaattaccggtgccgcattaaaaaaatactggttagacaacgaagtaactacaaactagcaaccatagtgctctaaagtgctcttaatagtgttccatattcttttcagttattatttttatttaatttgttattattagaaacgttcacaataattatttatatattaaaagtttcctactaacaaatattttgacatttttccctattcgttgtgatcgtttctagaaaattcaatcgatgtttccagaaaacctaacctatcgaaccaatcgatattaacaccgattttttccacagctctattgacgacgtagaagctgaaaaaattgtggagtgaaaaattgtaaaagtgaccgaaaaaactatactttggccagctatatttccacttacatcacaccagcaatgaacatgtgagtattgaaacacaggcacacattttttaagcccaaatttcggtttagcatgcggccaggggccgagtgtcgaaaatcaataaattcaaaatggcagtaaaaaatgaaaattacataaaaaaaggtcgcttcgtgtaaatttcaacattttggcaacgcattaaagggctcaaaattctaattttatggcacaaaacgctcgtcgcaggtacaacggacagatgaacgccttcggaggcggtggcggcggaggagctggtggcctagccggcggtatggtgcccaatcgcatgggcggtggtgctcccggtggcggacccggcggagcgggcatgttccagcgcaatcgctcggccccatacccaggtttcaatggtcatggacccgccaacggtggacagcgacgcatgaacggtggtggtcctagcatgggacccggcggaccacgcaaccaggatggattcggtggtcagaacgggggccagcgctcttccaatcatggcgctcacttgcccaagatcgtttggtctgaggtgaatcttacgccattccgcaagaacttttacaagccgtgcgattcggtgctggccaggactgtcggtgaaacagagaccttcctcaccagcaatgagatcaccatcaagggcgatcaggtgcccacacccagtattgaattcgaggagggcggctttcccgattacgtgatgaacgagatccgtaagcagggtttcgccaagccaacggccattcaagcccagggttggcccattgctatgagtggacgggatctggtgggcgtggcccagaccggatcgggcaagaccttggcgtatgttctgccggcggtggtgcacatcaataaccagccgcgcctggagcgcggtgatggacccatcgccctggtcctggctcccactagagagttggcccagcagatccagcaggtagccattgagtttggcagcaacacgcatgtgcgcaacacttgcatctttggtggagcgcccaagggacagcaggctagggatttggagcgcggcgtggagattgtaattgccacaccaggtcgcctaattgatttcctcgagcgcggcaccacctcgttgaagagatgcacctatctggtgcttgacgaggccgatcgtatgctcgacatgggcttcgagccccagatcagaaagatcatgcagcagatccgaccggaccgtcaggtactcatgtggtcagctacctggcccaaagaggtgcgccagctggccgaggaattccttaataactacatacaggtgaacattggttcgctttcgctgagcgccaatcacaacatcctccagatcgtggacgtgtgcgatgagaatgagaaattgatgaagctgatcaagctgctaacagacatctcggcggagaacgagaccaagaccatcattttcgtggaaaccaagaagcgtgtggacgagatcacgcgcaatatctcccgccagggctggcgcgcatgcgccatccacggcgataagtcgcagcaggagcgcgactttgtgctctcgagcttccgcaatggccggcactcgatactggtggccaccgatgtggctgcccgcggactcggtgagtatacgtagcctttgtggggccctaaatggggccaactttcgttttttctctccgtaaccaagcaattgttgcctgtggatcaatcagcatcccgtggggtttcattcattattttgtgattcgtcgtcgacgccttcctggttcgtctggtctcagcgatccgtcagcgatgaatcggccaacaccgcccagcctcttcgctcttccttccgctctgtttccagaactttggaggtttttcgtttcgggtctgttccggatttcacaagctattcacgatttgaagctgaaagcgcatgattcccattttggggtccattgatggaatcttcgcttgcttcagtgtgtaaataatactcatagttttttgtttgtattcattttaatttaattaagctgggtaaacagtagcctaatctaagagctctagcgcaaatcttcgcctagctgtgttcgaaattaactggggttagatatgggggttaaatatttgtaaacaaatttttattttatgttatattttaaatgaagttttgggtagctatgcggagttaaatgagctcattactggttaccatctatcaaagaatgttatttggtaaacgtgaaaaccggaaaggaccgcttgtattttttttttaaattgcatgttcaaatctgtaggcagccgaaaaattgtcatttattatttttcaatcattttcgagtggttcgatgccgggtggaccattaagtctaacttattgaaccctttagtttgctgaatgattctacgaatccgaagaaaaggtgtgggctcaaataatgaggggaatgtgtttgttctccatgcattgctggttatatgatgttgttacttttagttcgtttgttgctctcttgctcatagtttttagttgtgtctcgtcaatcacattttgagtaacttaattgtaaaaaagcgatttactgtcagtcaaggagtcaatggccagcaaaataatcttaaaacaaaaaacccaaactaaagagtaatctcagtgcacccaaaagaaattaacctttaatccaaagcgattaaaccgtgccttaactataactatatatatatatcttaagttttttttttatttagtttctagaacaatgtgaagtaactaatgtgttgagtaacatttgcaacattttgcggcccaagtatttgttgactgatgataattttctgtagcttatttatgtatcataaagtacctagtatactatattacgtcgctccttactctatgtataatacctaaatttgtgtgtgaacaaaaatatcatcagcactttatgaaatggacttcgatttttcaaatggcaaaactagacaaaaaagaaaaaaacccgttcaaagttaaaaagttatatacacaaagcagttaaagagaaaagctatatatacaagttgagggttgagttataagtttctagcattgcggagatccgtgggatctccatcatcacggcccagttgcgaggacaccatctccagggactcttattcgtaagcctaattctaatcccatattctaaccctagatcgccagggtaagtactaggctaatttatttcttcctaatcatagcaatatgcccgcatcctcgttcccccttcccttccatcgaagtatgttcctccttttaaaccaaatcagcacccttctatcataagctttgatcattcattcacatttatgtacatctcttatttataatgttaattttaatcaagccgtctcttgtatgcattaagcttaaacatttatattacgatttgtgtattcaaaaatgatataaaagaaagtatgatgagaagaaaaggtcgaggtccacatttctgcagtataaaaagaacatatgtctatttgccaaagatgtattgttattaatatacgctaatagtattgatggcgaaatttttgttcaaagtacaaaaccataccaaaaaaaaaaaatttaaatttaaaccgatctaacaccaaccgacaaaatccattcgacaattcgatcaaaaatgtattttaagttctattaacaaacttaacaagaaaaacaaatgatcgcaccgacacaaacaaccactaataccaataccatgacatgaaaacacacaccaagacagaaacggacaccactcacacaagcacacaaataagttttttgtttttgttaaatagtttcttgagtattgagaaagattcctattttcgacgcattgcttcgatttgataattttaacgcttcttttcacattcttcaattttcaaattcgaaatgaaaaatattattgaaatcaaacagacgttgacgatgtcaagtttgtgatcaactacgattatccttcgaactcggaggactacgttcatcgcattggacgcaccggacgatccaataacaccggcaccgcctacaccctgtttacgcattccaacgccaacaaggccaacgacttgatccaggtgctgcgcgaggccaaccaggtgagtgctcctcgtagctttcaatcctttcgatggcaaatttactcacctcctccgtttgcagaccatcaatcccaaactgatgaacatggccatgaacggtggctacaacaagcgcggtggcggcatgggtggcggctaccgtggcggcaatggctatcagggccgcaatccccagatgggcggtggatacaatggcggcaacaactaccgcaacaacaatggtcccggcgccaccatgaatcgcaactcctttaacggcggcagcgctggcggaccaccacgcttcgatcagaagccgcgcacttctccgccgaatcagggcggacagggcggctaccgtggccagggaggcggtggctaccagggacaacagcagcagcagcagcagcagaacggcggagtgcccttctctcgtttcaatcccaatgctgcttgcttcgagcccaacaagccgcagaatggtccgggatctggaccgccacaggcgcagcaccagcagcagcaacaggctcaggctgcccagcagcaacacctacttcctgatgcatccgtgcaggcggcgatgacggctgcaaactacggagttgatcagaagcgctcccgtttctcgccctacaacatgaactttgccaacatgccaccaccagcgatgaaccagcagcaggcggcggcggcccagcagcaacagcaacaacagttgcaaactccccagcagcaacagcagcagcagcaaatgcaacagccacaggcctatggccagtactcttcaatgtcctccagcatggcaaccgtgtcgctcaacggaggagctgcagcggtggccagctcttaccgcgccccgtacgcagtgcccacgcaggcggcaccctatatgatggcgaacggcggcgacatctttgcctatccgccgcctccgctgcctgtgcagaactagaggccctgcggttcgatagaggctaccagattgtagaccagctctactgtaatttcctttccccacacgaacattacacgcacatccgcacacccacccgtattaattgtacacaagtcacgatcacaagtccagagacttcagagggaagatgttagatgagcgtcggtgatgtacgtatcgtgtagatctcctccgcccacatcatagctatataatatggtttaatctggaatcaaatacgcttttaatttgattaatctctttgttccccccaaaacaaaacaaaacaaaacaaaaaccccacatttagttgataagcttttggtttagtcaaattgttagggcattcgagtgccgatcatcgatgttgttggcatttatctttccagagccctgggcgtatttgatttctttatacaattctcgaatattgtacgtatctattcatacactgcaaaatcaatgtttgcaatgctccaaacgaacccaagccaaaagagattagatacaatcgaataatgaaggaacactaagtgggataaagctcccggtacacctttcacactatcggacacatttacacataagaaacaatgtcaatttcgtggaatcaaatgcgtattattatgtcatcttaaaccatattatgtgactagtctaatgaattgcttagctggacacttttcacatcgtaacaagaacttcaaacataaaacacaaaaacaataaaacatcaaaatacgttcaaaaatttgaaatgtaattccattttatgtcagcagcccataagtatgaattgataacaagatatgaataaaggaattaattagaatttcaaccgtgcgcttttaattattcccgctgataaggaagtctttgggtttaaacttaattgatttgcttttattttccattttaaatatatatgtatatatatatatatccatataagaaaaactatcatacatccaaaattatattattaataataaataga

SEQ ID NO: 21368 - DNA, 2663 bp, DROSOPHILA
acaaacaatatcagacgtctttgttttgcttaaaaaattaatagttcttattgttaattaccggtgccgcattaaaaaaatactggttagacaacgaactctattgacgacgtagaagctgaaaaaattgtggagtgaaaaattgtaaaagtgaccgaaaaaactatactttggccagctatatttccacttacatcacaccagcaatgaacatgtacaacggacagatgaacgccttcggaggcggtggcggcggaggagctggtggcctagccggcggtatggtgcccaatcgcatgggcggtggtgctcccggtggcggacccggcggagcgggcatgttccagcgcaatcgctcggccccatacccaggtttcaatggtcatggacccgccaacggtggacagcgacgcatgaacggtggtggtcctagcatgggacccggcggaccacgcaaccaggatggattcggtggtcagaacgggggccagcgctcttccaatcatggcgctcacttgcccaagatcgtttggtctgaggtgaatcttacgccattccgcaagaacttttacaagccgtgcgattcggtgctggccaggactgtcggtgaaacagagaccttcctcaccagcaatgagatcaccatcaagggcgatcaggtgcccacacccagtattgaattcgaggagggcggctttcccgattacgtgatgaacgagatccgtaagcagggtttcgccaagccaacggccattcaagcccagggttggcccattgctatgagtggacgggatctggtgggcgtggcccagaccggatcgggcaagaccttggcgtatgttctgccggcggtggtgcacatcaataaccagccgcgcctggagcgcggtgatggacccatcgccctggtcctggctcccactagagagttggcccagcagatccagcaggtagccattgagtttggcagcaacacgcatgtgcgcaacacttgcatctttggtggagcgcccaagggacagcaggctagggatttggagcgcggcgtggagattgtaattgccacaccaggtcgcctaattgatttcctcgagcgcggcaccacctcgttgaagagatgcacctatctggtgcttgacgaggccgatcgtatgctcgacatgggcttcgagccccagatcagaaagatcatgcagcagatccgaccggaccgtcaggtactcatgtggtcagctacctggcccaaagaggtgcgccagctggccgaggaattccttaataactacatacaggtgaacattggttcgctttcgctgagcgccaatcacaacatcctccagatcgtggacgtgtgcgatgagaatgagaaattgatgaagctgatcaagctgctaacagacatctcggcggagaacgagaccaagaccatcattttcgtggaaaccaagaagcgtgtggacgagatcacgcgcaatatctcccgccagggctggcgcgcatgcgccatccacggcgataagtcgcagcaggagcgcgactttgtgctctcgagcttccgcaatggccggcactcgatactggtggccaccgatgtggctgcccgcggactcgacgttgacgatgtcaagtttgtgatcaactacgattatccttcgaactcggaggactacgttcatcgcattggacgcaccggacgatccaataacaccggcaccgcctacaccctgtttacgcattccaacgccaacaaggccaacgacttgatccaggtgctgcgcgaggccaaccagaccatcaatcccaaactgatgaacatggccatgaacggtggctacaacaagcgcggtggcggcatgggtggcggctaccgtggcggcaatggctatcagggccgcaatccccagatgggcggtggatacaatggcggcaacaactaccgcaacaacaatggtcccggcgccaccatgaatcgcaactcctttaacggcggcagcgctggcggaccaccacgcttcgatcagaagccgcgcacttctccgccgaatcagggcggacagggcggctaccgtggccagggaggcggtggctaccagggacaacagcagcagcagcagcagcagaacggcggagtgcccttctctcgtttcaatcccaatgctgcttgcttcgagcccaacaagccgcagaatggtccgggatctggaccgccacaggcgcagcaccagcagcagcaacaggctcaggctgcccagcagcaacacctacttcctgatgcatccgtgcaggcggcgatgacggctgcaaactacggagttgatcagaagcgctcccgtttctcgccctacaacatgaactttgccaacatgccaccaccagcgatgaaccagcagcaggcggcggcggcccagcagcaacagcaacaacagttgcaaactccccagcagcaacagcagcagcagcaaatgcaacagccacaggcctatggccagtactcttcaatgtcctccagcatggcaaccgtgtcgctcaacggaggagctgcagcggtggccagctcttaccgcgccccgtacgcagtgcccacgcaggcggcaccctatatgatggcgaacggcggcgacatctttgcctatccgccgcctccgctgcctgtgcagaactag

SEQ ID NO: 21369 - protein, 811 aa, DROSOPHILA
MNAFGGGGGGGAGGLAGGMVPNRMGGGAPGGGPGGAGMFQRNRSAPYPGFNGHGPANGGQRRMNGGGPSMGPGGPRNQDGFGGQNGGQRSSNHGAHLPKIVWSEVNLTPFRKNFYKPCDSVLARTVGETETFLTSNEITIKGDQVPTPSIEFEEGGFPDYVMNEIRKQGFAKPTAIQAQGWPIAMSGRDLVGVAQTGSGKTLAYVLPAVVHINNQPRLERGDGPIALVLAPTRELAQQIQQVAIEFGSNTHVRNTCIFGGAPKGQQARDLERGVEIVIATPGRLIDFLERGTTSLKRCTYLVLDEADRMLDMGFEPQIRKIMQQIRPDRQVLMWSATWPKEVRQLAEEFLNNYIQVNIGSLSLSANHNILQIVDVCDENEKLMKLIKLLTDISAENETKTIIFVETKKRVDEITRNISRQGWRACAIHGDKSQQERDFVLSSFRNGRHSILVATDVAARGLDVDDVKFVINYDYPSNSEDYVHRIGRTGRSNNTGTAYTLFTHSNANKANDLIQVLREANQTINPKLMNMAMNGGYNKRGGGMGGGYRGGNGYQGRNPQMGGGYNGGNNYRNNNGPGATMNRNSFNGGSAGGPPRFDQKPRTSPPNQGGQGGYRGQGGGGYQGQQQQQQQQNGGVPFSRFNPNAACFEPNKPQNGPGSGPPQAQHQQQQQAQAAQQQHLLPDASVQAAMTAANYGVDQKRSRFSPYNMNFANMPPPAMNQQQAAAAQQQQQQQLQTPQQQQQQQQMQQPQAYGQYSSMSSSMATVSLNGGAAAVASSYRAPYAVPTQAAPYMMANGGDIFAYPPPPLPVQN

SEQ ID NO: 21370 - DNA, 5286 bp, DROSOPHILA
ccgcaggagccatcaattggggtggcctcagcggttggttactggcgggtggtttaagggacggatcggacatgattagtccaagaaaaaggtaatcgcgcaaaaatcaacaagctgtttagtgaggagtagtggaaggcgaaacagctgtattttgcttttggtttcgagaaccagttgcgaagtccaaatgaactagttccacggatcttggcggttctatttaaaaatgccaccatatagcttctttaaagaacactccattggagtgggtttaggttgaaaataaataaaagtttataagtaactcttacagtaaatgattattgtaatctgtttaaatattcttagatagataaatttttttttaataagatgatggatttactgaagcattagctttccacttgaacaacaagcaatattactctttaaaatttgtcgttgaattttccataaatgaaatattacctaaatatttataacaagaaattttaaatttattttaatttaatttattttaacgcttttttatgcttttaaatttaaattgaaataattgaaactaattaaaccatcgacgttggatcatagtgcattaacaaatttaattgatacctatatctgcgacagtttctcacgcctttttttttttgaaaccgataaggaatctttatgatttcagacccaccgcaaccaaattgctgttactgattatatggctaaccgcctgagtggcgttaaaggccgtttatgaggtgctataattcttgatgaactaactaaatgtttttatggcacttaaaaattgggaaccacccactttaatttcttcatgtgtgtgagcacaaagcataggtgagacttaaattaatgctgattaatatttatgtatgtatctaatatataatcagagttgagaaaaggggttttttcaacacatttttattaatatatacaagaaacgatttcatgagtttcatttaattattgaatataattaaaatatgtacttcttatacatagctggccactgaatactgacagcatagtcgggcagggaattggcaagcctgatggactcatcatcgcctttcacgtgcatgtagtgcgccccgattcccatctggaaaagtgggacagtgtagacgccatcggctttctgttgaaataaatacaaatgaaatatagaattaatagataatgtgatactcgcataccttaagctcgatgtggaagcgcagtggagtattatcgataccaaaggagtagtagatgtggtacggaggtgaattggttgttaggtattccttgaggaacgaccaattggagatgatcacatcctcgttgggagaaatgaaaatgctggtgtgatccgaggtcgttagttcaaactcgaattgaacagtctggccatccgccagaacagttttgttaagttgctttagaatcggttcagctggtgtccaaacgggattctttcgcggcagccacatggtagtttccatagcctccacccatcggtgatcgtacagcggcatgccgcacatcatgtacttggcacaatcggatgtcatgttgaccagaccagtgagatccacattggactccagcaacggagtaagtccgcgacgatcctgtaagttgaacagatatccactctcatccttgctcactgttccatcatactcgtagaaaatgcggcgcacttgctgaaaacgatcatgttgtaagtaatagttatcagtatctttatgcagacataaaggtttataactaaccaggtagggcacacgctgtacgttggttttggggcggtaggggaatccaatgtcggtggagctggcaatgtatacaccggcggcagttacggccaatagaccgatgagaacgaatccggatcggcgggacatattgaccagtaaaatctagggatagtttgatactttatgtttacttaaaaaacttaagcagtaaatattcttaccaaaaatcccatggacaatatggttcccagggcagttaaagctccaatgatcaagtcaggattggtgtccctaaaatgtcatacaaaaaagtgtctagagatttgatctatgaaccatttctttttacttacactccaaaacgacccatcattggcgtgagtatcacaatgaaacagtagaagaggtagctgttatacatgaacggagcaacctggacaatcttcaatatacctgtccaggaatagccacgatcatgcagtgtggtaagaagattgaaggccaatggtattacgtagaatgccagcgtccatgtaatgacataggtggtgcgcaatccataataattgatggcaatgcagaggatggaaagcactgcggcgtgtccatggagtgccagttgaacttgttgggcaaaggataccttctcctatttagatatgcaacattactatcccaaagtatcatgaaccataccatgaacttacggtattcgccaacttcagatagatatagctgggcagagtaaggcccagaagactgggacatatgtacaatccaatcaggagcgatggagtggcgaagtagctaagcgataagccgtatttgtccaggccataggccaccaaaaggggcagggccaatgccaagacaaaggcgatcagctggaccacaagaactaagatgaaggtgctcaggatctgttcggagctgacacttgatttttccgctatgcgaagcaaggagatatagatcaggattattgctgcggcagccacggcataatttagctttacaccgacatcggcggaatagctgatcagatacaatcccaggacatcgaaaaagatggtgttgccagtcggattcgcctgttttcagaagaattacataattaaccaagagttattttacataaaacactggcacctacgctgagatcgcgcagttcgctggcattggacagagtttgaaccaaaccgagaagattgtctcctgtgttctgcagagctgcccgtggaatcacatcgatgcgatcatacttggtatgatagacgaatccattgatgcactggccaatgtccagacctagcatttaagtttacctagttatatacaaccgaaaaattagtaattagcttagcttaccaataaggtttccgtattcaacgaaaatatcgaaatcagtgtaagatggaacaagtcccgtttggaagatttcctcagccatggtggtggagaaataatgcttggcgccatccttatatatctgcaagatatcacatgaaacagctagatatatagatagtttcttaagtaactagaggatttattaccttaaccaaccatggattatttgggccagattggaacattagttcgcgaccaccactgccagctgcatccagattaatgaccgcccttgtaggaaatattttttataagttctataaacattatatcttattgctccttgaacttacttgcaattcttagcccatttgtggtaggcaatgaatccgtgagatgcctgcagcgaattttcctcggatccgttgatcaaaaagataatgggatgctcgaatgattttctcctcgatgaaatcactcgaagcacctccaatatggagaccaccatgtgaccatcgtccccggtggagggactagttggctgagagtcgaagtggctgttcaccaggatgtagttttcacttgtggtgcccttgggcgtgagcttaaccaccacgttctgaatgccttggtacatgttgaccagattccattttacatacgcaccgtaggcatactgcaaatcaatttccatatcaaatagatcctcttgaatattatcctttatcagatttaattcctttagcaggaactgtacggtcttgtgctcgttttcatcacttccaaccactttagtgccgatagcctcgaaatcatagagattggcctgtgccctttcggcaatgaatcctcctttggaggcatcctcgacagtcagcggttcgggaagtcggtaaaaaagtggtttaaccacggcaatgaagagcagtgcccagaacaggacaatgcctccagcaaagtaccagggtagttgaaagtacactctgtgttttcttccatgtttcctggagtatgatttgactccttcttcgacatgatcgtctaaaatctaagcaaaaaatcagtccaaagttacttacttagctacttaattatttagagataatagtatagaaatatatataattcggaagctaattgtatacttacaagtttttccttgtcacccattttgtcgatttgcagacctttaatatgggagtcaaaactagactgacttgatttctatgctaaacgcttttatatcccaaaaaattatcaaaacttcgtaatcatatcttgaaattttatagcacaaataaacacaaaatataagcattgcgagagtcgctaaagtagaatcaatactttttaagtaataaaacccataaaacctataatagagttaaattgtatggttaatttattccttttccaaagaatttttacaatttttagctagtcgattaacttggcttgtctttttaaaatatttccttcgtatttcattttattgattcaaagccaaatcatcatgtcttacttatttttcaaacccacctcttttttgaaaattgaaattgctcttgaatagtctacggattttaatgtgcataataaccattaaaagatatgactatctggcaacttaagcgaatttcgatttctcacacagatcttggtgattagatatggtttgtactcaggaccagggcaacgcaccttaagttgttaccaaaagaaatcgattcacttaattgctggtatcaatcaattatcaacacttattttatgggttcataaatttttatatggaacacgcgtttggtagtaaaatacatattctttatgctatatatttaagctgtaaaatttgcattatatcactgtcttaaaatatccttaaaattaatatgtaacgttttttgtgtttcacggctgataagaaaacgtgtataagaactagtttttgcaatatttcaatttcaattaagttcaacaatgtcgaaaatggaaaatatggtacataaaaagatggctttgagaatatctgaactccatacacatatatataagccggctttagggatctagaaattgatcttgctcgtaagcttaatttatgaataataaatctgaatttcacatgtagaccacccgtatataagatttaaagatactaaagttatta

SEQ ID NO: 21371 - DNA, 2628 bp, DROSOPHILA
atgggtgacaaggaaaaacttattttagacgatcatgtcgaagaaggagtcaaatcatactccaggaaacatggaagaaaacacagagtgtactttcaactaccctggtactttgctggaggcattgtcctgttctgggcactgctcttcattgccgtggttaaaccacttttttaccgacttcccgaaccgctgactgtcgaggatgcctccaaaggaggattcattgccgaaagggcacaggccaatctctatgatttcgaggctatcggcactaaagtggttggaagtgatgaaaacgagcacaagaccgtacagttcctgctaaaggaattaaatctgataaaggataatattcaagaggatctatttgatatggaaattgatttgcagtatgcctacggtgcgtatgtaaaatggaatctggtcaacatgtaccaaggcattcagaacgtggtggttaagctcacgcccaagggcaccacaagtgaaaactacatcctggtgaacagccacttcgactctcagccaactagtccctccaccggggacgatggtcacatggtggtctccatattggaggtgcttcgagtgatttcatcgaggagaaaatcattcgagcatcccattatctttttgatcaacggatccgaggaaaattcgctgcaggcatctcacggattcattgcctaccacaaatgggctaagaattgcaaggcggtcattaatctggatgcagctggcagtggtggtcgcgaactaatgttccaatctggcccaaataatccatggttggttaagatatataaggatggcgccaagcattatttctccaccaccatggctgaggaaatcttccaaacgggacttgttccatcttacactgatttcgatattttcgttgaatacggaaaccttattggtctggacattggccagtgcatcaatggattcgtctatcataccaagtatgatcgcatcgatgtgattccacgggcagctctgcagaacacaggagacaatcttctcggtttggttcaaactctgtccaatgccagcgaactgcgcgatctcagcgcgaatccgactggcaacaccatctttttcgatgtcctgggattgtatctgatcagctattccgccgatgtcggtgtaaagctaaattatgccgtggctgccgcagcaataatcctgatctatatctccttgcttcgcatagcggaaaaatcaagtgtcagctccgaacagatcctgagcaccttcatcttagttcttgtggtccagctgatcgcctttgtcttggcattggccctgccccttttggtggcctatggcctggacaaatacggcttatcgcttagctacttcgccactccatcgctcctgattggattgtacatatgtcccagtcttctgggccttactctgcccagctatatctatctgaagttggcgaataccgagaaggtatcctttgcccaacaagttcaactggcactccatggacacgccgcagtgctttccatcctctgcattgccatcaattattatggattgcgcaccacctatgtcattacatggacgctggcattctacgtaataccattggccttcaatcttcttaccacactgcatgatcgtggctattcctggacaggtatattgaagattgtccaggttgctccgttcatgtataacagctacctcttctactgtttcattgtgatactcacgccaatgatgggtcgttttggagtggacaccaatcctgacttgatcattggagctttaactgccctgggaaccatattgtccatgggatttttgattttactggtcaatatgtcccgccgatccggattcgttctcatcggtctattggccgtaactgccgccggtgtatacattgccagctccaccgacattggattcccctaccgccccaaaaccaacgtacagcgtgtgccctacctgcaagtgcgccgcattttctacgagtatgatggaacagtgagcaaggatgagagtggatatctgttcaacttacaggatcgtcgcggacttactccgttgctggagtccaatgtggatctcactggtctggtcaacatgacatccgattgtgccaagtacatgatgtgcggcatgccgctgtacgatcaccgatgggtggaggctatggaaactaccatgtggctgccgcgaaagaatcccgtttggacaccagctgaaccgattctaaagcaacttaacaaaactgttctggcggatggccagactgttcaattcgagtttgaactaacgacctcggatcacaccagcattttcatttctcccaacgaggatgtgatcatctccaattggtcgttcctcaaggaatacctaacaaccaattcacctccgtaccacatctactactcctttggtatcgataatactccactgcgcttccacatcgagcttaagaaagccgatggcgtctacactgtcccacttttccagatgggaatcggggcgcactacatgcacgtgaaaggcgatgatgagtccatcaggcttgccaattccctgcccgactatgctgtcagtattcagtggccagctatgtataagaagtacatattttaa

SEQ ID NO: 21372 - protein, 875 aa, DROSOPHILA
MGDKEKLILDDHVEEGVKSYSRKHGRKHRVYFQLPWYFAGGIVLFWALLFIAVVKPLFYRLPEPLTVEDASKGGFIAERAQANLYDFEAIGTKVVGSDENEHKTVQFLLKELNLIKDNIQEDLFDMEIDLQYAYGAYVKWNLVNMYQGIQNVVVKLTPKGTTSENYILVNSHFDSQPTSPSTGDDGHMVVSILEVLRVISSRRKSFEHPIIFLINGSEENSLQASHGFIAYHKWAKNCKAVINLDAAGSGGRELMFQSGPNNPWLVKIYKDGAKHYFSTTMAEEIFQTGLVPSYTDFDIFVEYGNLIGLDIGQCINGFVYHTKYDRIDVIPRAALQNTGDNLLGLVQTLSNASELRDLSANPTGNTIFFDVLGLYLISYSADVGVKLNYAVAAAAIILIYISLLRIAEKSSVSSEQILSTFILVLVVQLIAFVLALALPLLVAYGLDKYGLSLSYFATPSLLIGLYICPSLLGLTLPSYIYLKLANTEKVSFAQQVQLALHGHAAVLSILCIAINYYGLRTTYVITWTLAFYVIPLAFNLLTTLHDRGYSWTGILKIVQVAPFMYNSYLFYCFIVILTPMMGRFGVDTNPDLIIGALTALGTILSMGFLILLVNMSRRSGFVLIGLLAVTAAGVYIASSTDIGFPYRPKTNVQRVPYLQVRRIFYEYDGTVSKDESGYLFNLQDRRGLTPLLESNVDLTGLVNMTSDCAKYMMCGMPLYDHRWVEAMETTMWLPRKNPVWTPAEPILKQLNKTVLADGQTVQFEFELTTSDHTSIFISPNEDVIISNWSFLKEYLTTNSPPYHIYYSFGIDNTPLRFHIELKKADGVYTVPLFQMGIGAHYMHVKGDDESIRLANSLPDYAVSIQWPAMYKKYIF

SEQ ID NO: 21373 - DNA, 13492 bp, DROSOPHILA
gagagagagagacagagagggagcagcgccttttggctgcggctttggcctcagtctcgaatacaacttgttgctgcgcggacgcgaatcgctcagtacggacgtcttgagctcgaatcctcggccatatctgtgctctcgatcgcagcgtttgctaattcgaagatcgtgctaatcgaagtaccgagaaatcacagttcgcaaaacgaccaaaaccaaagccaaaaacggggtgtaagccaagtgcctttggcctatactatactactaagcgtatttttgtgaataccctgctaattggcagccgcggctgtggcggttgtggctcagttcgaatgatggccaagtgtgtgtgttttgtgcaagttaaccgctgcgggggcaacacaacaattgcttagggcaatcaattaaagctgaaagctaagagctgcgcctgcgcacgcctctctaacctcaaaaatcgttggcgaactcaaaaaagaagctgaaaaatacatctgaaaaataacaaaaattttattttttacatacactcatatatatatatatatatatatgaaagccttcggacgactcttgtggctcgtaatgtgaaactggttcctacactcacgcacacactcactcactggcgcgttcaaaagacccactcgaaaacacacactcactctcacgcgcatacacagtgaaatgtaaacaccaatacagtggcaaattgcaacgacaacagcttaaattcaaaacaacaacaacaacaacagcaaccgcagcaaacgcagtgaaagagtcgaaatcaaatttatgaaaagctgtatttttggcacgcaaagctgagtgagcaaaaagccgaaagtaaaccgcaagttcaagaaaaagaaacgaataaaaaataacccctatgacgtcaggggttatagcttggaagagggcttgattcatcccaccagtaacgcccacaaaaagcaccaaccaccaaaccacccaccgccccgcaacaatgctgctgcgacggcgcaacggcccctgccccttccccctgctgctcctgctcctggcccactgcatttgcatttggcccgcgtcggcggcccgcgatcgctacgcccgccagaacaatcgccagcgccatcaggatatagatcgcgatcgggatcgagatcgattcctataccgcagcagttcggcccaaaatcgacagaggggcggggccaacttcgccctgggactgggagccaacggagtcaccattcccaccagtctggaggataagaacaagaacgagttcgtcaaggggaaaagtaagtgcaccgcaaggatctatccatcttcctcaagccgcccatcatctatcaaaatgtgtttatgtagatcatctggctgactgactggctgcccatatatcaaaagagccaagtcgtcccgaatttggccaccgtatcagttggtctctagagtttccaccgttttcaggtgtttttttttttattgtagtttcgtgccagcgatatgctgtcgtttatcttatcgctgtgatgttttttttttatttttcccctgtactgcactttaaatatagcttcgttttcggctgcatttcgtattatttggtcttatcgttaccctgggaatatcaattatcgaggggtagctgcaaagtgtgcaatattacaaatattttactaagctcatagattaaaaaacacttgcaatagtgtgtgaattcgtagtattttaagtaatataagcttacttaacatttatgtgtctggaatatggactttgaatgatatttcccaatatcacgtatacgccagggtatcccctagtccagagtgaatgctccctccatttaatacctgcccttcgcgacggtctcacctgccctgtggctcacctcttgacttggcgctggcttagtcaaagagtcttgtgtgcactatcgcccctgtttcgagttacccccacacctagccatcagatatcacggcaaacataccagaataccagaacgcactgattagccaagcactgagcactgtgctgtgcatttcgtaatgtcaaatgtacaaggtaaagcgtagtagttagttagtgttaagaccgcccgatttttccactctgccacttttcccgccgtctgcgtgcccttttctgtgcatcagcagcaattgcaattgcaacagcaaaagcaacagtaagagcaatagggcaactgcaactagcgacacaatttccagctaaaatggcgactcaatttgttgactctgcagttctcgaggttttctttgtgggctctttgtttcttacccgttggaaaataaattaatacacaaaatttggtattcgcatattggaagttttggctgcttggctggctggctgtatgtttgggtaaccatttggccacaatttaatgaactccatggcgtatctggcggtgtctgtttgcacagtactttgaggcaaatgtttgtattcggcgggcaaacagaaaagtaaaaattaaatgggaggcgaataaaagcgggccgtcgataccaagtactcagtgatcttgtagctgcaaattaataactgaatgtgcgcattgtgcgccagcaactgtgcaaatattgataggaaaacgaaaactttggctacgcagtctatgctaatgggagacgggagaccaccaccgcatagccggatatgtggatgtggtatgtatgtatgtatgtatggctagataagcgagttatgaaaccgataaagatgccagaaccttaaaaagcgatattacccttttttttcgcacagacgatcgctgctgtcacaatgcccttttcgcagaaattgttcgagttatttgctctggcttactgtttcgctgttttctttatgaccataaaaataagcacagctgcggcatgtatgcaaataaatgctagagaaaagcctgcacgtgcattcgaatcgaaaccgttaaaaaaatcgttgggggtaggaaactcgaacaactggcaattgttgttgacgtctttatagttcaaaacgctacactcgctggcaaaaaatcaccttttaattgttcattcaggcaaaattgtagtaaaatcaataaaaagtttccagaattttactttgacgtattttatttccagttaatcatactaaacgccaagtggattacccaaaagtagttagttagttagtagtgcctaaatcgtcacattttgcaaggacttctcttatgatattatagtttcctttaaatagttaaccatttgggttcagaaccatagccacccacctcccagcacatagatacacacagaaacagactcaacgcaacccagcaggtatgagtgtgcgtgttagcgcttgaaaaaccacattccatagtgcgctttgctgcgacggcatcgtgagtccaagtccgattccaaccagcatcccaatccgtgccccctgtaaatcccccattttggagctaattacggcgacaggcacgcgctgacttttgcctaagtgtgtattgtatgtatctgtgtgcgctttgcatttttctacgattttttctgattaagccatcatatcaaagaaataatggccaaattgaactgcgaaatggccagagcttggctatcagccaatgctgaactttgatgcctggtctgttgcagttgttgatgcattagcgttgcatttacttttagccgttcaactacttccagtaattttgagcccgagtcgaaatactggttttctaaaacccacacaaacacacacacacaagcacacgcacaccaacgagagtggagagcaactgagcggtgaagaaagagcatcttgggctgctgcgattgcgcagtctgtcgctcacttgttgattgtttcaatggagctatgctctctgcgcatatttgtttgattttcctggacccaaaggcacttctcctaggatacacgggaaataaaaccatattgcttaaaattagattgttcgagaacattaccttatgtttttggagttgtattttatattagtacttgtattagcattaataaattttacatataacattggtatatatgccacattttcttactgtgctgacagttgtgaacttttgactgcagttcgcttgactttctgcctccgccttttttctttacctctttttttccgcatgtgggcgttcgatttcgaaaaccagagttaaaagccgaggttgtcggtcctctgcccacgaattgctgctgtggagatcgcctcgcagacctctccccgattttcttttccgtctcgctcttgagccgttctatgcctaaaaatagtggcgaatgcgaaaattcaaagccgggcagcagaccaaaaatggcgccagggcgtgctcattaagccaagtccaaagctaaagtagcagcagcagcagcaacaaaagctgcagctcagcccagttggggatttttgatgattggtgggggggggggggcttggagactcagatgttggaggtgggtatgggggggctacagaacaaagagtactggcaacagcgaaaacaataagcttatctaatccaggcattgctgttttgctgtcgtgcctcacgacctgcgcccaattgttgttcgaaacaaaatgaacgcgcttcgaacacgaaaacccgaaagcagaagatgctgatcatggcgatgaggatcgaggatcacggggagggtcgccgctaaggaaaaccagccagatgagccgccacaaggcatcaccatcaccagcatctccagccaagaggctgctgcctttatgtgccccttgttgctgcatcttcgcttcgtggccgttgcctgatttgcctttgttcaggcactgagcgaaatgcacggggtccttttaaatatattaaaatatagcgtgcaagttatgagatgttagatgtaagatggtatgaaacgttcaaaacaatctctttaattcttgttttctactctatgttcattacattttaatggttaatgacttagacagacttagagggcgtaatttttggcagtgcccttttttcttagcgaggacagtcgattgtcggagctttgttgttggccacgacgagtgctgcctgcaaatttgttatgccaagccaagctgaagatgcgcctgcgcttgaagcgttttctggcgaagatttcctggcccctgttgcccgttccctcagccgcgccccacggaaaccatcccaccacccgctgcagttgcgcttatttgccttcgccttcgtgacgccacgatgcgagcttagaacagcgcggcaatagcggccaacacgaaagaaagttgccgcaacagcattctgcaaagcgaaataaaaatctgatgaaaaaaaatcagaaaaactcggagagaggaaaattgcaaaatccgcgcacgtaagcgtcgcactggagactctggctctggctctggcttcgactccgattccgatccagtggtaatccccttcccctaatgagctgcgtgtttttaatggccgcacaaatgaatttattaagcacttttacacaatttcattgtaaaataggcgcgtgccgagccgcagtggactgaaattgtcgcaaaacagttatgaattatttatgacgagctgtggagctgcggaaaaaacatggagcgggcaaagaggtaacgatcgcattgcaattgccagcgtacgttaatctatgacaccttgcgatccggccagctgcatctgcatatggcgccggatcgagactttcaccagcggcgcggatcagatcaatgtacttgttcatcaaatatctccaaactcacaagatagccagcggcatttaacggacagcaatagcaatgctcgataatttgatcgaatggggtaaccattcgagttcatacagatacacggctccaaatctcaaacgctgagaaaacaaaacctctcctaatgcccttttaaatcttttgttatattacaacaaaatctagacaattcttgttcttcgtgttcttgcgttgccccgggcgagggtacacaaaaatgttgccagccatctggggtttgggttttgcttttgtttttggttttggtttcggtttcgggccatgagttaaaaatcttttccacgaaatgaaaacacagatacagatacagggaagggaaggtaaagagcgccgagagcggcacgaacgtgagcagcaaaaactgttaagtgcgcagaaccggctgagcgagtcgggtctgttgcagcgatgaaatcgctggatagggggattgcgggaaagcgacggcagcgggggcagcggggcagcgcggggagcggaatgggacgtggaggacgtcaagaacgctttgcgtctaggccagaatcggtggaaaacttggggtccaaaagtcaaattgccgatggaaaaccgaaagaatcgattatgcagtctcttggctttcttctaccatttccatcttggtgaaaaggcaaacagcgaacacagcagctggaaacaaaaacaatatttagaaagtcagcgcggtggagtctggaatgcggttgcctattaatcagtacgtcagatgatgatcaccgtcgtgatgatggccagaggggcggcgaagggcgaatggagtcgtgtgtgttgatggcttggcatacaaatcgataaacaaatatagcaaatacagcgattttccactgtctgcgttagcgcatttgtatctgtgttggttgattaatctgaacgctgaagttcgttgcctaagtcttttgttttaatgagcacatcatgaattatgactttgatttgtactgcgctgcgaccgccagaccgccgagtcggagtcgcagagtcgccggcgactcattaatgttgccacacttagccttagcctaaggattacaaattagcctttttgtggctctgctgccgaggcggcggcgggcgtgtcgctggccgagaagaaaaatcacaaatgcccagccatgcgctcggttcgcaagaaacccgatgctgatgctgaagcgtttgcctggcagggaatccaccgacgtcgcgtcgtggcttaagtttcaggcctcgaacatgaaaaacctggctgataaattgtgcgcgataaagcccaggcgaggagtcttgagtcttgaaaagggtttcgtgatgtcgacttcgttcggcatgagaaatgaaggcgactgatgctgcggctgctgcccagcggcaacctcgaccacaaaaaaaaaataaaataaaacacacaaaaagtaaaaaaaaaaaataaataaaacgaccagaaacaaagcttaagaatttgtacgaaaatttttgcgcttcgattgctggagccgcttttgatcagtgtccagcgacaaagtcgaggtcccagtcgtggcctcaccttcgtatctctcctcctcctgctccacctcctccctcattggcggaatgccaatgcatgggacgcatatctgggggcatttaactttttcttcccatcgccacaggaatttctccgtttctggcgacagaaatatttctgtctttggttcgttcctcttcataattatgggatatttgttcgaaggaaatcgataaattagggaaggaggagcggccattttgtggataattagttgggtgctctctgctccgtgggctgggccggggcatccacctccacaatgtgtttggttgtctaactccaactcaccgctgacacatggcacactttcgcggcccacacggagtggtggcgaccagcccacgtagcccttttcataagaatccccatcatctgtgcatatgaaattgtatctatcggatgcaaatcaatgaagttgtcgccgaagatgctcgactacgcgagcggctaaaacaggtcgctgactaatgataagaggccgtctgggatgaggagcgagactgcgtgggctgctaattattaacaacgccaactggcactgagagtctcgcgcccactggtttcgtctctgagatttctgcctcattttattgcttccgagcaaacaaacaaccgggcaaagctatttccgtttacgatccaaagctcgaaccgaaattaatttctcaaactgcccgagcataagtcaacttcaacacctacccaacctggtgggctgtgcatataattggacagtttagggtcaaccgaaacaaaacccattagcccgcatcgacacccacagtattacattattacaacgatttcccttttgtcaactctctttgcagtctgcatcggcactaaatctcggctctccgtgccctccaacaaggaacatcattaccggaacctcagagatcggtacacgaactgtacgtatgtggatggcaacctggagctgacctggctgcccaacgagaatttggacctcagcttcctggacaacatacgggaggtcaccggctatattctgatcagtcatgtggacgttaagaaagtggtatttcccaagtaagtgctcaattaattaataagctttaaattcgaacaaaacaagtttgaagaaaattgtataacttactaataagtcaagttaaagctatattgttattggactagacctaataccctgtactctttcttacagactacaaatcattcgcggacgcacgctgttcagcttatccgtggaggaggagaagtatgccttgttcgtcacttattccaaaatgtacacgctggagattcccgatctacgcgatgtcttaaatggccaagtgggcttccacaacaactacaatctctgccacatgcgaacgatccagtggtcggagattgtatccaacggcacggatgcatactacaactacgactttactgctccggagcgcgagtgtcccaagtgccacgagagctgcacgcacggatgttggggcgagggtcccaagaattgccagaagttcagcaagctcacctgctcgccacagtgtgccggaggtcgttgctatggaccaaagccgcgggagtgttgtcacctcttctgcgccggaggatgcactggtcccacgcaaaaggattgcatcgcctgcaagaacttcttcgacgagggcgtatgcaaggaggaatgcccgcccatgcgcaagtacaatcccaccacctatgttcttgaaacgaatcctgagggaaagtatgcctatggtgccacctgcgtcaaggagtgtcccggtcatctgttgcgtgataatggcgcctgcgtgcgcagctgtccccaggacaagatggacaaggggggcgagtgtgtgccctgcaatggaccgtgccccaaaacctgcccgggcgttactgtcctgcatgccggcaacattgactcgttccggaattgtacggtgatcgatggcaacattcgcattttggatcagaccttctcgggcttccaggatgtctatgccaactacacgatgggaccacgatacataccgctggatcccgagcgactggaggtgttctccacggtgaaggagatcaccgggtatctgaatatcgagggaacccacccgcagttccggaatctgtcgtacttccgcaatctggaaacaattcatggccgccagctgatggagagcatgtttgccgctttggcgatcgttaagtcatccctgtacagcctggagatgcgcaatctgaagcagattagttccggcagtgtggtcatccagcataatagagacctctgctacgtaagcaatatccgttggccggccattcagaaggagcccgaacagaaggtgtgggtcaacgagaatctcagggcggatctatgcggtaagttcttaacaatcttgatatcagtgcaacataatatcataatgcatatttttgcaatttgcagagaaaaatggaaccatttgctcggatcagtgcaacgaggacggctgctggggagctggcacggatcagtgccttacctgcaagaacttcaatttcaatggcacctgcatcgccgactgtggttatatatccaagtaagtataaacagcacacaagataaatcaaatgaacatcagttaaccgacgcttgttactctccttcagtgcctacaagtttgacaatagaacgtgcaagatatgccatccagagtgccggacttgcaatggagctggagcagatcactgccaggagtgcgtccatgtgagggacggtcagcactgtgtgtccgagtgcccgaagaacaagtacaacgatcgtggtgtctgccgagagtgccacgccacctgcgatggatgcactgggcccaaggacaccatcggcattggagcgtgtacaacgtgcaatttggccattatcaacaatgacgccacagtaaaacgctgcctgctgaaggacgacaagtgccccgatgggtacttctgggagtatgtgcatccacaagagcagggatcgctaaagccattggccggcagagcagtttgccgaaagtgccatcccctttgcgagctgtgcaccaactacggataccatgaacaggtgtgctccaagtgcacccactacaagcgacgagagcagtgcgagaccgagtgtccggccgatcactacacggatgaggagcagcgcgagtgcttccagtgccacccagaatgcaacggttgcactggtccgggtgccgacgattgcaagtcttgtcgcaacttcaagttgttcgacgcgaatgagacgggtccctatgtgaactccacgatgttcaattgcacctcgaagtgtcccttggagatgcgacatgtgaactatcagtacacggccattggaccctactgtgcagctagtccgccgaggagcagcaagataactgccaatctggatgtgaacatgatcttcattatcactggtgctgttctggtgccgacgatctgcatcctctgcgtggtcacatacatttgtcggcaaaagcaaaaggccaagaaagaaacagtgaagatgaccatggctctgtccggctgtgaggattccgagccgctgcgtccctcgaacattggagccaatctatgcaagttgcgcattgtcaaggacgccgagttgcgcaagggcggagtcctcggaatgggagcctttggacgagtgtacaagggcgtttgggtgccggagggtgagaacgtcaagattccagtggccattaaggagctgctcaagtccacaggcgccgagtcaagcgaagagttcctccgcgaagcctacatcatggcctctgtggagcacgttaatctgctgaagctcctggccgtctgcatgtcctcacaaatgatgctaatcacgcaactgatgccgcttggctgcctgttggactatgtgcgaaataaccgggacaagatcggctctaaggctctgctcaactggagcacgcaaatcgccaagggcatgtcgtatctggaggagaagcgactggtccacagagacttggctgcccgcaatgtcctggtgcagactccctcgctggtgaagatcaccgactttgggctggccaagttgctgagcagcgattccaatgagtacaaggctgctggcggcaagatgcccatcaagtggttggcactggagtgcattcgcaatcgtgtattcaccagcaagtccgatgtctgggcctttggtgtgacaatttgggaactgctgacctttggccagcgtccacacgagaacatccccgctaaggatattcccgatcttattgaagtcggtctgaagctggagcagccggagatttgttcgctggacatttactgcacacttctctcgtgctggcacttggatgccgccatgcgtccaaccttcaagcagctgactacggtctttgctgagttcgccagagatccgggtcgctatctggccattcccggggataagttcacccggctgccggcctacacgagtcaggatgagaaggatctcatccgaaaattggctcccaccaccgatgggtccgaagccattgcggaacccgatgactacctgcaacccaaggcagcacctggtcctagtcacagaaccgactgcacggatgagatacccaagctgaaccgctactgcaaggatcctagcaacaagaattcgagtaccggagacgatgagacggattcgagtgcccgggaagtgggcgtgggtaatctgcgcctcgatctaccagtcgatgaggatgattacctgatgcccacatgccaaccggggcccaacaacaacaacaacataaataatcccaatcaaaacaatatggcagctgtgggcgtggctgccggctacatggatctcatcggagtgcccgttagtgtggacaatccggagtatctgctaaacgcgcagacactgggtgttggggagtcgccgatacccacccagaccatcgggataccggtgatgggagtcccgggcaccatggaggtcaaggtgccaatgccaggcagtgagccaacgagctccgatcacgagtactacaatgatacccaacgggagttgcagccactgcatcgaaaccgcaacacggagacgagggtgtaggctccagtcgagtaggagcaattgccaatgaagaaggagaatcttgccaagtgcctttggaagccatgcggatatgcctttgctggctgttatcttagataggagcccgtgcgcctgtacagagcctagaacgacccatagatttgtaaattactctctagtgtacttagccagtccccctgcatctttgtgtatacttctctatcctagcccgtaaaccagtagtcagcagggatcgtcgtcgcggtcctgcgcttgtagaatccatgtaattacgagaacaaaacaccgatagtgcatttcttagacgcctccgccatgccaaattcgaagagatcccggatccggatcggctccgccggagggcacacactaagctaagccgatgtccacttctctcgggcgtcaattacttcttgtacttgtagttagtagtagtcgtctcttttagcgcctagtttccaactgtgatatagtttgtaggactcgacctaaggacttctaacacgatgaacaaatcgaacgactcgaaacagttaagcaaatgaaaatagtgacaaagtaccgatcttatgcaattttaggccaagtttcaaatcccattcgatatatcaagtttgacaatcaaatcccgagcgtgccatgcatcgatcgatgcaaatctcctaaagatttcgaataccttgttggcacaatagagtgtaagcgaatgcctagccgatatgttactgatcaaagatacataagtaatccacacaaacatatacttttaatatacaatacatgtacacgtgtagatttgccaagttatgcctactgaataagttaatttaatttaatatagactatttacatgtatgtggaaagtatatatacacaaataaaattatttttcaataaaactttaaatcttttatttttcgggtttacgagttagtaaggtgtggttaaatgtaaccaataattttgaattctatgtaaagtacatgtgtaagaaaat

SEQ ID NO: 21374 - DNA, 4281 bp, DROSOPHILA
atgctgctgcgacggcgcaacggcccctgccccttccccctgctgctcctgctcctggcccactgcatttgcatttggcccgcgtcggcggcccgcgatcgctacgcccgccagaacaatcgccagcgccatcaggatatagatcgcgatcgggatcgagatcgattcctataccgcagcagttcggcccaaaatcgacagaggggcggggccaacttcgccctgggactgggagccaacggagtcaccattcccaccagtctggaggataagaacaagaacgagttcgtcaaggggaaaatctgcatcggcactaaatctcggctctccgtgccctccaacaaggaacatcattaccggaacctcagagatcggtacacgaactgtacgtatgtggatggcaacctggagctgacctggctgcccaacgagaatttggacctcagcttcctggacaacatacgggaggtcaccggctatattctgatcagtcatgtggacgttaagaaagtggtatttcccaaactacaaatcattcgcggacgcacgctgttcagcttatccgtggaggaggagaagtatgccttgttcgtcacttattccaaaatgtacacgctggagattcccgatctacgcgatgtcttaaatggccaagtgggcttccacaacaactacaatctctgccacatgcgaacgatccagtggtcggagattgtatccaacggcacggatgcatactacaactacgactttactgctccggagcgcgagtgtcccaagtgccacgagagctgcacgcacggatgttggggcgagggtcccaagaattgccagaagttcagcaagctcacctgctcgccacagtgtgccggaggtcgttgctatggaccaaagccgcgggagtgttgtcacctcttctgcgccggaggatgcactggtcccacgcaaaaggattgcatcgcctgcaagaacttcttcgacgagggcgtatgcaaggaggaatgcccgcccatgcgcaagtacaatcccaccacctatgttcttgaaacgaatcctgagggaaagtatgcctatggtgccacctgcgtcaaggagtgtcccggtcatctgttgcgtgataatggcgcctgcgtgcgcagctgtccccaggacaagatggacaaggggggcgagtgtgtgccctgcaatggaccgtgccccaaaacctgcccgggcgttactgtcctgcatgccggcaacattgactcgttccggaattgtacggtgatcgatggcaacattcgcattttggatcagaccttctcgggcttccaggatgtctatgccaactacacgatgggaccacgatacataccgctggatcccgagcgactggaggtgttctccacggtgaaggagatcaccgggtatctgaatatcgagggaacccacccgcagttccggaatctgtcgtacttccgcaatctggaaacaattcatggccgccagctgatggagagcatgtttgccgctttggcgatcgttaagtcatccctgtacagcctggagatgcgcaatctgaagcagattagttccggcagtgtggtcatccagcataatagagacctctgctacgtaagcaatatccgttggccggccattcagaaggagcccgaacagaaggtgtgggtcaacgagaatctcagggcggatctatgcgagaaaaatggaaccatttgctcggatcagtgcaacgaggacggctgctggggagctggcacggatcagtgccttacctgcaagaacttcaatttcaatggcacctgcatcgccgactgtggttatatatccaatgcctacaagtttgacaatagaacgtgcaagatatgccatccagagtgccggacttgcaatggagctggagcagatcactgccaggagtgcgtccatgtgagggacggtcagcactgtgtgtccgagtgcccgaagaacaagtacaacgatcgtggtgtctgccgagagtgccacgccacctgcgatggatgcactgggcccaaggacaccatcggcattggagcgtgtacaacgtgcaatttggccattatcaacaatgacgccacagtaaaacgctgcctgctgaaggacgacaagtgccccgatgggtacttctgggagtatgtgcatccacaagagcagggatcgctaaagccattggccggcagagcagtttgccgaaagtgccatcccctttgcgagctgtgcaccaactacggataccatgaacaggtgtgctccaagtgcacccactacaagcgacgagagcagtgcgagaccgagtgtccggccgatcactacacggatgaggagcagcgcgagtgcttccagtgccacccagaatgcaacggttgcactggtccgggtgccgacgattgcaagtcttgtcgcaacttcaagttgttcgacgcgaatgagacgggtccctatgtgaactccacgatgttcaattgcacctcgaagtgtcccttggagatgcgacatgtgaactatcagtacacggccattggaccctactgtgcagctagtccgccgaggagcagcaagataactgccaatctggatgtgaacatgatcttcattatcactggtgctgttctggtgccgacgatctgcatcctctgcgtggtcacatacatttgtcggcaaaagcaaaaggccaagaaagaaacagtgaagatgaccatggctctgtccggctgtgaggattccgagccgctgcgtccctcgaacattggagccaatctatgcaagttgcgcattgtcaaggacgccgagttgcgcaagggcggagtcctcggaatgggagcctttggacgagtgtacaagggcgtttgggtgccggagggtgagaacgtcaagattccagtggccattaaggagctgctcaagtccacaggcgccgagtcaagcgaagagttcctccgcgaagcctacatcatggcctctgtggagcacgttaatctgctgaagctcctggccgtctgcatgtcctcacaaatgatgctaatcacgcaactgatgccgcttggctgcctgttggactatgtgcgaaataaccgggacaagatcggctctaaggctctgctcaactggagcacgcaaatcgccaagggcatgtcgtatctggaggagaagcgactggtccacagagacttggctgcccgcaatgtcctggtgcagactccctcgctggtgaagatcaccgactttgggctggccaagttgctgagcagcgattccaatgagtacaaggctgctggcggcaagatgcccatcaagtggttggcactggagtgcattcgcaatcgtgtattcaccagcaagtccgatgtctgggcctttggtgtgacaatttgggaactgctgacctttggccagcgtccacacgagaacatccccgctaaggatattcccgatcttattgaagtcggtctgaagctggagcagccggagatttgttcgctggacatttactgcacacttctctcgtgctggcacttggatgccgccatgcgtccaaccttcaagcagctgactacggtctttgctgagttcgccagagatccgggtcgctatctggccattcccggggataagttcacccggctgccggcctacacgagtcaggatgagaaggatctcatccgaaaattggctcccaccaccgatgggtccgaagccattgcggaacccgatgactacctgcaacccaaggcagcacctggtcctagtcacagaaccgactgcacggatgagatacccaagctgaaccgctactgcaaggatcctagcaacaagaattcgagtaccggagacgatgagacggattcgagtgcccgggaagtgggcgtgggtaatctgcgcctcgatctaccagtcgatgaggatgattacctgatgcccacatgccaaccggggcccaacaacaacaacaacataaataatcccaatcaaaacaatatggcagctgtgggcgtggctgccggctacatggatctcatcggagtgcccgttagtgtggacaatccggagtatctgctaaacgcgcagacactgggtgttggggagtcgccgatacccacccagaccatcgggataccggtgatgggagtcccgggcaccatggaggtcaaggtgccaatgccaggcagtgagccaacgagctccgatcacgagtactacaatgatacccaacgggagttgcagccactgcatcgaaaccgcaacacggagacgagggtgtag

SEQ ID NO: 21375 - protein, 1426 aa, DROSOPHILA
MLLRRRNGPCPFPLLLLLLAHCICIWPASAARDRYARQNNRQRHQDIDRDRDRDRFLYRSSSAQNRQRGGANFALGLGANGVTIPTSLEDKNKNEFVKGKICIGTKSRLSVPSNKEHHYRNLRDRYTNCTYVDGNLELTWLPNENLDLSFLDNIREVTGYILISHVDVKKVVFPKLQIIRGRTLFSLSVEEEKYALFVTYSKMYTLEIPDLRDVLNGQVGFHNNYNLCHMRTIQWSEIVSNGTDAYYNYDFTAPERECPKCHESCTHGCWGEGPKNCQKFSKLTCSPQCAGGRCYGPKPRECCHLFCAGGCTGPTQKDCIACKNFFDEGVCKEECPPMRKYNPTTYVLETNPEGKYAYGATCVKECPGHLLRDNGACVRSCPQDKMDKGGECVPCNGPCPKTCPGVTVLHAGNIDSFRNCTVIDGNIRILDQTFSGFQDVYANYTMGPRYIPLDPERLEVFSTVKEITGYLNIEGTHPQFRNLSYFRNLETIHGRQLMESMFAALAIVKSSLYSLEMRNLKQISSGSVVIQHNRDLCYVSNIRWPAIQKEPEQKVWVNENLRADLCEKNGTICSDQCNEDGCWGAGTDQCLTCKNFNFNGTCIADCGYISNAYKFDNRTCKICHPECRTCNGAGADHCQECVHVRDGQHCVSECPKNKYNDRGVCRECHATCDGCTGPKDTIGIGACTTCNLAIINNDATVKRCLLKDDKCPDGYFWEYVHPQEQGSLKPLAGRAVCRKCHPLCELCTNYGYHEQVCSKCTHYKRREQCETECPADHYTDEEQRECFQCHPECNGCTGPGADDCKSCRNFKLFDANETGPYVNSTMFNCTSKCPLEMRHVNYQYTAIGPYCAASPPRSSKITANLDVNMIFIITGAVLVPTICILCVVTYICRQKQKAKKETVKMTMALSGCEDSEPLRPSNIGANLCKLRIVKDAELRKGGVLGMGAFGRVYKGVWVPEGENVKIPVAIKELLKSTGAESSEEFLREAYIMASVEHVNLLKLLAVCMSSQMMLITQLMPLGCLLDYVRNNRDKIGSKALLNWSTQIAKGMSYLEEKRLVHRDLAARNVLVQTPSLVKITDFGLAKLLSSDSNEYKAAGGKMPIKWLALECIRNRVFTSKSDVWAFGVTIWELLTFGQRPHENIPAKDIPDLIEVGLKLEQPEICSLDIYCTLLSCWHLDAAMRPTFKQLTTVFAEFARDPGRYLAIPGDKFTRLPAYTSQDEKDLIRKLAPTTDGSEAIAEPDDYLQPKAAPGPSHRTDCTDEIPKLNRYCKDPSNKNSSTGDDETDSSAREVGVGNLRLDLPVDEDDYLMPTCQPGPNNNNNINNPNQNNMAAVGVAAGYMDLIGVPVSVDNPEYLLNAQTLGVGESPIPTQTIGIPVMGVPGTMEVKVPMPGSEPTSSDHEYYNDTQRELQPLHRNRNTETRV

SEQ ID NO: 21376 - DNA, 4860 bp, DROSOPHILA
gcaggcttatgcctgcggtcgcttcgattgcatcagatgaggtgcgaatcccaatcggaagctaaattagtgctaaaaaaaaaataataattaaattgaaaatcagttgatcagcgatcacatggctttgggttttctagcctataaacaagtggcctgcatgtaatatatatcaactggtggctataattagcacaagtgattagttggcgactgaagttgaatttgtttattgtttacgatccctcatttaatcgtgcgatcgagagcggatcgatcaaccctcgccgattgtgctctactggggggcttggaatttagcgtacattcgcgatagcacagcccatttaagctgcaaaaggaaaacataatttaatctgttattgtttacgccgaaatggaaaacacttctaaaatgcgtcattgaacgcattttcccgataagcaacaaagtgtcaacatgaaagttggatggattatgtaaaagcttaggcaagacaagaagatttttcgctgactctgtctccaaggggggcccttaaatataaattattaaactttgaacttgaaatgcatgtgctagcgcatcgagctgataaggaaatcgatgtcggactcgtttaaaaaggcgcatatgatttgctgatttgagatcaatgccaaagtgagatgcgtgattttgaagactagacagacataatgcggtcattgaatcggaatgatgttgatcaaagccaaaacgtgagaaaggaatcacagtgtttatttttggtataactggcataaatcggcggcggtatcaaattttgtgcccgacatgcgtttctcgatgcggttgtggaaccaccggaatcttcccgatcccgctccgcccgccgagattgcattcccagctcaactgataaccacgacgagtatatcagctaccagccatatatgtacgatgatcggaggtttaattaggcgcggctgtaacatgaacattcataattccgctggcattcaatcaatgcagacgtgaacaattccagtagtgaccgagtgttcgacttagccagcgatctcgtgcaaagtgtacagtgtctcaatcgtagtcaataccaattctcaaccaagaaaatcgatactcaaaacatacgtagaaatagaagttactaaaatccaagcatatgatggcgcaaagtgattctggaaattgctgtgccaagcttaataaaggtaagaattcataaatatttaatagtgattgtgcacagttaaatctgcaatctgcaacagatgagtgctgccagaagacaaaggatgtgatcttgagcggcgtatctcccaaaatgtttcccgacaaaatctacaagtctgttcaacccaaaggagaggatgccaccggaatgacctgcgaatgcggtgtttttgcagccatcgcttgcggggattacccaacacaagtaagaacaaaatatttttttttttaatgtaatatgtaatataggacagataggacatatagtatagaaaaacacaaaggtaaaaatttgggtttaagaaaaaatgtttaaagcaaaattaaacttaaatataatacttggaaaattccggaaaaatatgtgtagcagattacaatcaattgttaatatataataaatattactaggacatagtagatagccaccatgaaatgccgatcataactatatcaatatctcgaagtcattggggctgtcacaagcccatcatcacccgtttagcaagatcctatggacgaccatgtagtacgtcagacgtatgccaatcaatggttagtgggtcaatggttagccccgttcagatacaccccctgctgatcttctaacgatgtccatctatctgtggccaatgcccagtggctgcggtgacgtcagtgagatcgaactgaatcgcatggatttggtttgccgtgcggttgtaatctctgttgttcatgtttttattgctcgactgtaatgaaatggaaaataacagaaagtactggtgtattcacggtcggaaatcggcatacagttatctgttttgctagtcaactgattggaattagcattactaaactatcttatatgttgggctaggtatgcagaaaaaaaagtattaagttgctttgatctgatgtgatttgattcaagaaaatgctgaataactaagcttaaaataacaattcttaatactgagtttggaaaatgatacgccatatcgatgcacagcaccccctggtctttattattcaatattcacgtttattattatattgtaaaaaaaataaggaaaataaagtactaaatgggatttttctgctttcagctggacatagcacagatgatctgcctcggtctggtggctctgcagcatcgtggccaggagtcggcgggaatagtgaccagtttgggcaagtcctccaagaatttcagcgtacacaagggcatgggcatgatcaacaatctgttcaatgacgaggcgatcaggaagttaaagggtaacctgggaataggacacacccggtattccacggccgcagcctcggaagttgtgaactgccagccgtttgtggtgcacactgcccatggagcactggccattgcccacaatggtgagctagtgaactgcgagtccctgaggagggaggtcctggagcgaggagtgggcctgtctacgcacagtgacagtgaacttattgcccaatccctgtgctgtgcaccagaggatgtgtcggagcacgatggacccaattggccggccagaattcgccatttcatgaccctggctccactctcctactccctggtcgtgatgcacaaggataagatctacgctgtccgcgattcctatggcaatagaccgctgtgcttgggaaaaatcgtgcccgttgatgcaggacatgcgaatatcaatgaccaactggccgagggttgggtggtcagtagtgaaagctgcggattcctctccatcggagccagatatgttcgcgaggtggagcccggtgagatcatcgagctgtcacgaaatggttatagaaccgtggatatcgttgaaagaccggactataagcgcatggcattctgcatctttgagtacgtctactttgcccgcagtgattccatgttcgagggtcagatggtttactcagcccgcctgcaatgtggtcgccagttggccagggaatcgccattagatgcggatttggtcagctcggttccggaatcgggcacagcagctgcccatggttatgccagggagtcgggactgccattcggggaagttctctgcaagaatcgctatgtgggccgcacgttcatccaaccctcgacgagattgcgacagttgggcgtggccaaaaagtttggtgccctggctcaaaatgtcgagggcaagcggatcgtgctagtcgatgactccatagtgaggggaaataccattggaccgattatcaaactcctgcgagatgccggcgccaccgaggtgcacattcgcattgccagtcctccgctgcaatatccctgctacatgggtatcaatatacccactcgtgaggagctaatagccaacaaattgaatgcggatcagctggcggatcacgtgggtgcggatagtctggcctatttgagtgtggagggtctggtcaaggccgtccagatgaacaaggcccatgtgaatccactcaaagctggctactgcaccgcttgcctaacgggcgagtatcctggcggattgccggaggagctcagctggtagaatctctcagcaattattaatttcataggattaaggtagttcttagcttcagcttgtatataaataaatatatttaaaatttcgggtctttgacctatcacaaaaaatgttgtttttaattaagcaatatagaggtttttgtttcgagataaggaataataagtaggacatatatttgaacgcttcaaacattctggaaaataacaaacacaagcagttacatatattatatataaaatacatatatatattaaaatatcttaaagaagacataattttaacatttttttgttaccacctttaacttatttactagttataaccatttaaaatttttttatttatttcctcactttatttgactttctcgcaggcaaggaacacatactctaaatgctaatgggccacatcaacgtctgattattttcaaaactgtctaatgccataacttcaattcatttcaatttatatttccaagctctgtgtgccgagggattcaggggcagtggaggaagtagagtcgcccgcttccggttatagccgcgctcagatatagccccatatcatacaatatggtaatcgtgtttgcttttttcgccccgtctctttccggctatgtcctgccgcccacccacatccttgtgttccgctctctttcttgcggagtctccccagttggggcgttgcaatgtctaaagcggggcgttaagggcgtttaatcctgcggaagatgtccttgcggttatgcagaggggtatccgtatcctctctcatcgtatacaacttttttctttctttctttcttttatgactcgcgccgggtactggagtcaacaatgtcatcattattcttgaatattgtgttgtattttcgcaaacaatttcgctaagctgcgcggcattggcaaagccggaatgggggtgggggtgaaaaatttgggggtgggaatgggtctgggtgggaaagtgggagtgggtttccctacgctgaagtgtggcgaggacataagagaagaaaataatactgcactgtcattgtaactcgcttgattaattcttgtgaagggtatatactgcaagcagttcaggttttggcaaatg

SEQ ID NO: 21377 - DNA, 1914 bp, DROSOPHILA
attcaatcaatgcagacgtgaacaattccagtagtgaccgagtgttcgacttagccagcgatctcgtgcaaagtgtacagtgtctcaatcgtagtcaataccaattctcaaccaagaaaatcgatactcaaaacatacgtagaaatagaagttactaaaatccaagcatatgatggcgcaaagtgattctggaaattgctgtgccaagcttaataaagatgagtgctgccagaagacaaaggatgtgatcttgagcggcgtatctcccaaaatgtttcccgacaaaatctacaagtctgttcaacccaaaggagaggatgccaccggaatgacctgcgaatgcggtgtttttgcagccatcgcttgcggggattacccaacacaactggacatagcacagatgatctgcctcggtctggtggctctgcagcatcgtggccaggagtcggcgggaatagtgaccagtttgggcaagtcctccaagaatttcagcgtacacaagggcatgggcatgatcaacaatctgttcaatgacgaggcgatcaggaagttaaagggtaacctgggaataggacacacccggtattccacggccgcagcctcggaagttgtgaactgccagccgtttgtggtgcacactgcccatggagcactggccattgcccacaatggtgagctagtgaactgcgagtccctgaggagggaggtcctggagcgaggagtgggcctgtctacgcacagtgacagtgaacttattgcccaatccctgtgctgtgcaccagaggatgtgtcggagcacgatggacccaattggccggccagaattcgccatttcatgaccctggctccactctcctactccctggtcgtgatgcacaaggataagatctacgctgtccgcgattcctatggcaatagaccgctgtgcttgggaaaaatcgtgcccgttgatgcaggacatgcgaatatcaatgaccaactggccgagggttgggtggtcagtagtgaaagctgcggattcctctccatcggagccagatatgttcgcgaggtggagcccggtgagatcatcgagctgtcacgaaatggttatagaaccgtggatatcgttgaaagaccggactataagcgcatggcattctgcatctttgagtacgtctactttgcccgcagtgattccatgttcgagggtcagatggtttactcagcccgcctgcaatgtggtcgccagttggccagggaatcgccattagatgcggatttggtcagctcggttccggaatcgggcacagcagctgcccatggttatgccagggagtcgggactgccattcggggaagttctctgcaagaatcgctatgtgggccgcacgttcatccaaccctcgacgagattgcgacagttgggcgtggccaaaaagtttggtgccctggctcaaaatgtcgagggcaagcggatcgtgctagtcgatgactccatagtgaggggaaataccattggaccgattatcaaactcctgcgagatgccggcgccaccgaggtgcacattcgcattgccagtcctccgctgcaatatccctgctacatgggtatcaatatacccactcgtgaggagctaatagccaacaaattgaatgcggatcagctggcggatcacgtgggtgcggatagtctggcctatttgagtgtggagggtctggtcaaggccgtccagatgaacaaggcccatgtgaatccactcaaagctggctactgcaccgcttgcctaacgggcgagtatcctggcggattgccggaggagctcagctggtagaatctctcagcaattattaatttcataggattaaggtagttcttagcttcagcttgtatataaataaatatatttaaaatttcgggtctttgacctatcac

SEQ ID NO: 21378 - protein, 470 aa, DROSOPHILA
MICLGLVALQHRGQESAGIVTSLGKSSKNFSVHKGMGMINNLFNDEAIRKLKGNLGIGHTRYSTAAASEVVNCQPFVVHTAHGALAIAHNGELVNCESLRREVLERGVGLSTHSDSELIAQSLCCAPEDVSEHDGPNWPARIRHFMTLAPLSYSLVVMHKDKIYAVRDSYGNRPLCLGKIVPVDAGHANINDQLAEGWVVSSESCGFLSIGARYVREVEPGEIIELSRNGYRTVDIVERPDYKRMAFCIFEYVYFARSDSMFEGQMVYSARLQCGRQLARESPLDADLVSSVPESGTAAAHGYARESGLPFGEVLCKNRYVGRTFIQPSTRLRQLGVAKKFGALAQNVEGKRIVLVDDSIVRGNTIGPIIKLLRDAGATEVHIRIASPPLQYPCYMGINIPTREELIANKLNADQLADHVGADSLAYLSVEGLVKAVQMNKAHVNPLKAGYCTACLTGEYPGGLPEELSW

SEQ ID NO: 21379 - DNA, 6171 bp, DROSOPHILA
ttagtacatcaattctgaactgtatatgttcaaattaggataagaataccgtgctttaggtcagccaacgaatttaatcatatagaagtatgattgagtgaaagaaaattaccttttttaacaacaggctttaccaaaagcttttggacttctgatacattcttaccaattcctgttacaataatctttcatctattcactgacctttcttcattgccagtaaaaaagagtgactccttggagtgccaagaaatctacttaattatgcttagttccctgttgaattccgcttatcaggcagtccaagcaattgaccttggccattgacaatacctaggaggtgttccaagtaatagagagccacccacctcctttttcaatgtcaggcagggaaatgcgtgaagtcatctccgacaatgtgaaaggaaatgtggacaccatcgaaacaaattcaaggtccctccgccgggcgaaacctttaattggagaccccaacgaaactacttggatggaaaagaaaaagctcttatgcaaagtagaattcctgggaacgtggatttggccatgccaatgccaccgactgttaacagttcgcattattattgcaacacctgcccatcatgtgcctcaaactgcgaagcaagcgatacactcagaaaaaaatttgaaaaatatgtgtatatagtatagaaacttacattgtggcacgcacgcgaagtattgttatttaaacttatgaaacagcaacatgaatagtttaaatatgcaattttctatataaaccaattgcagcactttaaggatatttttactaaaaatgtcctttgaagtaacagctcaattcctggaaagctttagtcgtgggcagtaggagactatatgttccacatatttttccaactgcacgacgactgctgaccacgggccgaatccaaagtcgaaaccgggtccgagcgcgagttccacgagtcctgcgagtcctttggtcatttggcgtttgccattcgagccgtgcggtacgtgttccgcgacaaaatcaaacaatcaaccaacgaacgcaacacctgagcggcgcacaaaagggaaaaatataggaaaagtattgattaagtttttcggtgcggcgggtgagagaaccgtgtggtggctatttataatgaacgaggtgaccggcggccgggagcagggataaccgagacggtagcggagaccatgccagagacggagcagcagcagcacccagcacactcacatcctgaacttaagccagatccacagccagtgccagaactggagcacctcaccgacaatagaccgaatcgcgtgcagaacttctccttcgccagcagctatccctacgcaccaggacgcgtctcgtccagctccaattcgaacaccaactacagctccaccaactacaacgccggcggcttcaacgtccagcgctatcagagtccctacaatttccagcacgtggtgaccaacgcattctcggtgctgcgccatcagccctccgaggagcccgaattcgattcctatccaacgcgaccccaacaggccatcgtgcgtccgattagacgtgaggcgggcatagctgataaccgtgataatcatgtagggaatcctccacagcgatcgcacttctcgcgcagcaaccaggaggtgcgcagcttcgccgatgagctgagccagaagctgcgcttcctggcgccggaggagcagaactacggcggtcgccagagcgccaattccggtgcctggatggatccagcgatgtcgcagcgaccacgattcgagaccacagtgccgcagggcatcttcctgccgcctccgcatgaggtccaaatgataccggccaccatgctgaggaggcatgtctacgcctactcctcatatcccatgatcctccaagggtatctcaccaaggagaccggcagtgagagcaaggagcagaaggtgaccgccacccggctgaacggtttgcgtgccacggcggcagtggcggcggccacagctgcggcctccaaatcctcccgtaacgatacgcaatccctcgccggtggactccacatcaccaaggctcagttccaacaacaactgcaacagcgtcgctccaccagcaacaacaacaacaacagcagcagcaacatcagcgacaagaggtaataaaaagaccaacccccaaaatggtatgggtgctaaacttggaagtaaaaaaaaaaaaggtgggaagtggaaaaggtccgacaactgaccaaggcaaagtgggccaaaatatattaccataaattcaaatgagtaatacgtacgtacctacactgccattctgcaatggaaccagaacttagctccccacttcagttcctacggccattatcgattgacacccaaacaattcaattacaaataggttttgtggtttaaagtgccgaattgaatccttcaaggatttgttatctaaactgatatagattcaagatgataccttattgatctgtttttagactttactatgacacgcaaatagaatggaaggctcttcatcagccaagtttcttgtgtggctcacccactttcacaattaactctttaacaattcaattagaaatgcttttccaataacattcggacattgtaaattccctgaacggtttgattaatttatttagcgcattctcgaatgggaaaactcgtttgccttgcataaaagaacatgcgaacaaatggacaaatggacaaagggacaaaggaccctcgaatgtgtcgtgccagcggagaatattctatattcccagctcggggcttaaataatttaaatcaagatttcgtaaacaacaacaatatgtacccattgtaccaaagcacaaatggagggatattaagttcaattaccacaccagagaagaaggacacctatggcacaataataaaaaaaaaaaaaaaaacaaaaaacaggtcctgccggtcgtttttacccaaatgggatgttgttcggccaaatgggctatactttttgggttacgaaaaatgaaatatcacactcaacgtttaaataaagaacctattagggagataactattttataactcaaaaaggattcaccaacttagattttcgttcagaccatatatccctcataaggacatcgcactaagggtttcccgttccatttgctgatgtctgtggtgcgcagacccagacccagagaaatgttgttagacattcgccagcaacttcaatgtgacttcctgtttgtgggccaaaagtagctgcgaatttgcataggtcacgagttcaggtgccaagttcttctagtgcaatgtctaactacgttatatactacttctactcgcagtcagcatgtatgtatcagcatatatgtagaaatgtaagaaatgtttgtttccccatttacttgccggtgctatacatataaattagcaagtcataaattactcagccaccgcggactggactcgtggaactttaagcaggctttaaactctgacccaaaagtgtactgaactttggcgaaattgattcgaatcggagatgacctgacaagcagtctgcgagggcgttgggaaatgaacaaatttgatgtttatcgccttgatagtgcaacagatttgggtcttggcaaatgcagcaaagtgcactgaaactgcagcaaatcaaaactaaataaataaaatatttaaactttaatagaaagaagttaacaaatctaaagataactaaaactcatacacttttaacttgcttttccagcagcaattacaatatttatccatacatagatatcatatttattagagaacttaaccatttatgtagtaatccttttaagttgcacatttacgaaccttttcaaaaagtctgcagcttttttgctgcatgagcagtttgttgaactgggtcgaggcttactaattggtggctcccacctgggcaactccatgcccgcttctccactttgctcctcttgcagacccgtcgtcccgccgccggaaccctacaagaacgtcatgtacgaccgtcgcgtcataaagggcagcaacttcggcaacgcctctctggtggtaagtcccatcagttcagctcagcttagctcagtgctctggcagccctgacctacgactaatccactttttgcttcctctccagacggatgtggatcccttcgacaaggccgccgaattgaggcgtcgcaatatgttgcgcaaacggacgatgcagtgccgcaatcagagaaatgtcctgggcacaccgccgccggtcaaggggcggaagcacgagaccatacagacggagaagtatctggagaagttggtgcagcgtccgccggagttcaccatcgacacgcagacggacctgttcctcgagaagccgccgacgcctccgttcataccggccaaggtgggcgtggatgtggccaccgagatcggtgagggcgaactcttccacttcgatgccgaggcgcagccaatcatcgatgtcctggtggacgcctgcattgaacaaagcatgctggaggtggctcacgagatggaactgtccagtctgcgacgcaaacaggaagagtacgtataaaaagtgtaaagtaaatcttcagattactataatggcgttttgtgttacccacagattcctggcccagagggaggcggaactggccgagctgcgccgtttggaggctgaggagctgcgcttgcaggcggagaaggagcgtcgcctgcgacaagatgcgattgccaaggagctggacgctgagatgcagaagagcgtgacggcggccaagttgctccagggacacattgccagtctggtgccggaggtgctggagaacattgagccggccagcgatgccgttaagaaggagcagcttatgaagagcgtctgcccgtggttgtccgccgaggtggccgaggaagtgggccatatagtggactcgcgcgagattctcaccgccatcattcaggagattatcaagcagcgtgccgagatctatgccggctacaaggaacctgaatcggaaccatccggaccggatgcgggcgtttgtgaggaggagggctgtgccatcgatgagatggaggcgtgtccctgcgaatcggaaacggaaatggaggagtgccccgaaccgccaccaccggctcctcatctctaagtgattgcgttcgagttttagttcatatatatatttcgagtgggatactgattccgcacacatgtaacactaacacactcctgctattaaatcaaggttggctgcaactttgtggttgtgtctggtgaagaactcaattcgccgcaggattcgaatcgagcctgggcgccaaacacaattgcatagcggcggcggcgaaatggcatcgaaaaaatggaatggcatattgtaaactggatacttgttaaaggtttttgtgttaccgaaaattcaaccaataaagctcaacaaaataagccgaacaaaacattttagaaaatattttaaacggttgttaaattaaattaaaatattaatagagccaagcaatttgaaatttcaatgttaccttggtatttaaggggtctgcatgtacggtcacactgcacgtgacgtcacattgttttttccataccgaattaatgaatcaccactgaccgaatttccttgttttcacaactaattcggaagtccagggtgtagtgaagatgttttccagcggccccaattacaacaaactgaagaccaatcttcgattggctctcaatcgcctgaaattgctggagaagaagaaggcggagctgacgcaaaagtccaggaaggaaatagccgactatttggccacgggcaaaacggaaagggcgaggattcgcgtggagcacatcattaggtgggtgcaggaatatatgagccattcttatacctccatatatcgtatatatcgtacatcatagggaggactacttggtggaggcaatggaaatggtggagatgtactgcgacctgttgctcgccagattcggcctcatcacccagatgaaggagctggacacagggatcgctgagccggtggccagcttggtttgggtgtgtccccgcctacagagcgatatagccgagctgaagatcatatcggacatatttgtgaccaaatacggtccacagttcgccgagcaatcga

SEQ ID NO: 21380 - DNA, 2192 bp, DROSOPHILA
ccattcgagccgtgcggtacgtgttccgcgacaaaatcaaacaatcaaccaacgaacgcaacacctgagcggcgcacaaaagggaaaaatataggaaaagtattgattaagtttttcggtgcggcgggtgagagaaccgtgtggtggctatttataatgaacgaggtgaccggcggccgggagcagggataaccgagacggtagcggagaccatgccagagacggagcagcagcagcacccagcacactcacatcctgaacttaagccagatccacagccagtgccagaactggagcacctcaccgacaatagaccgaatcgcgtgcagaacttctccttcgccagcagctatccctacgcaccaggacgcgtctcgtccagctccaattcgaacaccaactacagctccaccaactacaacgccggcggcttcaacgtccagcgctatcagagtccctacaatttccagcacgtggtgaccaacgcattctcggtgctgcgccatcagccctccgaggagcccgaattcgattcctatccaacgcgaccccaacaggccatcgtgcgtccgattagacgtgaggcgggcatagctgataaccgtgataatcatgtagggaatcctccacagcgatcgcacttctcgcgcagcaaccaggaggtgcgcagcttcgccgatgagctgagccagaagctgcgcttcctggcgccggaggagcagaactacggcggtcgccagagcgccaattccggtgcctggatggatccagcgatgtcgcagcgaccacgattcgagaccacagtgccgcagggcatcttcctgccgcctccgcatgaggtccaaatgataccggccaccatgctgaggaggcatgtctacgcctactcctcatatcccatgatcctccaagggtatctcaccaaggagaccggcagtgagagcaaggagcagaaggtgaccgccacccggctgaacggtttgcgtgccacggcggcagtggcggcggccacagctgcggcctccaaatcctcccgtaacgatacgcaatccctcgccggtggactccacatcaccaaggctcagttccaacaacaactgcaacagcgtcgctccaccagcaacaacaacaacaacagcagcagcaacatcagcgacaagagacccgtcgtcccgccgccggaaccctacaagaacgtcatgtacgaccgtcgcgtcataaagggcagcaacttcggcaacgcctctctggtgacggatgtggatcccttcgacaaggccgccgaattgaggcgtcgcaatatgttgcgcaaacggacgatgcagtgccgcaatcagagaaatgtcctgggcacaccgccgccggtcaaggggcggaagcacgagaccatacagacggagaagtatctggagaagttggtgcagcgtccgccggagttcaccatcgacacgcagacggacctgttcctcgagaagccgccgacgcctccgttcataccggccaaggtgggcgtggatgtggccaccgagatcggtgagggcgaactcttccacttcgatgccgaggcgcagccaatcatcgatgtcctggtggacgcctgcattgaacaaagcatgctggaggtggctcacgagatggaactgtccagtctgcgacgcaaacaggaagaattcctggcccagagggaggcggaactggccgagctgcgccgtttggaggctgaggagctgcgcttgcaggcggagaaggagcgtcgcctgcgacaagatgcgattgccaaggagctggacgctgagatgcagaagagcgtgacggcggccaagttgctccagggacacattgccagtctggtgccggaggtgctggagaacattgagccggccagcgatgccgttaagaaggagcagcttatgaagagcgtctgcccgtggttgtccgccgaggtggccgaggaagtgggccatatagtggactcgcgcgagattctcaccgccatcattcaggagattatcaagcagcgtgccgagatctatgccggctacaaggaacctgaatcggaaccatccggaccggatgcgggcgtttgtgaggaggagggctgtgccatcgatgagatggaggcgtgtccctgcgaatcggaaacggaaatggaggagtgccccgaaccgccaccaccggctcctcatctctaa

SEQ ID NO: 21381 - protein, 659 aa, DROSOPHILA
MPETEQQQHPAHSHPELKPDPQPVPELEHLTDNRPNRVQNFSFASSYPYAPGRVSSSSNSNTNYSSTNYNAGGFNVQRYQSPYNFQHVVTNAFSVLRHQPSEEPEFDSYPTRPQQAIVRPIRREAGIADNRDNHVGNPPQRSHFSRSNQEVRSFADELSQKLRFLAPEEQNYGGRQSANSGAWMDPAMSQRPRFETTVPQGIFLPPPHEVQMIPATMLRRHVYAYSSYPMILQGYLTKETGSESKEQKVTATRLNGLRATAAVAAATAAASKSSRNDTQSLAGGLHITKAQFQQQLQQRRSTSNNNNNSSSNISDKRPVVPPPEPYKNVMYDRRVIKGSNFGNASLVTDVDPFDKAAELRRRNMLRKRTMQCRNQRNVLGTPPPVKGRKHETIQTEKYLEKLVQRPPEFTIDTQTDLFLEKPPTPPFIPAKVGVDVATEIGEGELFHFDAEAQPIIDVLVDACIEQSMLEVAHEMELSSLRRKQEEFLAQREAELAELRRLEAEELRLQAEKERRLRQDAIAKELDAEMQKSVTAAKLLQGHIASLVPEVLENIEPASDAVKKEQLMKSVCPWLSAEVAEEVGHIVDSREILTAIIQEIIKQRAEIYAGYKEPESEPSGPDAGVCEEEGCAIDEMEACPCESETEMEECPEPPPPAPHL

SEQ ID NO: 21382 - DNA, 7885 bp, DROSOPHILA
agggtgtactcttgttgctctccgcatcctcgccagcttcaagtggggtcgtgtcggagggggccggcgtgggtgggacggggggtctgtgggtaggggtactcaatggtgcattctccttgttgttgtttcgtagcttgtccatgatacacacacacaattgctgaagcggggcgatcgcagcgcagtcgctccgcccgtttagtgtcttgtcctcactcgatcggcattataactatctcgcccgcacagttagcacttccgaattggacgcaaatcatggggaaaagagcgttttcttttcacaacattttcagagctaaagcatggagggctaccagaccgcgtatgtaatcgatccggcaatgccttcattgcttaccgtgctgccaggccgcagactaactgcaccaagacctggcaacgttgtacctaatttaaccgcatttttcaagtgtcttttaaaataaaaagaaagaataggttaacagatctagtgtttacatcaaggagttgcagaatttgtaatgcagatgttgtacacgggcgatagttaattcaatcgatcaactgagatggtatcagacaattatattttgcatgcatccagaaaaattgttgtaaaagatcacagacttagttctaaatagtatttcaacctacctgtatttttgtttatgaaatcactacaaagttgtgaacaatttagaagcaacaacgtagtgttcctattaccaccgttccgtttacctcacagttgcacgttgctctttggcacgcttttatctgtgcatttgcttggaaataattaattgagttaggcatttaaatccttttgtgtactttagacttatttaaagaccttttagattggtttaatttgccgaaagacgaaaacaaacaaatttgtgcgacagctgacttcattatttcaacgacaatagcaaaaggccacactaattttgcgaaaagcgcgtggtatttaataccttatttatttgctttatttcgccattagaagtaagtttcgctgtgtcgaaaatctagcaaagaaagccactggatcaagacctagtgcatccaaaacccagtaattcatttcgatgtctgagggcagcggaagcgagaatgcggccgcagcagaggctgcggccgaggcagaggccgcgactgaagcggcactgatggctgaagctgtggctgtggcctaccagagcgacgaggaggagcagccagaagccgaggatatgccggagcaggctggcgataaccaggaagaggacgccgctgaacaacaggatgggggggaaccagaggccgacgaagacgctgatgctgacgacgccatgagcgtggaaaatgcggaaaacgaaagcgatagcggtggaaacgccgaggaaaccgctgccgccgaccgtcgccaagccaccaagaaggagctcacccagattatcgacaagtgggagcaacagcagacccaaaatggatacgatccagtgcccactctcaggaggtaagcgtgcttcaaaatcattaacgcatgggtccaacttaatacctttactatcgcagccttgcggagatctttgagcgtgagaaggacgtgtatcggcgcaaggatccggatcccttggactcacgacatccatatagagccgatcccagctgccagtacggattgctactcaagctgctctttcggaaggataccttcatgggcaaagtaagaataaagtcatgtgatttttatttttctaaaaagcaatgtaaatgttttcttaaaatcaggtgttttagaatttccaaaacataagctaactaaagtgaaatattttatttaactagctcctcaacgattacctgcgagagaactatttcagtcgccagaatgtcagtcgcagttctctagaactaaacatcttggcctgccgcctcattctggagataatgccaggaatggagacctctgcagtatttcagaccgccgaaggcgatggaaccatcaatcgcatctactcttgggcagaggacagcattgaaccgcttcagagctatgccaccgggcttttagccgaagcgatggaagtgagcgacatagccataaactttcgcgatcttaatattcgattggtgccaaagatgatcaagcgtctgcacatgctcctggcgatcagcaagagcgccacttcagatgtcaatacgtcgatgcacaatctgtcggctgacagcagcacggcgggcatgcttagctgggtggcctgcgccagtaatgcatcggctcctcaatcgccgcagcacaatggcagtgggctgggagcaagttcctcgcagcatggagacgcctctaatatgtccattctgttcgagaacagcagagatgccttttccgtatctcgctattacaaacggatgtacattcctttgcacccggccacagcagataccagccaaatgttaatcatgcgcttcctgaccagcctgggcgaatatcaagagttcctagccatggctttcgaaaacaatgtgatgcagctaatttttggctacctggagaacttggatcgccgggacacctgcttggcctacgaagttttgaagtatctggcttcccttctttgccacaagaagtttgctttagagttcatttcacacggtggactggaggtcagtaaatggtcttgtagagggaatgtaattatttttaactttactattttttacagcttttgttaaaagtgccccgccccagtttggcgactactggtgtgtccatcgccatctactacttagcatactgtgaagacgccatggaacgcatatgcagtatgcaaagaccacttatttcagaactagttcgctacgcgctttggattctgggtcgttgccacgactcctcaaagtgccatgccaccatgttcttcagtctgagcttccaatttaaggtcatattggatgagtttgatgctcaggatggtttaagaaagctgtacaatgtcgtaagtaaatggtttaaacgaaagaagttcgattaaagtcaattaccttaacttcttcctaatagatttccgtactaaaaattcttgatccgagccacaacgacagcgataatgactctgatttcaacgaagacgtagaatgtgcttcccgacaaatggtgcgccacgtctgcgtagccctcaagcgctatatggaggcgcacttcttctacaagtacaacagctttctgtgccaaacaaatgcggcatccccggcaccgtcatcagcccactatttcaatcagaatcccacggttgctgccaaactgacctttgaccaattgaacgaccagattcgcacgctccaggagcacacttctatccgggcgcactggcaacccgtggatcagctaatgaagcttggtggaatcaccatgctactcaggatcatcgccttcagttacgattgggtgaacagtggacgctccgagacggtgcgctcggctctggacgtgctcagcgtatgctgtattatcccaagagtttatgttgtgctctgcgagcgcctgctgatgctagacaagacaactacctccggattttgctcggttctgggcgctgctgcaggagagattagctcggatgcagaggttatcaaatcggcgttagcggtgctgtgccattgtgtttgctctccgatcattcgcaaggacagcggcaccagcctgattaagtttggaacgtcctccaggaagaacaaggccaaccataagtacgccgaagagctgattgaacgtgtgtgggagtccgtgtgctccaacaatggcattgtggtcttgctatcgctgatgcagaccaaaggacccattacggatgcggactgtatacgtggaatggcctgtagggccttggcgggacttgctcgctccgatcgggtcaggcagatcgtcagcaagcttccactctttgccagcggacaactccagacgctgatgcgggatcccatactccaggagaagcgcgcggaacatgtaatcttccaaaagtacgcattggagttgctagaacgagtgtcgggtaagacgaaaccgctaaataatcctttggatccatcgctgtccaacatgcacaaggccaatgtaatcgcccagacacgcatccagtataacaagcagcagctgtatcagcttatcttcgagcacctggaaagcaacggtctctcccagacagcccaaatgctgcaacgggaggtgggtcttccgctacagactcccactacgcgcagttttcatcaatcacctttcgactacaaaagtcttcccagtggtagtagctcgctgtctagaaatcgtctgcgaagccgcatgcaagatgtgaacgcagcgataatgggcaatggagacttaaacagaagttttggtgaggactcctcgccggcaggagccggtggtagcaatgcgggagatggagtcagcataccaaattttagctcccttaacacaacgcagacgcccataaaaataaggaggacggatagaagttcagttagccgctctatccagaagcaggcaatggagcctggtggcatgtcagttggtcttgccgaagatggtcaactgcatcccaagaggatcaccctaaataccatcgtaacggaatacctcaccaaccagcactcgctgtgcaataatccggtgacaacctgcccgcagtttgatttgtacgagccgcacaagtgtccagatccgaagcccagccgattgctaagctcgaactacaacctgactagtcggcatgctcgaacccaagccggatttaataccagtcgctttgaccgtcgctatgtgcacacgcacttttcaccatggcgtagcattcgatcggcggactacgaggacctagagttcacctgttgcgatttggcgggtaaatacatcattgtgggcacgcagcagggcgacggacgagtgttcaacatgaacgatggcgtggagcagttcttctccaactgtcacaactttagcgttgatgctattaaggctaatagagccggagacttggtcatcacatctagcttctggcgcacacccaccagcattctatggtctattgcggacgatgagttcaagctaaagttgcgacttcccgatgtcacgtactgtgagttcagtcaaacggtgcaggatcgtttgttgggcacccagaatgaggtatactaatttgagttattttacgatctatagcagtttcaactaataaattcacctttttttcacagtgcgccacgctctttgacataaacactggttccaaggtggcctcgtttacgccaaccatacctaatctctacaccaaaaacagagcaactctttgccgaaccgatgagctgattttgtcgggtaattacataaatgcatttataagtataaagttacctgaaatgtaactgaatcgaattcctagatggcgttctatgggatgtgcgttccggaaaggagatccacaagttcgacaagtttaatcagtgcatatcaggcgtcttccatcccaactgtctggaggtacagtcgaaatttgtgttgatttatttataccatgttaatatttccaacacaatttgtagatcattgccaataccgaggtgtgggacttgcgcacctttcatttgctgcagacagtgccggtgctagaccagcgtaactgcaccttctccccgatgcatgtaatctacggtgctagcttgggggctgatagggaccatgacatggagacgaccacctacgacaccagtttcaacgttctggacgcctacgactactcgagcattgcgaccattgacgttaaacgcaacataaacgatctgagcgtcagcgccaacgggagtctgatcgccgtggtcgaagactacagtggctacgagtccaaacaggagacctacgtgaagatctacgctgtgggcgttaaaaagagcgagcgctcggaagaggtgcgtgcggttaaggagctggccagcgaggtatcggacgcagtggcgccggggtcggcaaacgctaacgatggtggcgatgcttcgctgcttcgggttttcgaggagccacccgaggagcgcccacagccggcggaaaacgctgcacccgccggtcccaacgattttgaggaggatcagctacgccggctaagtcccgccacgcaagcaagtccaaatctttctcgccaacatgcacccaacagctcaattgttggggtgcgacggcgggcacgtagactgggtggcaatggcagcggcaatggcagtggcgggaatgggaatctgaatcttaatggtggtggcggagtcggaatcggcgctgccatagatctgagaaccctcatgcggcgcatggatgatattgaactaaatattatgtctatgcttgcaggaagatgatgaggaggtgcccgaatctgatgaggacggttcggatacgggctccgagaacagtaagtttgattttgattataatcatttaatccgttgctaaatctccttactccctagcttttgctataggtcaaaatttactgggtttccccctgcttcgtaaccttcatggctcggacaacgatgacgaagatctggatgaggacgacgatgatggagagccgctggactccgatgacgatagtgacgacgacgacggctccgacaatggcgacgacgatggcgactttgatgtgctggaatacttcgatagaagcagctcagacggtaactcaagatctttagactctgttcgtgtacgacttgtattttctcctcccctagattgagcccactcctcatccaaaccaacaacacacacaactgttccttcaccgatccactgctccgctccactgttcacccactgtttcgtctcgtctcgtttgaacctcttagttgtccgcagcgcgcatggaaggatgagcaagcaacagtcgtcgtagcataagcactctagatattaagctgttacattaaaatctaaattgttatttttgaattttgtacaaatcaaatacgaatgccgcaggattgcattaaagccagctaaagattattaaagagatcgcataatgagtaccaactgtaaaaatcaaatctataaattgtttaacaattttcattgtacaagcctgaataaaatttgtgtacttttgctataaaacaaaaataaacaattttattagaaaacaaggcttttttctgtgctatagaaacctagaaaaaatttccactttttgtataatgctaaggagcctattgtattagaaatctattacttggaagacttaattccagaatgtaaaatattaaatatttcgttttagaaattaatgctatcatatactgaatttatttataaacaatattatttcccttaataagtcttgcggtgctacataagccagtcagtggtgttgattcctgctgactttcttctgtcgcgagagcgatgttaagtggataccggatgcgggctattgaagatggtgatggtggataacacttgttgatggctggctctgtcccgtctccatgtcatcgcaactgtccagcgagcgggccttctccttggtttgaaaattgtttatgtctgctgtccagggtaaggcttgtaaaatgtttataactagagtgccgtcgatggtgagaaagatttatgtcgtattgatttgattaattcccaccttaggctttgaactcaaatgtgttgttattaatatctaatattatttccttaaataaaagtaaacgaaaactgattgatccaccctaatgcttacagaaatcataactaaccagtgttacacacacgttctattcggattgagtcaaatggtgccgattatcttatcgccaagtgtggactgcaagttgggaaaacgaa

SEQ ID NO: 21383 - DNA, 4804 bp, DROSOPHILA
gctttatttcgccattagaagtaagtttcgctgtgtcgaaaatctagcaaagaaagccactggatcaagacctagtgcatccaaaacccagtaattcatttcgatgtctgagggcagcggaagcgagaatgcggccgcagcagaggctgcggccgaggcagaggccgcgactgaagcggcactgatggctgaagctgtggctgtggcctaccagagcgacgaggaggagcagccagaagccgaggatatgccggagcaggctggcgataaccaggaagaggacgccgctgaacaacaggatgggggggaaccagaggccgacgaagacgctgatgctgacgacgccatgagcgtggaaaatgcggaaaacgaaagcgatagcggtggaaacgccgaggaaaccgctgccgccgaccgtcgccaagccaccaagaaggagctcacccagattatcgacaagtgggagcaacagcagacccaaaatggatacgatccagtgcccactctcaggagccttgcggagatctttgagcgtgagaaggacgtgtatcggcgcaaggatccggatcccttggactcacgacatccatatagagccgatcccagctgccagtacggattgctactcaagctgctctttcggaaggataccttcatgggcaaactcctcaacgattacctgcgagagaactatttcagtcgccagaatgtcagtcgcagttctctagaactaaacatcttggcctgccgcctcattctggagataatgccaggaatggagacctctgcagtatttcagaccgccgaaggcgatggaaccatcaatcgcatctactcttgggcagaggacagcattgaaccgcttcagagctatgccaccgggcttttagccgaagcgatggaagtgagcgacatagccataaactttcgcgatcttaatattcgattggtgccaaagatgatcaagcgtctgcacatgctcctggcgatcagcaagagcgccacttcagatgtcaatacgtcgatgcacaatctgtcggctgacagcagcacggcgggcatgcttagctgggtggcctgcgccagtaatgcatcggctcctcaatcgccgcagcacaatggcagtgggctgggagcaagttcctcgcagcatggagacgcctctaatatgtccattctgttcgagaacagcagagatgccttttccgtatctcgctattacaaacggatgtacattcctttgcacccggccacagcagataccagccaaatgttaatcatgcgcttcctgaccagcctgggcgaatatcaagagttcctagccatggctttcgaaaacaatgtgatgcagctaatttttggctacctggagaacttggatcgccgggacacctgcttggcctacgaagttttgaagtatctggcttcccttctttgccacaagaagtttgctttagagttcatttcacacggtggactggagcttttgttaaaagtgccccgccccagtttggcgactactggtgtgtccatcgccatctactacttagcatactgtgaagacgccatggaacgcatatgcagtatgcaaagaccacttatttcagaactagttcgctacgcgctttggattctgggtcgttgccacgactcctcaaagtgccatgccaccatgttcttcagtctgagcttccaatttaaggtcatattggatgagtttgatgctcaggatggtttaagaaagctgtacaatgtcatttccgtactaaaaattcttgatccgagccacaacgacagcgataatgactctgatttcaacgaagacgtagaatgtgcttcccgacaaatggtgcgccacgtctgcgtagccctcaagcgctatatggaggcgcacttcttctacaagtacaacagctttctgtgccaaacaaatgcggcatccccggcaccgtcatcagcccactatttcaatcagaatcccacggttgctgccaaactgacctttgaccaattgaacgaccagattcgcacgctccaggagcacacttctatccgggcgcactggcaacccgtggatcagctaatgaagcttggtggaatcaccatgctactcaggatcatcgccttcagttacgattgggtgaacagtggacgctccgagacggtgcgctcggctctggacgtgctcagcgtatgctgtattatcccaagagtttatgttgtgctctgcgagcgcctgctgatgctagacaagacaactacctccggattttgctcggttctgggcgctgctgcaggagagattagctcggatgcagaggttatcaaatcggcgttagcggtgctgtgccattgtgtttgctctccgatcattcgcaaggacagcggcaccagcctgattaagtttggaacgtcctccaggaagaacaaggccaaccataagtacgccgaagagctgattgaacgtgtgtgggagtccgtgtgctccaacaatggcattgtggtcttgctatcgctgatgcagaccaaaggacccattacggatgcggactgtatacgtggaatggcctgtagggccttggcgggacttgctcgctccgatcgggtcaggcagatcgtcagcaagcttccactctttgccagcggacaactccagacgctgatgcgggatcccatactccaggagaagcgcgcggaacatgtaatcttccaaaagtacgcattggagttgctagaacgagtgtcgggtaagacgaaaccgctaaataatcctttggatccatcgctgtccaacatgcacaaggccaatgtaatcgcccagacacgcatccagtataacaagcagcagctgtatcagcttatcttcgagcacctggaaagcaacggtctctcccagacagcccaaatgctgcaacgggaggtgggtcttccgctacagactcccactacgcgcagttttcatcaatcacctttcgactacaaaagtcttcccagtggtagtagctcgctgtctagaaatcgtctgcgaagccgcatgcaagatgtgaacgcagcgataatgggcaatggagacttaaacagaagttttggtgaggactcctcgccggcaggagccggtggtagcaatgcgggagatggagtcagcataccaaattttagctcccttaacacaacgcagacgcccataaaaataaggaggacggatagaagttcagttagccgctctatccagaagcaggcaatggagcctggtggcatgtcagttggtcttgccgaagatggtcaactgcatcccaagaggatcaccctaaataccatcgtaacggaatacctcaccaaccagcactcgctgtgcaataatccggtgacaacctgcccgcagtttgatttgtacgagccgcacaagtgtccagatccgaagcccagccgattgctaagctcgaactacaacctgactagtcggcatgctcgaacccaagccggatttaataccagtcgctttgaccgtcgctatgtgcacacgcacttttcaccatggcgtagcattcgatcggcggactacgaggacctagagttcacctgttgcgatttggcgggtaaatacatcattgtgggcacgcagcagggcgacggacgagtgttcaacatgaacgatggcgtggagcagttcttctccaactgtcacaactttagcgttgatgctattaaggctaatagagccggagacttggtcatcacatctagcttctggcgcacacccaccagcattctatggtctattgcggacgatgagttcaagctaaagttgcgacttcccgatgtcacgtactgtgagttcagtcaaacggtgcaggatcgtttgttgggcacccagaatgagtgcgccacgctctttgacataaacactggttccaaggtggcctcgtttacgccaaccatacctaatctctacaccaaaaacagagcaactctttgccgaaccgatgagctgattttgtcggatggcgttctatgggatgtgcgttccggaaaggagatccacaagttcgacaagtttaatcagtgcatatcaggcgtcttccatcccaactgtctggagatcattgccaataccgaggtgtgggacttgcgcacctttcatttgctgcagacagtgccggtgctagaccagcgtaactgcaccttctccccgatgcatgtaatctacggtgctagcttgggggctgatagggaccatgacatggagacgaccacctacgacaccagtttcaacgttctggacgcctacgactactcgagcattgcgaccattgacgttaaacgcaacataaacgatctgagcgtcagcgccaacgggagtctgatcgccgtggtcgaagactacagtggctacgagtccaaacaggagacctacgtgaagatctacgctgtgggcgttaaaaagagcgagcgctcggaagaggaagatgatgaggaggtgcccgaatctgatgaggacggttcggatacgggctccgagaacacttttgctataggtcaaaatttactgggtttccccctgcttcgtaaccttcatggctcggacaacgatgacgaagatctggatgaggacgacgatgatggagagccgctggactccgatgacgatagtgacgacgacgacggctccgacaatggcgacgacgatggcgactttgatattgagcccactcctcatccaaaccaacaacacacacaactgttccttcaccgatccactgctccgctccactgttcacccactgtttcgtctcgtctcgtttga

SEQ ID NO: 21384 - protein, 1566 aa, DROSOPHILA
MSEGSGSENAAAAEAAAEAEAATEAALMAEAVAVAYQSDEEEQPEAEDMPEQAGDNQEEDAAEQQDGGEPEADEDADADDAMSVENAENESDSGGNAEETAAADRRQATKKELTQIIDKWEQQQTQNGYDPVPTLRSLAEIFEREKDVYRRKDPDPLDSRHPYRADPSCQYGLLLKLLFRKDTFMGKLLNDYLRENYFSRQNVSRSSLELNILACRLILEIMPGMETSAVFQTAEGDGTINRIYSWAEDSIEPLQSYATGLLAEAMEVSDIAINFRDLNIRLVPKMIKRLHMLLAISKSATSDVNTSMHNLSADSSTAGMLSWVACASNASAPQSPQHNGSGLGASSSQHGDASNMSILFENSRDAFSVSRYYKRMYIPLHPATADTSQMLIMRFLTSLGEYQEFLAMAFENNVMQLIFGYLENLDRRDTCLAYEVLKYLASLLCHKKFALEFISHGGLELLLKVPRPSLATTGVSIAIYYLAYCEDAMERICSMQRPLISELVRYALWILGRCHDSSKCHATMFFSLSFQFKVILDEFDAQDGLRKLYNVISVLKILDPSHNDSDNDSDFNEDVECASRQMVRHVCVALKRYMEAHFFYKYNSFLCQTNAASPAPSSAHYFNQNPTVAAKLTFDQLNDQIRTLQEHTSIRAHWQPVDQLMKLGGITMLLRIIAFSYDWVNSGRSETVRSALDVLSVCCIIPRVYVVLCERLLMLDKTTTSGFCSVLGAAAGEISSDAEVIKSALAVLCHCVCSPIIRKDSGTSLIKFGTSSRKNKANHKYAEELIERVWESVCSNNGIVVLLSLMQTKGPITDADCIRGMACRALAGLARSDRVRQIVSKLPLFASGQLQTLMRDPILQEKRAEHVIFQKYALELLERVSGKTKPLNNPLDPSLSNMHKANVIAQTRIQYNKQQLYQLIFEHLESNGLSQTAQMLQREVGLPLQTPTTRSFHQSPFDYKSLPSGSSSLSRNRLRSRMQDVNAAIMGNGDLNRSFGEDSSPAGAGGSNAGDGVSIPNFSSLNTTQTPIKIRRTDRSSVSRSIQKQAMEPGGMSVGLAEDGQLHPKRITLNTIVTEYLTNQHSLCNNPVTTCPQFDLYEPHKCPDPKPSRLLSSNYNLTSRHARTQAGFNTSRFDRRYVHTHFSPWRSIRSADYEDLEFTCCDLAGKYIIVGTQQGDGRVFNMNDGVEQFFSNCHNFSVDAIKANRAGDLVITSSFWRTPTSILWSIADDEFKLKLRLPDVTYCEFSQTVQDRLLGTQNECATLFDINTGSKVASFTPTIPNLYTKNRATLCRTDELILSDGVLWDVRSGKEIHKFDKFNQCISGVFHPNCLEIIANTEVWDLRTFHLLQTVPVLDQRNCTFSPMHVIYGASLGADRDHDMETTTYDTSFNVLDAYDYSSIATIDVKRNINDLSVSANGSLIAVVEDYSGYESKQETYVKIYAVGVKKSERSEEEDDEEVPESDEDGSDTGSENTFAIGQNLLGFPLLRNLHGSDNDDEDLDEDDDDGEPLDSDDDSDDDDGSDNGDDDGDFDIEPTPHPNQQHTQLFLHRSTAPLHCSPTVSSRLV

SEQ ID NO: 21385 - DNA, 8821 bp, DROSOPHILA
tgccacttctcttggcagcgattcgattattattataattgcctgcacactaatttgagaacctctgatcccagccgccgtatcagcagcgaagattcccgaccccgtgtgttcacgtgccacacgcttgactagttccagcagaagccccaactcatgatcatcaacccactcctctattggcaattgttcacaattgaaagcgcgctctattaaatggttcacaggctgatttgattgcctttcaattacatatataccgtatccccttgccgattagtttgttggttggttgattgttaaacggatcagtcgcctacaaagtgattgatcttcacagtaatgcattcgtaatttgatacggcgccaaatgttattgatcctcgcacatcgactgacatttgtcaattgataaatgagctatgaggcgagctagacttcaaaacaatgataagaagtgtgttaagcatttgctggaatagagataagattcggtataaaagtgtctgattacactcaagaactatggaatagtcgtccccgccagccacttaatgtgtcgtcatcagaatcgcaaccggaacttatttgcattctacgcagtcgcgcgtctggtgttccgtggcggaaatgacattgaaccctcggcctgcgtgctgaatgcacttgctccgatccgatccgatgcgatgcgatgcgttgcgttgcggtgggagaacctgttttggggcagttgaattaacgaccccgtgatgattcaggccataatgcgatcaagtgtggcaggttatggcgattgcatatttaacccaatttgattttaaccatttttccctcttcacatttctctcattgcagattggacaaagcggcagcaggattaacggatttcctaagcagcgcgctcagcggaaaaagctccggggaaaagaaaagcgtacagcaatcgttaaactgtttcgcgcggcagggaatggtatatttcttgggggattggggcatgggagattctgacttgtcgtcatatcagcaacatgttccaaatatacaacagccgcgacgcatccatggacatgatctactcttgcaacagcagcagcagcagctcccacagcagcagcagcagcagcagcaacaacaacagcagcagcagcaagaatttgtggcacaaatctccagtagcctaagccaagtgcaagcgcagttgcagttcgccagtggatccagcttcctgcaacaaggctcatctccctcgccgtcccagcaacaacatggtcctgtcagcagcagcagcctcgtaactgccaatctccagcagctgtcggtgagcagcagcaacgccagcagcagcagtagcaacaacaacagcgccagtggctgcaacactcccaccaaaccacaaaagcagaaaccactgctgctcccagaagcagctgcttctactgccaccgctgtcggcaagtcgtccaagaacccacagctgagcaaggatcttctggacaatgaggatgaggtggcattgcacccgctctccaaccaggtgagtcccaaatcaaaccccaccaaacacagtcagctattttgaagtgtatttgagccctctggccgcctacatcttcctaatctcaatcagtagggcgctgtatagagattgacagaactcctcgagacccgcgtacgcgttcctctcgataaaggtcttgaccactgcccacacggacttgagaaactggatctcggcaaagaccaaaacgtccgtgtgctcttccacggtggccttcaggcagaagtgcatcaggacgacgaaggtgtccgcgtaggggatatctgcgttaacgctctgcacatcgatcgagtacagttggccgggttggctgcactcgcgcatggtctgtgtctcggtaattttggcagttttgggaccaacgttcgcctgaagtgccacagtcattgagacagtgcgctgattctggccgccggcatttcgcgcccagacgcccatattcagatcggtggacttgcgccgctcatggaagctctgcaggaacggcgaggcagagaagagcatgttgaacagtgcgtccacccgcaccatcagccgctcctgcagaagcttgcgcccctcgtgcgacgcactgcaccgggcggttaggtcctctggccttctgtaccctgcggccgtttttaattgtagtgttttcgatggagtacttattagtgtgctccggtggctcggagttttttttccgcgcttaccggatgtttgcggtatattttctctgctgaccagcgccgtaactgccaccgaattgcaacgcgtgctccgcggactcagcttgcgatgtgtccgtcttcgttcggtctgggtaaaatttgactgccttgtcgtcgtaggtggcttcttttttccggcggcagtcgaatcaggcttggttttatcatccctgcccgccgtcgaggcccgctggccgctccagaaaagccgttgttgtgtggcggctgccgttgccgagtcctgaaattcctcagagttcagcggactgcgtattatggccgggctcctgcagttcgaagtgctcctgctcattcgattgctattgctgctagacggcttgtccatcgccaaagtttttcggaatcggtggttcaaccgggcctgaatcgacttcatattctagccaacgttcttagtcatcttcaattaaaacattgtcaatgacaccataaaatcgaatcactcgaattttgtccgtaaggttaaaggaaactaagcccatgcccatattctcatgggtgcctagagttacccgacagttcgcttttgtgcctaagataaaagcaaagaagtgacgtaggaccgtaggacgataagatatcagcaatcagggttatggccacgcgccatttagcaggtttctcaacgaactaggttgtttggcatatatgtacattggattggagttatagaaatgtaccatcttaactgcattttaacctaggtatttgttaagtgctttagagggccataaacattccacttcaagctggtattattcagattagaactttccgcagaagtaaaacacaatgctgcctacgtgctttggtagctgttagattagtaacaatgttttagattagtaacaatgctaattctttgattttgtaacttttcgtattgcaggtcggaggacacactcgcctgttgctgctcaaccagtcgacggtgatcaagccgctgaacctgcgcgaattggacttctaccagaacattccgcaggacatactgaagtttgtgcccaagtacaaaggtaagataccgactgtttcatcatccgcatcccaaactgatcacacttttaaatgccaattatcgattctgtcgaagcgcttcatttgctctttcgtttcgaattaactaattcattcaatcgaacaaaaaaaaaaaaaaaaaaaaataaaaccaaagaaaaaagaaaaagaaaataattaaattcaacattctcaatcgcgccaagcatttgtcatgtgtcttgagttccgaaatcgccaattttttattgaatcgaacttttgtttttgaattaactcgcaacaaacaaaaatgattaagccaaacaaccaacaaatttgcgtttgctcctcttgtatcgtccctagatcaaaccaaatcgcattcgaatatcatttttatttttagtacttttctctatataactaaaaaatatgtgatatccttagtctgtaagttgaatattttaaatgaaaataaaaccaatctcaaaacgaaaaaaaaaaaaataaaagaaaccaaaaaaaaaaaaaagataagaaaagaaaaaaatacaaactgacgtaataacgcaaagactgaaccatataccataatatgtagctaacctatagctttaacgatttgtaataagaatgagaagatcgaaaataaaagaaccaaaaacgttatagctgccacatgccacagaacattctctgactcgacgacgcctggaactagtcactagtccgggtcgccaacgcccgaaccagagaccttttccgtttaagccccttagttagtagaacaatgagagcaatgggtaagtcgcacaaaccaaacaaccaaaaaccaaacaaaaaaccagccaaaataccaagcaaactccaacccaaaagtaatgtaatgtaatgtaatcgtaaatcgaatccctccataaggattgtacactttttgtcagcaaaaagtgcacaattacttcaatggaaatggattaatttaaaccaatgcactccctcgattcggcgcatgtatatacatatatagattatggttgcccggatcggggggcgtgacccgccactacatgtacgtctatgctcgtattatccaaaggttcgaggtgcctgcctgacagacccgctcgagatctgccgccgaaccaagcaaacctcaccgaaccgaactgaaatgatccgaaccggagtccagagagtcctcctctatcgggatcggaatcgggatcggaatcggaatcggaatcggcatcggcatcgggaaaatgggaaagcgttatgccgaaagtgtaaagaattgtttttttccgctatgaaacaaagaaaatcgagttttattttatgtgtttgttcagaacgcacatcgtgccgccctcctcccctcgaacgttgtgttgttgtgtagtcgtcgtcgccgtctccactccgctcgtctcatctcgatccctagagatcctcagtgatcaggtccgtcctgctccgtcctgtcggttagaatgcaggcgagccaaatcgaatgggtttgtatgattaaaacacatcaatctatttattttacatatgtatgttaatttaccaatgttttatataccatacaaatacgatacgatacgattttagattctaccatatgatagttaagacgataccattttagtatgttaagttgaggaaattcaaagccagttttctactttactatgcacctgttactgcgtcggttcgttaagtctctatctatctgtattgcaccaacttagcttaggactaggccatactacctccatttaaacgcataaacatttggaagccatctgattccgtctgtcgttggaaatgcatgatgcacttctcgaattcattgcaccaaagaaatttttgaaaactctgctcacatgatcaaagaagttatcaagttatcaaaggaagttgtgatcagttgattgaaacatcactttgccttgatcacctgagcagtgttcaatttccatcatccttgagagtgatcgtgtttgtctgttccgaaacatttcgtgtgtctgctaattaaaaccgaggtacccgcgcctctgcctctgcctctacattcagccacatcctaataatcctcgtaacccatctttcgtgtcgaatcgatgctaaaatacaaacaactacagccagatgagaagagtatgctttctcgcagtttaataatccctttacccggctattctctgtgtccattccaggcgtcatgcaggccaccaccatgggcggagccaagctggacaagcgctactcgcctagtttccgggatgacgcggccgccgttcccgttcgcaagatgagcgcctccaagaggaagcgggatgaggtgctgaggtgggtacttcatgtgcattcgaacgctgaaaatcatactcataatcattatttccttgcagaatgaaggtgcacaagaatggacaggccgctgaagtgatcaaaagcatctcacaactggacaacaccaataagcaatgtaagcattttcccctctaaagtcttatacctaattacctatacctatatataattatataaattatcttgcagacttccttatgctcgagaacatcacatcgcagttccgcaatccctgcatcctggacctcaagatgggcactcgtcagcatggagatgatgcgtcggcggagaagcgctccaagcagatggccaagtgcgcggccagcacatccggatcgctcggcgttcgcttgtgcggaatgcagacctacctggccgatctggaacagtatgccaagcgtgacaagtactggggccgcgagcttaacgagggcggattcaagactgcgttgcacgatttctttcacaatggctaccgcctgcgcatccgtgtcatccgcaagattctgcagcgcctgctccaattacgaagggtgattgaaaagcagtcgagctacagattctactcttggtaagtacgcagcttcagagtctgcatacataaacacacataatgtgagcaattagatgcggtactaataataaaattctaatttccagctcactgctcattgtgtacgagggctttgaggagaatccaatggccccccctccctcgatgagtcaggatgagtggccagaggcgcccaggtcggccactgtgcccggcactgtcttcgattatcatccggagaacagcatagacgaggacgatctggaggatgacgacgaggcaggcaacgaggctggcgatgagctggaggcgcacgacaccgacgatgatctgcatctggtggccgccgacagtggcaacgcttcggcgacgaacagcagcacaggaggagatgcctgcaactacgatgcagatgcctccaacgattctaactcattgctgaacctggctaccagacgtcacctgcacaagcgtggatttgcagaggcagcggcgcgaggagttaagcagacggcatcccacaataccactaccgatgaggaggaggaggatgagcacccggctatgccaccgcctcggacttgtggtgttatggccgccaaagcggcagccgctgccgctggcctggccggaaagggccagggagcattcattccaatctccgaagagacagtatttctggacccagagccagcgctgcccagcgtgacgacttcatcgccacattccggtgactcatggatgaactatagcagcaacagcagcgacgacttctccggattatccgagcagataaaggctgtggccagtgggcggcagacatgtaagattaattatatatttatacatcgtgcagcttaaccaagttcttcttgtttttaggcaataacagcagtgatgacgcaagttcagattacgaaagcagtatcattgggccaacggaggctatgtttaagcgatataagtctcagcaatcttttgacgccgccacagctgccgactctgcgtcctccccgccactcactgccggaaactcgagcgtttccaatggcggcaccacagtccgttcactggtttcgcccgcttcatccagcgcctcctctctgaaatcggtcaagggtgcagtgaagcggctacgatgcaatgatgatgatcagcagtctgcgagcctgggggaatcggatttgcgagaagcgaagaagtcgacgatcacttcgacacccgtttcggccgtatcctcgccagctaaggcagccccacaactgcgcagctgtgagagtatctcaaaccagcaatctctgctgtcgggcctgctcctggataataacaatgagcagcgtcgcaatgcacttctgcagcaaagctcaaagtcgctggacatgtcggcaccgcccactgatgataaccagtgcttcgtggacgtccggctcatcgactttgcccacacggcattcgtgccgcgcaatggcaccatgctacccactccggcggcagctccggtgcaccatggacccgacgggggattccttaccggtctggatagcctcaaccgcctgctcaacgaaattgtggccgaggaacgcgcctaagctcgctatagaaaccacatcgggagaaaagaatatgaatatatatatggggcaactgggcgggaacacacaagttaaaagtacaatttgatttcagaatacctaaattgttgtagcaacatgagttaaattatgaaacaaaatcaacttatctttagaaattcaaaatgtgattcaagcaaacctatttaacaaccggatatagaccttaacttttaacttttaaccgacgcgtaacgttaagtaaaagggcggagcgtgtttcccccgattaatcgcagcatttgtggagaaccaggagcggagaatttaaaattaatttgtaaacaagtcgcttccaaaagtagatgaaagtaaaaaaaaaaagttcgttagattgattgattgtgcattctgcatttcacattcagatcaaagatacattatttcggcaaaagtgtatatgatttaaccctttgtaagagttctcgtgaggcacacctataaatgtaatgtactctaaagcgagaacacttgggccgagtgattttatacctagccattacaattcaatgcaaaatgacaaagcgatagagcgtaatcatcagtatttcgttgtatgtatctatgcttaaagtcttagcccgtttcctttccatttgtagtgacaaagtttcgaagagccagagttttctatatatactatataaaatacacgcaaaacacatatttaagttaacgatcaaagagagaaacgctattaattatagatcctacaaatattactattacttattgtgtaactagagaattaaatgggaaatccaattatgtatattttcacttaagcacgtttataaattacaaatgttctacaaattgcaaaaatacctttactgaataaatgaatatggaaataattagcatttctccttttgaaaaaagtgtttggcgcgaaaagtgcgaggtgactgtggtgttttttagtcactccgtgtgatgcatcgataaatcagcttta

SEQ ID NO: 21386 - DNA, 2682 bp, DROSOPHILA
atgggagattctgacttgtcgtcatatcagcaacatgttccaaatatacaacagccgcgacgcatccatggacatgatctactcttgcaacagcagcagcagcagctcccacagcagcagcagcagcagcagcaacaacaacagcagcagcagcaagaatttgtggcacaaatctccagtagcctaagccaagtgcaagcgcagttgcagttcgccagtggatccagcttcctgcaacaaggctcatctccctcgccgtcccagcaacaacatggtcctgtcagcagcagcagcctcgtaactgccaatctccagcagctgtcggtgagcagcagcaacgccagcagcagcagtagcaacaacaacagcgccagtggctgcaacactcccaccaaaccacaaaagcagaaaccactgctgctcccagaagcagctgcttctactgccaccgctgtcggcaagtcgtccaagaacccacagctgagcaaggatcttctggacaatgaggatgaggtggcattgcacccgctctccaaccaggtcggaggacacactcgcctgttgctgctcaaccagtcgacggtgatcaagccgctgaacctgcgcgaattggacttctaccagaacattccgcaggacatactgaagtttgtgcccaagtacaaaggcgtcatgcaggccaccaccatgggcggagccaagctggacaagcgctactcgcctagtttccgggatgacgcggccgccgttcccgttcgcaagatgagcgcctccaagaggaagcgggatgaggtgctgagaatgaaggtgcacaagaatggacaggccgctgaagtgatcaaaagcatctcacaactggacaacaccaataagcaatacttccttatgctcgagaacatcacatcgcagttccgcaatccctgcatcctggacctcaagatgggcactcgtcagcatggagatgatgcgtcggcggagaagcgctccaagcagatggccaagtgcgcggccagcacatccggatcgctcggcgttcgcttgtgcggaatgcagacctacctggccgatctggaacagtatgccaagcgtgacaagtactggggccgcgagcttaacgagggcggattcaagactgcgttgcacgatttctttcacaatggctaccgcctgcgcatccgtgtcatccgcaagattctgcagcgcctgctccaattacgaagggtgattgaaaagcagtcgagctacagattctactcttgctcactgctcattgtgtacgagggctttgaggagaatccaatggccccccctccctcgatgagtcaggatgagtggccagaggcgcccaggtcggccactgtgcccggcactgtcttcgattatcatccggagaacagcatagacgaggacgatctggaggatgacgacgaggcaggcaacgaggctggcgatgagctggaggcgcacgacaccgacgatgatctgcatctggtggccgccgacagtggcaacgcttcggcgacgaacagcagcacaggaggagatgcctgcaactacgatgcagatgcctccaacgattctaactcattgctgaacctggctaccagacgtcacctgcacaagcgtggatttgcagaggcagcggcgcgaggagttaagcagacggcatcccacaataccactaccgatgaggaggaggaggatgagcacccggctatgccaccgcctcggacttgtggtgttatggccgccaaagcggcagccgctgccgctggcctggccggaaagggccagggagcattcattccaatctccgaagagacagtatttctggacccagagccagcgctgcccagcgtgacgacttcatcgccacattccggtgactcatggatgaactatagcagcaacagcagcgacgacttctccggattatccgagcagataaaggctgtggccagtgggcggcagacatgcaataacagcagtgatgacgcaagttcagattacgaaagcagtatcattgggccaacggaggctatgtttaagcgatataagtctcagcaatcttttgacgccgccacagctgccgactctgcgtcctccccgccactcactgccggaaactcgagcgtttccaatggcggcaccacagtccgttcactggtttcgcccgcttcatccagcgcctcctctctgaaatcggtcaagggtgcagtgaagcggctacgatgcaatgatgatgatcagcagtctgcgagcctgggggaatcggatttgcgagaagcgaagaagtcgacgatcacttcgacacccgtttcggccgtatcctcgccagctaaggcagccccacaactgcgcagctgtgagagtatctcaaaccagcaatctctgctgtcgggcctgctcctggataataacaatgagcagcgtcgcaatgcacttctgcagcaaagctcaaagtcgctggacatgtcggcaccgcccactgatgataaccagtgcttcgtggacgtccggctcatcgactttgcccacacggcattcgtgccgcgcaatggcaccatgctacccactccggcggcagctccggtgcaccatggacccgacgggggattccttaccggtctggatagcctcaaccgcctgctcaacgaaattgtggccgaggaacgcgcctaa

SEQ ID NO: 21387 - protein, 893 aa, DROSOPHILA
MGDSDLSSYQQHVPNIQQPRRIHGHDLLLQQQQQQLPQQQQQQQQQQQQQQQEFVAQISSSLSQVQAQLQFASGSSFLQQGSSPSPSQQQHGPVSSSSLVTANLQQLSVSSSNASSSSSNNNSASGCNTPTKPQKQKPLLLPEAAASTATAVGKSSKNPQLSKDLLDNEDEVALHPLSNQVGGHTRLLLLNQSTVIKPLNLRELDFYQNIPQDILKFVPKYKGVMQATTMGGAKLDKRYSPSFRDDAAAVPVRKMSASKRKRDEVLRMKVHKNGQAAEVIKSISQLDNTNKQYFLMLENITSQFRNPCILDLKMGTRQHGDDASAEKRSKQMAKCAASTSGSLGVRLCGMQTYLADLEQYAKRDKYWGRELNEGGFKTALHDFFHNGYRLRIRVIRKILQRLLQLRRVIEKQSSYRFYSCSLLIVYEGFEENPMAPPPSMSQDEWPEAPRSATVPGTVFDYHPENSIDEDDLEDDDEAGNEAGDELEAHDTDDDLHLVAADSGNASATNSSTGGDACNYDADASNDSNSLLNLATRRHLHKRGFAEAAARGVKQTASHNTTTDEEEEDEHPAMPPPRTCGVMAAKAAAAAAGLAGKGQGAFIPISEETVFLDPEPALPSVTTSSPHSGDSWMNYSSNSSDDFSGLSEQIKAVASGRQTCNNSSDDASSDYESSIIGPTEAMFKRYKSQQSFDAATAADSASSPPLTAGNSSVSNGGTTVRSLVSPASSSASSLKSVKGAVKRLRCNDDDQQSASLGESDLREAKKSTITSTPVSAVSSPAKAAPQLRSCESISNQQSLLSGLLLDNNNEQRRNALLQQSSKSLDMSAPPTDDNQCFVDVRLIDFAHTAFVPRNGTMLPTPAAAPVHHGPDGGFLTGLDSLNRLLNEIVAEERA

SEQ ID NO: 21388 - DNA, 4397 bp, DROSOPHILA
atacctatgctggaactagacccgtgcagataagccctagtggccaagtagtccacatgtccgttgaatgattcaccattcgactgatcatccggatcgtgttcggtatccgcccagtgggtttcggcatatcccttgatgttaaggattacagctgaagtaaaaataaaagctattttaagcccctgcaacacttgcacttcaaatcaattaagtcttttagcaagtaacgtttgttttgagtagagcaaaatgaatcagcgccttacctttcactgacttttccttctcagttttaatgaccacctgtcctgaaatcaactggcctgcataaaaaattccttgggaattattgcagaactcaatctcacagattaccattgtgcggaataatttgtatgataatccgggagctgtttaacttttgccctgtctgtgtcgtggctcccaacaaactgaagtcacccgctgcggctatttttattttattttttgtgcagcatttatttggccaacatttttattttatcttatcaatgcgataggtatctcagtatttaaacacaaatttttaccattgctatcggagtatttacatatgtaagtgacagcaatttgagaagtacgaaattggcaggcagaactgatcgatgagggccagttttcccaaggttgagatagcgatgatagggcgttgtaccaataaagaaatagaggataatggagtccctgatttatcgcataagttgttaataaattaatgaaggaatttctctcaactggccgcgttgccaactatccagatagacaaatattgcagtgggttttgtactgagttgagccgataagataatgccagccgacggtaaaactgaaaatgagagtccaggccatgttagcaatacagttggcccagttcgtgtttagcagcgggcgcgttaggatcgctcgcaaatctaaaagctctggagaggcataagcccattacctattcgccaacatgtcgaagaactgcatgataacgttcgaccagaatgagcacggcacctacttcaccggccaggtgataaccggcaaggtgattgtcaatctgaacaagaccaagaaactgcgaggtaagtaagaccaactaggataccccaacagtacggaaactagtgggggctttcgcttatcgagcgcggcgtatcttatcgcttcggataatgtcaggtttggcaaaagcaaaagattcaacaaaccattgaaatgggtaattaagtgataactatgcggacactccaaatgtgcgataattgatgattcctggagccgaaggggagcgataacaaccttacttatagttggggatctacccaacgaattatattttctttcgaggaaataccagggaacttactcacggttttcgtctgggctttgcagtgatatggacaacaagttttgttgattcttcgaaatatatgttttctacttctatttaaaaaaaaaaaggttaatttttgtctttaagttatttcatttccattttgcatctgcgtgcttgcagcccaaatcaaatatttaaacaatttgaataattttatagtgtgcgtcaacagtttccgtattagttaaatttaaaatgcccctaagacgcttttattaactgtttttggaaatgtctttcagtgcttctcgcttttgttttatcttatcctaatattacccctaccttatgaggtaacccaaagagataaacaaagtgagctagttttattaggaagcccgttgtatttttttttaacttttttattaaggtactgatttctttgtctatattatagcctatattatagtattattatggaaatattataaatgttagtcagcacatctcatatttctctgttaagaagtcatgttattgaagatctacatattctaatatttcttgtcttttaggaataaaactgcaaataagtggctatgcgcaagcccagtggcgcatccgcagacatggtaaggcggtggcaatccaaaaccccaagaagcgatcaaagcaccagtacagcgggcgggaggactatatagcctccaccacttacctcatgggttccgagcagggcagcaactttaacatggacgccggcacgtacacctacacttttgcttgccccattcccagccactgcccctcgtccttcgagggtgcctatggacacatccggtatctggccaaggtcacctttttgaagccaggagcttccaatcgcacccacaacgtgggcttcactgtgctaaagctgctggacttgaaccaggagaccaagatgctccgggaaccggcgagcaatgaagccgtggaacacttttgcctgatgcacacgaagcccgtgcagttgaaggtcactctccagcagcagggctatgttccgggtcagttcatgttgatccacgcccatgtgcgtaatgactccagctccgattgtcggaagctactgatcatgctgcatttgagagccacatacacggcggatacgccctcgctacgcaccacatccgagaagataatgctggtgaagcgcgagtgcggtccggtggctcataatgcgcagaggacttacacggaaaccctgaggattccggcaacggcgcccacctgcgagcacctaagcaaggtggtgcgcgtatcttacgaagtgcgtgtggtggctgttatgaactggcttatggctaatccccggctcataatccctgtgactattggcaacgtgcccctggcaactgcggtgtccggaccggacttcctgccaactaacgccttcccatctggaagttcgctgcctgccgacttgccatgcacctctacaagggccatggaactggctcagatggccgcaagcggggtcagcaactccggctacgagatggccgaggatctagaggacttcgagcttccagaggatggagatgatgagttggaggccgccgacgatttcgtaccagatttacgtgagtacaagagaacaaaatatttctagctaggactttgttatgaaagatgttaaatagagcccttatgtatatgttctttatatttttgttatgctattgtgaggcgatagtttcattcttcattctccatattttttatgtcattttttctatagctcctcctacctacgagcaggccatgttcatgaccactgatattgcggacacggacgcgaacacggtcagcgaggcctcccgatttactccacgctatccggtcttcgatgtggacaccttccagagcccgccgccaaatcctccccagaagaaaaggcgccgccgacgcagacgtcctgccgatcctggacagtcgaagcaacaaccggagaaacaaccagtggagtcacccgtgcagatctgagggcagttatcgcgaaaaatcacgactatatcttatctcggcagtatttatttcttttacggttcgccagtgtacttaccaaaatgtttactatatatgtatgtatatcggaatgataaacaacccagaatataaaagtgtctactgggtgatacgcgataaattgcgactatagcctagacaaccaagtccatgaaggcattgaactacaaatttatttattcatttataaattaaattgagtggaggacttctagctcagtccgtgagtttaaatacttatgagagctagaaattttgatttacgcatacatgctcccaatttctaattctattgcttgacaatttccattaaaatgcaaaaaaaaaatgtataacttcctctctatctgagtaacaggtatctgatccggcccattccgaattatatagaatatatagcatagaaacggacatgcatttatcgccttaatactgatcaaacattctctcgactgtcaagataccctttggttgctacgcaccacgatagaaaatcaggaacttcttggacttttgcgcgtttgtaaatgagtacaaatcatcattaacaaacgtaatcaactatcacagacttaagtccatagacgacttaacttgatgtgattctttttcaccgtatttcgtccaaaaaataataacaacgcgataataacaactcaactaaactagagctttcacagaacccacctgatttttgtttacaaatttttagatttgttgttgccttattcttcgtaacaaaacaaacaaaaaagagaaccgtttatcaaaatccgatgcctctcaattttgttttttttttttagtgagcggaagccccaaaagctcgctcaccagaaaagctttggctctcgccaagtgatgatgtcactgacatcccagctgttgcagaccggctattctcattctaaattctcacttcgggtgcgacgcttgtctggtgctaaataaattcacg

SEQ ID NO: 21389 - DNA, 1410 bp, DROSOPHILA
atgtcgaagaactgcatgataacgttcgaccagaatgagcacggcacctacttcaccggccaggtgataaccggcaaggtgattgtcaatctgaacaagaccaagaaactgcgaggaataaaactgcaaataagtggctatgcgcaagcccagtggcgcatccgcagacatggtaaggcggtggcaatccaaaaccccaagaagcgatcaaagcaccagtacagcgggcgggaggactatatagcctccaccacttacctcatgggttccgagcagggcagcaactttaacatggacgccggcacgtacacctacacttttgcttgccccattcccagccactgcccctcgtccttcgagggtgcctatggacacatccggtatctggccaaggtcacctttttgaagccaggagcttccaatcgcacccacaacgtgggcttcactgtgctaaagctgctggacttgaaccaggagaccaagatgctccgggaaccggcgagcaatgaagccgtggaacacttttgcctgatgcacacgaagcccgtgcagttgaaggtcactctccagcagcagggctatgttccgggtcagttcatgttgatccacgcccatgtgcgtaatgactccagctccgattgtcggaagctactgatcatgctgcatttgagagccacatacacggcggatacgccctcgctacgcaccacatccgagaagataatgctggtgaagcgcgagtgcggtccggtggctcataatgcgcagaggacttacacggaaaccctgaggattccggcaacggcgcccacctgcgagcacctaagcaaggtggtgcgcgtatcttacgaagtgcgtgtggtggctgttatgaactggcttatggctaatccccggctcataatccctgtgactattggcaacgtgcccctggcaactgcggtgtccggaccggacttcctgccaactaacgccttcccatctggaagttcgctgcctgccgacttgccatgcacctctacaagggccatggaactggctcagatggccgcaagcggggtcagcaactccggctacgagatggccgaggatctagaggacttcgagcttccagaggatggagatgatgagttggaggccgccgacgatttcgtaccagatttacctcctcctacctacgagcaggccatgttcatgaccactgatattgcggacacggacgcgaacacggtcagcgaggcctcccgatttactccacgctatccggtcttcgatgtggacaccttccagagcccgccgccaaatcctccccagaagaaaaggcgccgccgacgcagacgtcctgccgatcctggacagtcgaagcaacaaccggagaaacaaccagtggagtcacccgtgcagatctga

SEQ ID NO: 21390 - protein, 464 aa, DROSOPHILA
MITFDQNEHGTYFTGQVITGKVIVNLNKTKKLRGIKLQISGYAQAQWRIRRHGKAVAIQNPKKRSKHQYSGREDYIASTTYLMGSEQGSNFNMDAGTYTYTFACPIPSHCPSSFEGAYGHIRYLAKVTFLKPGASNRTHNVGFTVLKLLDLNQETKMLREPASNEAVEHFCLMHTKPVQLKVTLQQQGYVPGQFMLIHAHVRNDSSSDCRKLLIMLHLRATYTADTPSLRTTSEKIMLVKRECGPVAHNAQRTYTETLRIPATAPTCEHLSKVVRVSYEVRVVAVMNWLMANPRLIIPVTIGNVPLATAVSGPDFLPTNAFPSGSSLPADLPCTSTRAMELAQMAASGVSNSGYEMAEDLEDFELPEDGDDELEAADDFVPDLPPPTYEQAMFMTTDIADTDANTVSEASRFTPRYPVFDVDTFQSPPPNPPQKKRRRRRRRPADPGQSKQQPEKQPVESPVQI

SEQ ID NO: 21391 - DNA, 4005 bp, DROSOPHILA
acatacacacacagccgacaaatttgatggcccactgaaaagtgccgcaattagcctataatacccgcttgtagcggacaaacaactttattggacattaaaaacagaaacttgcgcgagagccacgctcagattcttattttcttgccctagccaatcgatatctatttttcatgacagccccgtggtatgcaatactttttagccgcttcgcgctgcctgcatatcgcacttctgtcagccgcttctttctcctgcgtggtcgtggttcgtggtcactgaagcgaataccttactctggtaaggcaaggtagtgccaaaaaacttcaggtgaagcactgggaaacacacttttcaagattgaaccgattttctctctgccgctgctactgctgctgctgctgcctgctcatatgtatatgtagctgtgagaatatgctatggctcttttctggcggtttcaactcgacgacgttacgaacacgactgaacctgaactgaaaggtcccacaaataatccagcgagcgaagccaaagcgacggcgttggagttgacgcagggcctggaagttttgggggagagagatttggaagtggaatggaaccgcgaatcgaattggaagccacactgaacatctgtttgcatgggcgtcggtgggtgcacgaaactgcgttaccaataggcaaaacaagcttttagatacttgggaaatttttgggcaagaaggttaggtctgcaaatttaattcggttggtttgccttacaataacctggcaacgctgacatgcgcactgccagcggttagtctgtgatgtcaaaacagctgatgtgcagcgataccgttggatttttcggcggctcatggaacggccacacattggcttgtttacctagtgagttaaatattttttgcggatttcgataattaactatttgaattaaaacatttaaaatatttctagtaaaatctgtaatgcattgaaagaactaacggaaaggatgattcgcttacggcaagcaatttgtgagcaggtgagcataatattaatggagctacccattatgtcagaccaaacttgtctcccatattccagctgccgcatctcaagaatgcctgctatgccctggaggtgcctgtcaagaaacaacagctacagaatagccgacgtccaactgtggagtggattctgccctctgcgtttgcgcaacaggaggtggaactactggactcattgaagaagcgcagattcgaggcctatgtggaaaacgttcggattgtacctagcgctgggcgcagtgcagccaaaatcgagtttcagctgcagccacaggtctttgtagaacagctcctccaaactaaagagattgctttacatccttcgccctttgctgcggaacacatagtggttgagtacagctcgcccaacatagccaaacccttccacgtgggccacctgcgctccacaatcatcggcaatgttctggccaacctgcatgagcatttgggctaccgcacaacacggttgaactatctgggggattggggcacgcaatttggactactggtattgggagttcaactgctgaatgtaagcgacaaagagatgcaactatccccaatagaaacgctgtacaaatcctacgtggccgccaacaaggctgctgaacaaagacctgaaatcgcgcaacaggcgagggacctcttcgccgccttggaaggaggaacggataaatcaatggccaagaaatggcagcaatacagaaactacactatagaggatctatccaaagtctataacagattgggcgttcacttcgatagctacgaatgggaatcccagtactcccagcagcaaattcaggatgttctggacaaactgcgaagcgctggactcctccagccggagcacgatggtcgtgagattgtcgtggtggacggccgacgcattcctgtgatcaagagtaatggatccactttgtacctggccagggacatagctgccctgctggagagactctccaggttccagttctcacgcttgctctacgtcgtggacaatggtcaagcggatcattttaatgccctttttaaaacaacggcagccctggatgaccgcctaagtctggaacagctgcaacatgtgaaatttggacgcatttatgggatgagcactcgtcagggaaaggcaatctttctaaaagatgtcctagatgaagcacgagacataatgcgggaaaagcgaaacataagtgccagtaggtgaatcatatacttacgaaatctaatgaacgttgagtgtccaacattgtttcttagctaccagagaaaattacaatctggatgatgaacatgtatgtgatattttgggcgtgtcagccgtcctggtcaatgtccttaagcagcgaaggcaacgagatcacgagttcagctggcagcaggcactccaagtaaatggtgacacaggaatcaagcttcaatacacacactgccgcctgcacagtttgctggataatttccgagatgtagatctggacgacattaagcccgactggaagcatttctctacggagcctgcggatgctttggatctgctctacgcactggcacgtttcgatcaaagcgtttggcaatcgaaggaacaactggaggcttgtgtccttgtcaactatctctttggattgtggtgagtgaaataattgtaaactttcaatttgcactgtgtcaagccagagatgtttgcaagagtcaagcgtaacaaaaaaaacttaattagtaaaaaaaaaaactagtaattactagtaaatgctgaggcataagaactaaagaacccttttcaaatttccctgcagcaatgccaccagtcaagcgctgaaaagattgcctgtgaaacaagagtccagcctagagaagcaactccaacgcctgcttctttttcacgctgccaaaaaaacactgcgacacggaatggagctccttggcctgcgtccactgaaccaaatgtagaccaattagacctaaggcaccgcagttaacacaatttatatttattaaaacacttcgctataaaatgcagcctagtgttgcagatgcacgtgcccgtctagcgcttcttccacgtgtacttgcggcgtgctccttcctgcccgaacttcttacgctcccgacggcgatagtcacgtgtcagcaggccggctgcaacataaatagcaattagtggcaataagtcaactgctgcggctgcataggagcctcattcacttacccagacgcattgactcaatcatctcttgatcgacaaagctgcgcaaactcatggcgatgccccagcggatggctccagcctgaccggaaggtccgcctccctcgacgttggcctccacatcgactttgcccagcagctcgctaaattgcagcgggaagagcagctggaaaaaatcgagataacgaatcggcgaatgagaatggtataatgtcgtggccgttagatgtcaagttcgagcgcccgaggcagccattgtacggatgatctctctgtattcaaatgacgctgcgatagcgcttcctgtacaacaatgccgatagataatggcggaatggttagccaaattaaatgtctctcggccgcggccactaaactgcaacagattgttgcatgtccgtctggcaattagtggactcgtcaatcgagtgggtgggagctgaaaggttcgtctgccgggctaggtgtgatgcaaattataagcgcattatagcaatgcatcaagaccggataattgcggagccgcgggcatgttcagcacgcgctatcccgttaataggttgaataatagttggctttacgtaattagtcgagttcttttgagagtcaattaaagaaggttgagtaacgcaaaaagctacttttaagccgctagtccatgttattcattgtatatatatatatagtatattaaatagttcaatatacatatctaactttctagtgaaaagagtatgtatcatt

SEQ ID NO: 21392 - DNA, 1716 bp, DROSOPHILA
atgattcgcttacggcaagcaatttgtgagcagctgccgcatctcaagaatgcctgctatgccctggaggtgcctgtcaagaaacaacagctacagaatagccgacgtccaactgtggagtggattctgccctctgcgtttgcgcaacaggaggtggaactactggactcattgaagaagcgcagattcgaggcctatgtggaaaacgttcggattgtacctagcgctgggcgcagtgcagccaaaatcgagtttcagctgcagccacaggtctttgtagaacagctcctccaaactaaagagattgctttacatccttcgccctttgctgcggaacacatagtggttgagtacagctcgcccaacatagccaaacccttccacgtgggccacctgcgctccacaatcatcggcaatgttctggccaacctgcatgagcatttgggctaccgcacaacacggttgaactatctgggggattggggcacgcaatttggactactggtattgggagttcaactgctgaatgtaagcgacaaagagatgcaactatccccaatagaaacgctgtacaaatcctacgtggccgccaacaaggctgctgaacaaagacctgaaatcgcgcaacaggcgagggacctcttcgccgccttggaaggaggaacggataaatcaatggccaagaaatggcagcaatacagaaactacactatagaggatctatccaaagtctataacagattgggcgttcacttcgatagctacgaatgggaatcccagtactcccagcagcaaattcaggatgttctggacaaactgcgaagcgctggactcctccagccggagcacgatggtcgtgagattgtcgtggtggacggccgacgcattcctgtgatcaagagtaatggatccactttgtacctggccagggacatagctgccctgctggagagactctccaggttccagttctcacgcttgctctacgtcgtggacaatggtcaagcggatcattttaatgccctttttaaaacaacggcagccctggatgaccgcctaagtctggaacagctgcaacatgtgaaatttggacgcatttatgggatgagcactcgtcagggaaaggcaatctttctaaaagatgtcctagatgaagcacgagacataatgcgggaaaagcgaaacataagtgccactaccagagaaaattacaatctggatgatgaacatgtatgtgatattttgggcgtgtcagccgtcctggtcaatgtccttaagcagcgaaggcaacgagatcacgagttcagctggcagcaggcactccaagtaaatggtgacacaggaatcaagcttcaatacacacactgccgcctgcacagtttgctggataatttccgagatgtagatctggacgacattaagcccgactggaagcatttctctacggagcctgcggatgctttggatctgctctacgcactggcacgtttcgatcaaagcgtttggcaatcgaaggaacaactggaggcttgtgtccttgtcaactatctctttggattgtgcaatgccaccagtcaagcgctgaaaagattgcctgtgaaacaagagtccagcctagagaagcaactccaacgcctgcttctttttcacgctgccaaaaaaacactgcgacacggaatggagctccttggcctgcgtccactgaaccaaatgtag

SEQ ID NO: 21393 - protein, 571 aa, DROSOPHILA
MIRLRQAICEQLPHLKNACYALEVPVKKQQLQNSRRPTVEWILPSAFAQQEVELLDSLKKRRFEAYVENVRIVPSAGRSAAKIEFQLQPQVFVEQLLQTKEIALHPSPFAAEHIVVEYSSPNIAKPFHVGHLRSTIIGNVLANLHEHLGYRTTRLNYLGDWGTQFGLLVLGVQLLNVSDKEMQLSPIETLYKSYVAANKAAEQRPEIAQQARDLFAALEGGTDKSMAKKWQQYRNYTIEDLSKVYNRLGVHFDSYEWESQYSQQQIQDVLDKLRSAGLLQPEHDGREIVVVDGRRIPVIKSNGSTLYLARDIAALLERLSRFQFSRLLYVVDNGQADHFNALFKTTAALDDRLSLEQLQHVKFGRIYGMSTRQGKAIFLKDVLDEARDIMREKRNISATTRENYNLDDEHVCDILGVSAVLVNVLKQRRQRDHEFSWQQALQVNGDTGIKLQYTHCRLHSLLDNFRDVDLDDIKPDWKHFSTEPADALDLLYALARFDQSVWQSKEQLEACVLVNYLFGLCNATSQALKRLPVKQESSLEKQLQRLLLFHAAKKTLRHGMELLGLRPLNQM

SEQ ID NO: 21394 - DNA, 2931 bp, DROSOPHILA
tagattttatgcgcgacaaaaacgaagtgcaaacatttttatgttcccgccgtttctatgctgcaattggtataccaatttgacggggcgccgactttgactttaactttaacttcggtctgggctccactgcgtctgtgtaattaggttcaaataatgtggagctcagcctcttcgcgccacactagtcagcaagatattgtagttcgcacagccctcatggaaggatgatcctgcagaggacccaagtttgccagcagagtgcccgtctcctagctcgtttcacgctctcaatttactggatcaaagctcgccacgctcggcgagcctaacatggaaaatctggccccaaattaactcccatatggtagacggctagcaacgggtcaaatgctcagaagactaaacctaaacaccaaaactccaaccacctacctatccatctcaacgcatctcattcggagggaatctgagtctcgctgggcaccgcgctcagcatataaattcatttagatcaatcaattcaatttgtttgtcaataagccctaaatgagtatttcatttaaacaaattaaaattcgacccgttcggaatgccagaggctgctcagactcatcccgcagcaattaaaattgacgcgacacactcgattccctgatttcttaaacgagcgcaatggaaacacatataaatacggctggactttggctcagacccagacccagacccacatccagacccagaccctgggacccagaaccgtcgcctgagttccagagaccaagaccaagaccaagaccaagagaccaacggccagccagcccatcgttgttgactcttcattgtcaattaaaatcaaataaatttatttgcttcttgacattcgcctggccacagtgagcaccactttcgattcgccgcttttgtttggcatacaagtgcattgagctgattgctctgaccttcttcggaggctgctgggtatacccaaaatcacggatcacttggctttgccctggttggccaccgactccattgccttcttcaccgtctccggatcgccgaggaacttcaacgtggccaaaggcttgaggctctcgtctagttcgtagacgaaaggaatgccagtgggcaggttgaggctcataatgtccttgtcagagatgcattccaagtgcttgaccacgccccgcaggctgttgccgtgggcggcgatcaggacacgcattccatccttgatctggggcactatgacctcgttccagtagggcaaggtgcgctcgatggtgagcttgagggactcggatttggggaactcctccggcttcagttggtccttgtagcgcggatcctcaacaatgcaggcgtagtactcgtgatccttctccattggcggcggtggggtgtcaaagctgcggcgccagatcttaaccttctcctcgccgaacttcttggcggtctcggccttattcagtcccgtcagtccgccgtagtggcgctcgttgaggcgccacgtggtgcacaccggaatcttcttgtgctcgctggactttagggcggccctgagtgtctcctgggctctggtcagcaccgaggtgtgggccacatcgaactcaattttggcatctttgagcgctttgccagcggcacaggcctcctgctgccccttctccgatagcttggcatcgaaccatccgcagaataggttcttctgattccattcggactctccatgacgaaccatcacaatcctgtacttgcccttcttctcggcctgctttccgccggatgatgacttcgagaacgggcagcgggcttcgatgttcgccacgcgacacagcaattggccacaccacgaattcctggccagagccaacattttgggacactttgaatttggaaagtgtttgcagtctatatcgtgttcatttcgaatggattttctattaaaagtgccgggttgaacctatgacagtaagaaaagttcgttgaaataaggttactttgaggtttttatttcatgcattctaacagtatggaaatattctttaatgattatattctacgtttcactgctagtaatggttgctcagccagcttcatagtggtattgtctataaacctaaggtccttgtacaaaaaggtggtactcagcatataatttcgtaatattttagctagagctagctttgcagatatcagcgagagtttccaacctaagtacataatatattataatagtgtaaaggaattataagaaagttacccacctaagcatgttttcttccccttcgaaaaaggtaaataggaataaggtggccttgctcgcttattttcaggcagaaagttatcgggattaaatgcattagcctgtggtccccagatatccttattacgatgagtgtgaaaaatgtctatcattaaggttacgccttctggaatataaaatccgtttgatagttgaatagaatgggaagtttgccttatcagtaatggaacggccggtattaaacgcatagtctcatgcaaaactcgatccagcttcactaatttctccagatccgcatgactggcttcgaattctcctcctgaaggaaacacctctgctagctcctcaaatacattatcctggtatttaggaaacattgccatcaggataagcacattgttgactgttatagataaagtatcggatgcggcaaatatgatattagaaaattcccccattacgtcgtcataagaaagttctccgattctcacaagattgagaatgcggtcaattagtgccggttctgagctattatctgtgctactcagctttttgtctattatctgaaaatatgcatatgtttagaaggaaatctctgacttctgagttataagtacgtctttgatgaatgcatttgactgcgttgcggcctctagtcgtcg

SEQ ID NO: 21395 - DNA, 931 bp, DROSOPHILA
aaatgaacacgatatagactgcaaacactttccaaattcaaagtgtcccaaaatgttggctctggccaggaattcgtggtgtggccaattgctgtgtcgcgtggcgaacatcgaagcccgctgcccgttctcgaagtcatcatccggcggaaagcaggccgagaagaagggcaagtacaggattgtgatggttcgtcatggagagtccgaatggaatcagaagaacctattctgcggatggttcgatgccaagctatcggagaaggggcagcaggaggcctgtgccgctggcaaagcgctcaaagatgccaaaattgagttcgatgtggcccacacctcggtgctgaccagagcccaggagacactcagggccgccctaaagtccagcgagcacaagaagattccggtgtgcaccacgtggcgcctcaacgagcgccactacggcggactgacgggactgaataaggccgagaccgccaagaagttcggcgaggagaaggttaagatctggcgccgcagctttgacaccccaccgccgccaatggagaaggatcacgagtactacgcctgcattgttgaggatccgcgctacaaggaccaactgaagccggaggagttccccaaatccgagtccctcaagctcaccatcgagcgcaccttgccctactggaacgaggtcatagtgccccagatcaaggatggaatgcgtgtcctgatcgccgcccacggcaacagcctgcggggcgtggtcaagcacttggaatgcatctctgacaaggacattatgagcctcaacctgcccactggcattcctttcgtctacgaactagacgagagcctcaagcctttggccacgttgaagttcctcggcgatccggagacggtgaagaaggcaatggagtcggtggccaaccagggcaaagccaagtga

SEQ ID NO: 21396 - protein, 292 aa, DROSOPHILA
MLALARNSWCGQLLCRVANIEARCPFSKSSSGGKQAEKKGKYRIVMVRHGESEWNQKNLFCGWFDAKLSEKGQQEACAAGKALKDAKIEFDVAHTSVLTRAQETLRAALKSSEHKKIPVCTTWRLNERHYGGLTGLNKAETAKKFGEEKVKIWRRSFDTPPPPMEKDHEYYACIVEDPRYKDQLKPEEFPKSESLKLTIERTLPYWNEVIVPQIKDGMRVLIAAHGNSLRGVVKHLECISDKDIMSLNLPTGIPFVYELDESLKPLATLKFLGDPETVKKAMESVANQGKAK

SEQ ID NO: 21397 - DNA, 3828 bp, DROSOPHILA
cggatcgccgaggaacttcaacgtggccaaaggcttgaggctctcgtctagttcgtagacgaaaggaatgccagtgggcaggttgaggctcataatgtccttgtcagagatgcattccaagtgcttgaccacgccccgcaggctgttgccgtgggcggcgatcaggacacgcattccatccttgatctggggcactatgacctcgttccagtagggcaaggtgcgctcgatggtgagcttgagggactcggatttggggaactcctccggcttcagttggtccttgtagcgcggatcctcaacaatgcaggcgtagtactcgtgatccttctccattggcggcggtggggtgtcaaagctgcggcgccagatcttaaccttctcctcgccgaacttcttggcggtctcggccttattcagtcccgtcagtccgccgtagtggcgctcgttgaggcgccacgtggtgcacaccggaatcttcttgtgctcgctggactttagggcggccctgagtgtctcctgggctctggtcagcaccgaggtgtgggccacatcgaactcaattttggcatctttgagcgctttgccagcggcacaggcctcctgctgccccttctccgatagcttggcatcgaaccatccgcagaataggttcttctgattccattcggactctccatgacgaaccatcacaatcctgtacttgcccttcttctcggcctgctttccgccggatgatgacttcgagaacgggcagcgggcttcgatgttcgccacgcgacacagcaattggccacaccacgaattcctggccagagccaacattttgggacactttgaatttggaaagtgtttgcagtctatatcgtgttcatttcgaatggattttctattaaaagtgccgggttgaacctatgacagtaagaaaagttcgttgaaataaggttactttgaggtttttatttcatgcattctaacagtatggaaatattctttaatgattatattctacgtttcactgctagtaatggttgctcagccagcttcatagtggtattgtctataaacctaaggtccttgtacaaaaaggtggtactcagcatataatttcgtaatattttagctagagctagctttgcagatatcagcgagagtttccaacctaagtacataatatattataatagtgtaaaggaattataagaaagttacccacctaagcatgttttcttccccttcgaaaaaggtaaataggaataaggtggccttgctcgcttattttcaggcagaaagttatcgggattaaatgcattagcctgtggtccccagatatccttattacgatgagtgtgaaaaatgtctatcattaaggttacgccttctggaatataaaatccgtttgatagttgaatagaatgggaagtttgccttatcagtaatggaacggccggtattaaacgcatagtctcatgcaaaactcgatccagcttcactaatttctccagatccgcatgactggcttcgaattctcctcctgaaggaaacacctctgctagctcctcaaatacattatcctggtatttaggaaacattgccatcaggataagcacattgttgactgttatagataaagtatcggatgcggcaaatatgatattagaaaattcccccattacgtcgtcataagaaagttctccgattctcacaagattgagaatgcggtcaattagtgccggttctgagctattatctgtgctactcagctttttgtctattatctgaaaatatgcatatgtttagaaggaaatctctgacttctgagttataagtacgtctttgatgaatgcatttgactgcgttgcggcctctagtcgtcgtttttcatagctaaatagctttccaagatacttgttcctgagccaaggcattacaacaccaatgggtattaggttgttaaggctataaaataaatagagtataaataaatctactaatataagatagaaataatcatacgccttgtagctttccaaaagatttccgttctggtagttcgcttgatttctcacttcatcacccatagtaatttcttaaattatagagttaataaaataagaatatagcaacctatttacttacgagcggctattttgaatgaccatttattgagttctggaagtaagtttatatctcccccatcgacaaattccgcgagtaaggtcaccaggaaattggcttcattgtttaaaactggcacaaaacttagaacagcattattcttaaacgatggtaacaaaagttttcgtcgttcattccaatgattatctatacttacaattgattgtcaattaagaaacaagaaattataagaatttttcacttactctttagggtcagaaggcccagtcctaaacatgatgaaatggccttgtccaccacagaactcctgttgctgcaattgggagacgtgaaaatgtcctcaaggatcttaggttcacaggtcaccaggacgggagttaagccaatccaagtcaataccgtttttccatatattttaaataaaatggtacgcaggcgtatcttacctgtgtaaaaacgtttttagttttacctaattaaattcgaaaatataattacttacgttttaggcgaatgtactcaaaggcaagtccgataaacggaaagcccattggtcctggtaactttagcatcataatataaaatcttcttcgactccatagaaagtatacacataaaatgattgcaaatgcctcaaaaatttgcagcgtaagcatttcaatctgcgatttgggtgaacggtcttgaatgaatatttgggaattcggacgagctttatataggtgaaacatgcatagcatttaattgctctagaatatttttaactcgccctttcataaatgtgccaattccactttgaccttttgcacatttataaaaaataaattcctatttttcatatacttactttgagattgctttgaagccttgccggtgtaaggcttgctttgaaaaaagtagtgtttgtcttgtagtttctaagtatcttggccaagaagatctcgggtgaaacaaatcaatacttacaagttttaaaaacaatcataatcaaaactaccaaaccgttttatttgtgatggctgtataaaaagaattcttaaagccaatataatagaattttcaaaataagaaagttatgttataaagttcgtcgttcgaatgccagttgtggtgactgagcaagctttatgaccatgtggtcaacgaattccagattttcgtagggaaagctggtttttagcttgtagtttctgagtatcttgactaaagctagtttcgaagacatcagtccatatcgccagcctgatacaaataaaaaatgttgtattaaaaccttacttatacttatacttagtattttccaaggctaaccgacctatgcaatttctctttccctttgaaaatggaatgaaggcgtatggatgcctgtcgtggattttttccggcagaaagttttcgggattgaactgcgctgcttctgagccccaataatcagtgttgcgttgagtgttaaatatgtctatgctgatagtcattcccttggggatgacaactccatttgatagccgcaagtcctccagtgtctccctcgagctgaacggaacggatggcatcaatcgcagggtttcattcaaaacgcgatctaaataaaccaattgttgaagatcggtgtgggtaacctcgattcctttggccaaagggaagtgctccttaatctcattgaagaccatttcctgatgttcaggaaac

SEQ ID NO: 21398 - DNA, 1498 bp, DROSOPHILA
attcaagaccgttcacccaaatcgcagattgaaatgcttacgctgcaaatttttgaggcatttgcaatcattttatgtgtatactttctatggagtcgaagaagattttatattatgatgctaaagttaccaggaccaatgggctttccgtttatcggacttgcctttgagtacattcgcctaaaacgtaagatacgcctgcgtaccattttatttaaaatatatggaaaaacggtattgacttggattggcttaactcccgtcctggtgacctgtgaacctaagatccttgaggacattttcacgtctcccaattgcagcaacaggagttctgtggtggacaaggccatttcatcatgtttaggactgggccttctgaccctaaagaataatcattggaatgaacgacgaaaacttttgttaccatcgtttaagaataatgctgttctaagttttgtgccagttttaaacaatgaagccaatttcctggtgaccttactcgcggaatttgtcgatgggggagatataaacttacttccagaactcaataaatggtcattcaaaatagccgctcaaattactatgggtgatgaagtgagaaatcaagcgaactaccagaacggaaatcttttggaaagctacaaggcccttaacaacctaatacccattggtgttgtaatgccttggctcaggaacaagtatcttggaaagctatttagctatgaaaaacgacgactagaggccgcaacgcagtcaaatgcattcatcaaagacataatagacaaaaagctgagtagcacagataatagctcagaaccggcactaattgaccgcattctcaatcttgtgagaatcggagaactttcttatgacgacgtaatgggggaattttctaatatcatatttgccgcatccgatactttatctataacagtcaacaatgtgcttatcctgatggcaatgtttcctaaataccaggataatgtatttgaggagctagcagaggtgtttccttcaggaggagaattcgaagccagtcatgcggatctggagaaattagtgaagctggatcgagttttgcatgagactatgcgtttaataccggccgttccattactgataaggcaaacttcccattctattcaactatcaaacggattttatattccagaaggcgtaaccttaatgatagacatttttcacactcatcgtaataaggatatctggggaccacaggctaatgcatttaatcccgataactttctgcctgaaaataagcgagcaaggccaccttattcctatttacctttttcgaaggggaagaaaacatgcttaggttggaaactctcgctgatatctgcaaagctagctctagctaaaatattacgaaattatatgctgagtaccacctttttgtacaaggaccttaggtttatagacaataccactatgaagctggctgagcaaccattactagcagtgaaacgtagaatataat

SEQ ID NO: 21399 - protein, 487 aa, DROSOPHILA
MLTLQIFEAFAIILCVYFLWSRRRFYIMMLKLPGPMGFPFIGLAFEYIRLKRKIRLRTILFKIYGKTVLTWIGLTPVLVTCEPKILEDIFTSPNCSNRSSVVDKAISSCLGLGLLTLKNNHWNERRKLLLPSFKNNAVLSFVPVLNNEANFLVTLLAEFVDGGDINLLPELNKWSFKIAAQITMGDEVRNQANYQNGNLLESYKALNNLIPIGVVMPWLRNKYLGKLFSYEKRRLEAATQSNAFIKDIIDKKLSSTDNSSEPALIDRILNLVRIGELSYDDVMGEFSNIIFAASDTLSITVNNVLILMAMFPKYQDNVFEELAEVFPSGGEFEASHADLEKLVKLDRVLHETMRLIPAVPLLIRQTSHSIQLSNGFYIPEGVTLMIDIFHTHRNKDIWGPQANAFNPDNFLPENKRARPPYSYLPFSKGKKTCLGWKLSLISAKLALAKILRNYMLSTTFLYKDLRFIDNTTMKLAEQPLLAVKRRI

SEQ ID NO: 21400 - DNA, 4603 bp, DROSOPHILA
aatcccttattaaaaaactagtggaaaactaacttagaatatcatcacatgcatgtgcttaaattgaaatttgattgtggtaattagctgcggttgcaacagctttggctttttcctgctggcacttcttataaataacagatttaagcaagttggatgtccaactttttcttcacacgtacggatttgcagtcgtgccgacctattgcaaaatctcattctaaactgtcatataaatgtgattatatcgatccaccgagtccccatcgaagcgccgtttttccgcagccatgtctgtcagacattatgacaacttaattgaaggttatgcggtggcaggacatgcgtggccagcagcacacagcttaatgcaggatactgatcacgcatccaattgcagccagtgtgattacacgattacacattagatggtgctttcgtgtaacaattcgctgggcattttataaggagtaatggatcggacaatggttgataaggaagctgtttcataaattgttgaaaaaagtcacccatgtcctttgaccttgcgatttgtcaggggagttgttgtgcgactgtcggaagcgttacctcttgctagctaaatggattcttcttcaggaaactaacagttgccaccccttaaaagcttgtcagttaatagaaaacaagtgacaccgcctccggccagcttcataattaagtctaaatgaacaccacgaccccaaccaaggaactggacaaaacgagcggaatggcgctatggcggaagggcggagttgagtccagttgagtacatgcaagtgtttgcagtttaatggaatttttaatttctgccccgcgctggtgcttctgcgttgggaatagctgacattattacaaattttttactattattaaaaatgcagcaaacattaaaagcgacacaaatttgtagccgaaagtcgtgacagggcagctgaagctggcgctggcgctggatagggggcaagatgattacttaagtggacatggtacccaacctccttcgaaagtccggtagccagtgcagaaagagttccagcagaaagaccagcgcactggccaccatggcgagcgccaaggcaaaaagagctggggcaaagtgctccaggtccacctctgcttgcgaggtcttaaacaggctgcaatctggtcgtcgaaccatccactttttgtcgttgtactgtagtaggccagtagcccgaaaatgaagcagtgcatgggccaggtgctctctccacggagaacccttgggcatcacggatcctgagtcgtatggcaggttgaacatgacctcctgcaggtcacagaactccgcctcatccatttggagttccaggagcaacctgtacatacgatcgatggccgtgtggaatgcgaagcgtccctggattatcctttcagctccctgctgcaggctcatgatattgtgctctccggatttgcatattttctttacgtacacatcccttaccagctgattgcttgtgtttgtgaatatcggaaagttgtaggatatgttttccatcccaatcgcgaggttgctgtcgtaaagtgcctgcaggttgacaatgctcctcgcgctttcggaaagcagagagcccactatgaaggcgccgtagaactgcatcagcataaagctgaatatacaactaagactaatcagcaatcgagtggaaaaaaggcgaaagatctcgttggctgggccctgttgcagataggtttccagcatggtaaaccaaacgaaggaaaaccgattttccatgttcgaaagcatcctctccagcctcacgtgaaacagcaaaagtatggtgcttccagtgaccaaagccaggacacaccaccacacctggttgctcaagggctcgaagaatatgttcttgatgtggctgcgacgtggatgccgaaagagaaagtggatgctgaggaggagaaatcgctgtgaggctgtgagcaagtcaagttcactgtgatttactcacttctgggtgtgcaggaccgccgagtactgaacgtagggctgtctgtccagcacaaagcgaatgggacacacggcaaagtccgcctcgcgactcgtcacctgacccatcacacctgaccaactgccattgtccagcagctctccccacttatccgttaagctgatggccaagctgcactggcaaaaagatgggataatattctgattaatggagcttatcataatcattttaagttttattaacctattatgtatttggtatgaagtatttctattgtgaataagttttcattcagctcaaaaagtaaaaggcttagatattcaagagcttagatatagtatttagtattttaatagtattttagattgcgaattcattaaaattgtttaaatgtaaaaaaattaagccatccctttttgagttcaaattcactatttttgttaagtgaaaaccggttaattagagcatacttccgctctagattcacggacccacctgagattgaacatgcgctcaacgagttgaaacagctgataggtcttacgctgcatagggtccaattgctggagctgcttatcgtcggccaggtactccatgtcaccgaatccaggaggcttctctgtcaactgggggatttgaaggtaagtggtaagtgaacggggagaggtattcgggagacaacccaccacagtactgcctatcaaggtgacattgagaaagttacgtcgccttatcacccaagtgtttttaaaatttccaaacttttggtaaccaccagaatgagtccataatcccttcttttcaattatcaatggtgtgttagcttgccgactgattctgtatacgtcatagaaaagcatggacgcgctgaaagtattattttcgataatattatttagcgaacacttgtacttaatacaccaagtttaactttatttgcttaacgcaatttcaaaaatacatttaaattaaaaaatacacattctgcattaagtactgcttacttgtctggtccccttaaggccactgtgatgtccgcatcgatgcccatcctgtagccacttaagagctggtcaatcagctgctcaactggcagagattcgcggccagaaccaagaataaaccacgctagcgagttgttaaagtatccggcctcggaggccaccccgaacacctggcgcctcacaaggacatgctcggaattcagcaccaggaccgccgtgcgcggagacccgtagaacatgagatcctcgaaattcgccgacatttctggccggtaaaattgcacacgatagttggccaacaatttctggtggcattcaattttccagtcgccgtcagcatcgtcgccccggaccaccaggacatggctcaagtgctccgaacgcaaaaagtcctcgaaggctgccagctcaaggaaattggtatttatgctttcaatttgcagcacgcgtaaaaatgctgttaaaattattaaaggccaagaaataactttcacttgcaacttaatcattttatatggccactttagcaccgactcattctttggggacttgtgtttgctttgtgcggggcctctggcgtttttataggttttcattttcccctgcatgtgcataatttattcacattaatcatatcggtgtgctctggactcacgcaaattgtgcggctgacaagaaaattattgtgaggatgcataatacggcgattattttgaaaggaatgcgaatattgtgcaagtgcggcacgaaataattaatggtaattaaacaattaacttacgaagaagggtccacctttggagggtaccagaatatttataataataatataattccaacagtgttgtgtaagacttcaagaaattgtaggactagttatgcaactaaggtcagaagttagcgaacggctaagccaaccatttacttgattttaccacctactactcttactaagtatattcttattttcctaaaaacagtcacattcgtaaaaaaaataaaagattttaggcacataggcataatattcttgagtatcagtatcagtatcaaccgagtcgatatagctgagtccttctgcccatttcttttaaattgatactgcaagcagttatgtgatacagctgtcttttgttaatctctatgctaacattagcgatttaaatatctttcttgtaacctacagattcatcgtgcgttacaaaaactttattaaatgagagcccaattcgtcatttaaagatgtgttgcagatagtcagggtattcttatgaaaagcataagtggtatttcccacttaaattagtggccattttccgggcccagtcgccacatcgatcagactcaatcgacttcgcagtggcccagattcggtgtgcacctagcaaaaagtggactcctgccggcatataccaaaaatccaataactagacgcaacattaagcaggacaaagctggtggcattagcgtgacattatccgactgcagccaagaagctacgagaaacgacaaaaacgcgtgttagcatccacgaaaatggagccaaggaccttagcatgtgtcctcggggaagggtcctgtgtggagcccgcggac

SEQ ID NO: 21401 - DNA, 2082 bp, DROSOPHILA
atgaaaacctataaaaacgccagaggccccgcacaaagcaaacacaagtccccaaagaatgagtcggtgctaaagtggccatataaaatgattaagttgcaagtgaaagttatttcttggcctttaataattttaacagcatttttacgcgtgctgcaaattgaaagcataaataccaatttccttgagctggcagccttcgaggactttttgcgttcggagcacttgagccatgtcctggtggtccggggcgacgatgctgacggcgactggaaaattgaatgccaccagaaattgttggccaactatcgtgtgcaattttaccggccagaaatgtcggcgaatttcgaggatctcatgttctacgggtctccgcgcacggcggtcctggtgctgaattccgagcatgtccttgtgaggcgccaggtgttcggggtggcctccgaggccggatactttaacaactcgctagcgtggtttattcttggttctggccgcgaatctctgccagttgagcagctgattgaccagctcttaagtggctacaggatgggcatcgatgcggacatcacagtggccttaaggggaccagacaacgcgtccatgcttttctatgacgtatacagaatcagtcggcaagctaacacaccattgataattgaaaagaagggattatggactcattctggtggttaccaaaagtttggaaattttaaaaacacttgggtgataaggcgacgtaactttctcaatgtcaccttgataggcagtactgtggtgggttgtctcccgaatacctctccccgttcacttaccacttaccttcaaatcccccagttgacagagaagcctcctggattcggtgacatggagtacctggccgacgataagcagctccagcaattggaccctatgcagcgtaagacctatcagctgtttcaactcgttgagcgcatgttcaatctcagcttggccatcagcttaacggataagtggggagagctgctggacaatggcagttggtcaggtgtgatgggtcaggtgacgagtcgcgaggcggactttgccgtgtgtcccattcgctttgtgctggacagacagccctacgttcagtactcggcggtcctgcacacccagaacatccactttctctttcggcatccacgtcgcagccacatcaagaacatattcttcgagcccttgagcaaccaggtgtggtggtgtgtcctggctttggtcactggaagcaccatacttttgctgtttcacgtgaggctggagaggatgctttcgaacatggaaaatcggttttccttcgtttggtttaccatgctggaaacctatctgcaacagggcccagccaacgagatctttcgccttttttccactcgattgctgattagtcttagttgtatattcagctttatgctgatgcagttctacggcgccttcatagtgggctctctgctttccgaaagcgcgaggagcattgtcaacctgcaggcactttacgacagcaacctcgcgattgggatggaaaacatatcctacaactttccgatattcacaaacacaagcaatcagctggtaagggatgtgtacgtaaagaaaatatgcaaatccggagagcacaatatcatgagcctgcagcagggagctgaaaggataatccagggacgcttcgcattccacacggccatcgatcgtatgtacaggttgctcctggaactccaaatggatgaggcggagttctgtgacctgcaggaggtcatgttcaacctgccatacgactcaggatccgtgatgcccaagggttctccgtggagagagcacctggcccatgcactgcttcattttcgggctactggcctactacagtacaacgacaaaaagtggatggttcgacgaccagattgcagcctgtttaagacctcgcaagcagaggtggacctggagcactttgccccagctctttttgccttggcgctcgccatggtggccagtgcgctggtctttctgctggaactctttctgcactggctaccggactttcgaaggaggttgggtaccatgtccacttaa

SEQ ID NO: 21402 - protein, 693 aa, DROSOPHILA
MKTYKNARGPAQSKHKSPKNESVLKWPYKMIKLQVKVISWPLIILTAFLRVLQIESINTNFLELAAFEDFLRSEHLSHVLVVRGDDADGDWKIECHQKLLANYRVQFYRPEMSANFEDLMFYGSPRTAVLVLNSEHVLVRRQVFGVASEAGYFNNSLAWFILGSGRESLPVEQLIDQLLSGYRMGIDADITVALRGPDNASMLFYDVYRISRQANTPLIIEKKGLWTHSGGYQKFGNFKNTWVIRRRNFLNVTLIGSTVVGCLPNTSPRSLTTYLQIPQLTEKPPGFGDMEYLADDKQLQQLDPMQRKTYQLFQLVERMFNLSLAISLTDKWGELLDNGSWSGVMGQVTSREADFAVCPIRFVLDRQPYVQYSAVLHTQNIHFLFRHPRRSHIKNIFFEPLSNQVWWCVLALVTGSTILLLFHVRLERMLSNMENRFSFVWFTMLETYLQQGPANEIFRLFSTRLLISLSCIFSFMLMQFYGAFIVGSLLSESARSIVNLQALYDSNLAIGMENISYNFPIFTNTSNQLVRDVYVKKICKSGEHNIMSLQQGAERIIQGRFAFHTAIDRMYRLLLELQMDEAEFCDLQEVMFNLPYDSGSVMPKGSPWREHLAHALLHFRATGLLQYNDKKWMVRRPDCSLFKTSQAEVDLEHFAPALFALALAMVASALVFLLELFLHWLPDFRRRLGTMST

SEQ ID NO: 21403 - DNA, 2698 bp, DROSOPHILA
ttgttgatatcgatgctttgctgaaccagctgtttaattatacaccgttcacacaaccgcgttttggttccatgtgaattatttaaatcgttctagatttaaataaaagtttttgtgtgtgttcttttttatttcttttactcctattttcagtcagtttcttcttattatcatatatcatcgtatatttatttatttgtatatgctgatacttatcattgaatgaatcatatcttaaagcttataaatgaaaaaataaatggtttatacatgtagttattaagttatttaaaatctgcccaataaaggcgcttaagagatttatttagtgcaatctgtgtttattggcctagaattttataccactaacttaactaacttcagtgccttgtgcgctccacagttcgcccccgatcgagtagctcccggaaggttttgacctcgtgtcggggtatgctctcccggtacttgggctgcatcagcccgtagatgaagtccagctccgtctcctcgtcgtgtcgtccctccggcaacttggctaggagcgctcgctgcttgcagatgaatgagtcgatcacttcgtcgtaggactgcttcgtctcgaagatctccatgtatatctggtaggaaggtttagtgggcgagaagtgatcgcgcagcagctgcagggcatccgaccaggtcttggcatcccggcgcacacccttccaccacaccacggcaatgctcttgaagagcagcggcaaaccctttagcgcatccttgtcgctgatgccctccacctctttatacgtctccacggcattgatgaactcgtccacggcatcgtgatcccgctggccactgaatctcaccgtgcagttgctaaagctacccttggatggcggttcctctttgattggccccagcgatttaatggtttctatgaatatgcgaaactgttcgtcggacatctgcgtcattttgttgccggtttcttgggtttgtttgggtttaaaaaatgagtaaacaagcgcccgaaatagaccagctcaattccgatttcaagccccaatcgttagacggttggggggcaactggcaatttcgcttgttgtgaaatgaaaagccacattgctctcctccctctctctttctccgtaagtaaaagctttttcgagtttcgaaaaatatccaacactctctctctcttcaacatttttgaataattggagagcacagtttgtggcggttcctccgcaaggaggccaccacgtggaaggaagccatcgctctcatccgcgaacacttctcgcccaccaagcccgcctaccagatctacatggacttcttccaaaacaagcaggacgaccatgaccccattgacaccttcgtcatccagaagcgagcgctgctggcccagctgcccagcggtcgccacgacgaggaaacggaactggatcttctgttcggtctgctgaacatcaagtaccgcaagcacatctcccgccacagtgtccataccttcaaggatctcctggaacagggccgcatcatcgagcacaacaaccaggaggacgaggaacagcttgccacagcaaagaacacccgtggctccaagcgcaccacccgctgcacctactgcagtttccgggggcacaccttcgacaactgccgtaagcgccagaaggatcggcaggaggagcagcacgaggagtaggcgacaaaaagaacatcaaatacccaacaggcagcagccaacgtcattgatgaccttatcgctgctgccgcccacccaaacagaacttttcgtagcctcgccagccgatcgacgtcagagagagcccaacaaccggagagctggagatggggagcagccacatcaacagcagcaacagcagccacatctcttcatactcttcatactcactggcaatcggcgtgccggtaagcctcgactagcttctgaaatccacaaatccacgctgtttgtattgctattcgcaatgcctcgaaaacggctctattttcatataatttcacgccgacttgcggctactttggcacagaacgccagcttttggaaagcaataatttttattgcaacattgaacctttatttgcaactagaaactagatttcgagaatcatcgggcggggcggctgaggatctggcatttcgtccgtaagatcggttattcgcaatggaggaatatgatattcgaaccaaatggcgggtgaagtgcctcggcatggagctccattttcttcgaatcttatgttttgacattgcgagtctgaaatggatgttgcctgatctccagccgccccgcacaaccgttgattctcacaaccgccggctccactttgtgccggtcagcggagaaaaagcgattatttggctatcaaaagatatgatcactgtgttgagagacatggcaatcatcgctattgtaaccatatatttgctgatttttcgtctgatcctggtcctttgtgaagctagcaaaaaaccccccgcccggtgaatgcccacttagatccttttgcaggaggatttcgacggccctgaaggtgggcgccacccgtttcgtgatgattcactctgagcaataataccaaaaacatagaccttccctctcttattggctctccccaatgcctcaagctttttcgaagttcgatttcacaacaggcggatataaaagggctgcaatgtg

SEQ ID NO: 21404 - DNA, 549 bp, DROSOPHILA
atgagtaaacaagcgcccgaaatagaccagctcaattccgatttcaagccccaatcgttagacgagcacagtttgtggcggttcctccgcaaggaggccaccacgtggaaggaagccatcgctctcatccgcgaacacttctcgcccaccaagcccgcctaccagatctacatggacttcttccaaaacaagcaggacgaccatgaccccattgacaccttcgtcatccagaagcgagcgctgctggcccagctgcccagcggtcgccacgacgaggaaacggaactggatcttctgttcggtctgctgaacatcaagtaccgcaagcacatctcccgccacagtgtccataccttcaaggatctcctggaacagggccgcatcatcgagcacaacaaccaggaggacgaggaacagcttgccacagcaaagaacacccgtggctccaagcgcaccacccgctgcacctactgcagtttccgggggcacaccttcgacaactgccgtaagcgccagaaggatcggcaggaggagcagcacgaggagtag

SEQ ID NO: 21405 - protein, 182 aa, DROSOPHILA
MSKQAPEIDQLNSDFKPQSLDEHSLWRFLRKEATTWKEAIALIREHFSPTKPAYQIYMDFFQNKQDDHDPIDTFVIQKRALLAQLPSGRHDEETELDLLFGLLNIKYRKHISRHSVHTFKDLLEQGRIIEHNNQEDEEQLATAKNTRGSKRTTRCTYCSFRGHTFDNCRKRQKDRQEEQHEE

SEQ ID NO: 21406 - DNA, 4202 bp, DROSOPHILA
tggcgttttgtgttacccacagattcctggcccagagggaggcggaactggccgagctgcgccgtttggaggctgaggagctgcgcttgcaggcggagaaggagcgtcgcctgcgacaagatgcgattgccaaggagctggacgctgagatgcagaagagcgtgacggcggccaagttgctccagggacacattgccagtctggtgccggaggtgctggagaacattgagccggccagcgatgccgttaagaaggagcagcttatgaagagcgtctgcccgtggttgtccgccgaggtggccgaggaagtgggccatatagtggactcgcgcgagattctcaccgccatcattcaggagattatcaagcagcgtgccgagatctatgccggctacaaggaacctgaatcggaaccatccggaccggatgcgggcgtttgtgaggaggagggctgtgccatcgatgagatggaggcgtgtccctgcgaatcggaaacggaaatggaggagtgccccgaaccgccaccaccggctcctcatctctaagtgattgcgttcgagttttagttcatatatatatttcgagtgggatactgattccgcacacatgtaacactaacacactcctgctattaaatcaaggttggctgcaactttgtggttgtgtctggtgaagaactcaattcgccgcaggattcgaatcgagcctgggcgccaaacacaattgcatagcggcggcggcgaaatggcatcgaaaaaatggaatggcatattgtaaactggatacttgttaaaggtttttgtgttaccgaaaattcaaccaataaagctcaacaaaataagccgaacaaaacattttagaaaatattttaaacggttgttaaattaaattaaaatattaatagagccaagcaatttgaaatttcaatgttaccttggtatttaaggggtctgcatgtacggtcacactgcacgtgacgtcacattgttttttccataccgaattaatgaatcaccactgaccgaatttccttgttttcacaactaattcggaagtccagggtgtagtgaagatgttttccagcggccccaattacaacaaactgaagaccaatcttcgattggctctcaatcgcctgaaattgctggagaagaagaaggcggagctgacgcaaaagtccaggaaggaaatagccgactatttggccacgggcaaaacggaaagggcgaggattcgcgtggagcacatcattaggtgggtgcaggaatatatgagccattcttatacctccatatatcgtatatatcgtacatcatagggaggactacttggtggaggcaatggaaatggtggagatgtactgcgacctgttgctcgccagattcggcctcatcacccagatgaaggagctggacacagggatcgctgagccggtggccagcttggtttgggtgtgtccccgcctacagagcgatatagccgagctgaagatcatatcggacatatttgtgaccaaatacggtccacagttcgccgagcaatcgagaaccgccactggcgagcactatgtgtccgagaaactcatgcacaagctgacgctgcaggcaccacccaagcttttggtggagaattacctcattgccattgccaagaactacaacatcgaatacgaaccggatccgcaggttatgcaggaggatcagccacagcagccgcatctgattgacctctccgatcggaacaacttgagcggaggcggaggtgctggcggcggtggtgctgcgccgccacaaatgggcttcattggctatccggctatgccagcactgcccgacatgccgatgccaccgagcgcaaagcccttcaattacccacccttcggtggaggtggtggcggcggaggaggtggagctccagctggtgcatatgctctaccccatcccgtgcaggcaccgccgccgtttgcctacaatataccgcccaatcagccgccaacgcatgcagtcctgcctgccaaatgtgccgaggagaaggatctgaacaccaactttatcgatgtaaatatgcttgtctaattgtctcattgcaacacagatggaaaggggatatttatagtttatgcagttgcaatcacattagttataaattagtttgaatcactcgaatagtattagctaattattgcgccaacttaatcgctttgaagccagtttttactaacatcttattctattggcctcataaagtgacactttcgattgcaactgcagtaaaggtatacatatatcctttatgaaaatttagttaataagtaagctttggcatgttttgcatgaatcttgggctgttgcagcgtgaagcgaacaacacggatggctcgggcagcccggatgagaatattttggtaggttatctctgtgtagaatgctgttaaagccaacaactaactcgcttatcgttctgctatcaccactaaacaaacgaaaaacgcttctatgggctctcctccaccgctcttgcctatctctgtgtaagtccagtcatccaagtgattcatagtttactgtccagtgttatcatttcgctcgtcttgatgttccccattgatttgttatgccagtgttttcattttttatttgccttatcttttctttaattttgcctaacagcgccccaaacccgaaaatgatccgccgccgcgttacacctccattaatcctgtaaatctccaggtcaggacattggatttgatcaaaccaagcacatactttattattacgtttatagcatcaaacctaagttttctgaaaatttccaaagatttaaattttgatttaagaaaccccgattaacactaaattgtacaatgtacactttatttactaaattttatatggctataaagcatcagaaaatgaggtttctttaggttttgcaatataaaaacatttattaatttgcttacttactttacccttcgcagaatgccaacaaaccgaaaccacaaccccgatccaagctgccaccgggtaatcccacgctaccaagtgctcctccggcattggacttcccctcgctgcccaacgttcccaacgatctgccagatattccgggcgcaggtgccgagaagaagaacgacgaggatgagattgatttcgatgacctgtcacgtcgcttcgagaaccttaagaagcgaaagtaaagctggccagcagatcaccttttaagtctacagtatatttgttataatctctgtcctgttctacattaataatcacgtatatgtgtaaggaactattgatcattttgttttttcgattaagtagttaatcagacttcaaaaatgtataatctgaattgaaagatggttgacctattgcttttcatattcgcaatcttgattcatctaaaaacagcctaaagattaaaatactaacagattaaattctgtgtacttatcagctttatgtttcacataaatatcaacaagattacaaagaaaaacaaaaaattttaaagggattgtattgcctagaagagttcctcgctctccaccacttccttcagctcgagcagctccagcagtcccttacccttcgtttcgttccttaccagctcatcaatgacacgatattggccaggatctatgagcaaggttaagtgcaaggtggcctcgtcccattcctcgtgctccactgcgttggccaacttgaccaccgattccttgagcttgccaccgccctcctttccagcaaagctaacgcgcagcttcatgcgcgacctctcgatgggcatatggtccttgagaatcttgatggcctccagtgtgttctgcttggtgttcctgttcatcttaacggagaagtgggcatccttcagggatttctcgatgatggaggcgggatatggacgacgcgtctctggatttacacacaacgcagccacggaattaactatactatttagttgcgtgtccagacaactttggcgctccttttccgacacctgcagttctcctttgctgaggatctccttgcaaatctcagtctcgtctgttttattgaaggccttttgcagctcgtcctttttggccgcctgtcctttggagacattggtgaacacggtatgggtttgcaggacctcatcgatgtccttttcgctaagcatatacaataaagtaattagatttaggtaaagcctat

SEQ ID NO: 21407 - DNA, 1326 bp, DROSOPHILA
gaattaatgaatcaccactgaccgaatttccttgttttcacaactaattcggaagtccagggtgtagtgaagatgttttccagcggccccaattacaacaaactgaagaccaatcttcgattggctctcaatcgcctgaaattgctggagaagaagaaggcggagctgacgcaaaagtccaggaaggaaatagccgactatttggccacgggcaaaacggaaagggcgaggattcgcgtggagcacatcattagggaggactacttggtggaggcaatggaaatggtggagatgtactgcgacctgttgctcgccagattcggcctcatcacccagatgaaggagctggacacagggatcgctgagccggtggccagcttggtttgggtgtgtccccgcctacagagcgatatagccgagctgaagatcatatcggacatatttgtgaccaaatacggtccacagttcgccgagcaatcgagaaccgccactggcgagcactatgtgtccgagaaactcatgcacaagctgacgctgcaggcaccacccaagcttttggtggagaattacctcattgccattgccaagaactacaacatcgaatacgaaccggatccgcaggttatgcaggaggatcagccacagcagccgcatctgattgacctctccgatcggaacaacttgagcggaggcggaggtgctggcggcggtggtgctgcgccgccacaaatgggcttcattggctatccggctatgccagcactgcccgacatgccgatgccaccgagcgcaaagcccttcaattacccacccttcggtggaggtggtggcggcggaggaggtggagctccagctggtgcatatgctctaccccatcccgtgcaggcaccgccgccgtttgcctacaatataccgcccaatcagccgccaacgcatgcagtcctgcctgccaaatgtgccgaggagaaggatctgaacaccaactttatcgatcgtgaagcgaacaacacggatggctcgggcagcccggatgagaatattttgcgccccaaacccgaaaatgatccgccgccgcgttacacctccattaatcctgtaaatctccagaatgccaacaaaccgaaaccacaaccccgatccaagctgccaccgggtaatcccacgctaccaagtgctcctccggcattggacttcccctcgctgcccaacgttcccaacgatctgccagatattccgggcgcaggtgccgagaagaagaacgacgaggatgagattgatttcgatgacctgtcacgtcgcttcgagaaccttaagaagcgaaagtaa

SEQ ID NO: 21408 - protein, 417 aa, DROSOPHILA
MFSSGPNYNKLKTNLRLALNRLKLLEKKKAELTQKSRKEIADYLATGKTERARIRVEHIIREDYLVEAMEMVEMYCDLLLARFGLITQMKELDTGIAEPVASLVWVCPRLQSDIAELKIISDIFVTKYGPQFAEQSRTATGEHYVSEKLMHKLTLQAPPKLLVENYLIAIAKNYNIEYEPDPQVMQEDQPQQPHLIDLSDRNNLSGGGGAGGGGAAPPQMGFIGYPAMPALPDMPMPPSAKPFNYPPFGGGGGGGGGGAPAGAYALPHPVQAPPPFAYNIPPNQPPTHAVLPAKCAEEKDLNTNFIDREANNTDGSGSPDENILRPKPENDPPPRYTSINPVNLQNANKPKPQPRSKLPPGNPTLPSAPPALDFPSLPNVPNDLPDIPGAGAEKKNDEDEIDFDDLSRRFENLKKRK

SEQ ID NO: 21409 - DNA, 3215 bp, DROSOPHILA
acagctcgtaaaagttggtgggtaaactcaaaagtatccggaaggatatcgcgaccgcggctgggaatttgaatacaaacgcaacgcttcactcgtaaacttaaagctatttatttaattttttttttaagccagcaatttaagttaagagcggcgtagaaaaaccgccagaagcgccgcagtcgagggaattgagagagacaaaagaagacattgtttttcccgggaatcaattacatcctcagtgcgcccaaggaactcatccccatttcccatttcttcgtccttttcactcctctatcgactcgcactggctgcaagcgatttttttgattagcttccgcccacacagaattctggcgcggatgtggaagccaacattcggaggggcactagtgcatggcgggcagcaaaaggagcagcagcaggtaataaaataataaaataataaaattctgttttgatttttgccttccttccccttggattcccttgaacattgcttcaagtacgatgacgtacacgtgcccaaaataagcaacagcttgctaacagcatttggttggccaaatacgaggcagcgggtatatcgaacttaacgagatggatgcccaataattctcttttgttcgaaaataacataatattttaaattcgatttaaaagcagagagaacgctacaatcaagtcccacgactatcagatacggagtacttttatataatatatatatacttcatagtatcggttaggcccctttgaccaatcacgatctagcatactccaacattaaagaggtattaatatattccaaaatggtttattaaaaagtatctaaatagacgaaatgaacaatattttaaacacgtgaataaagggtatttgccagcttgtaagtaaaatgttacgttcgtttttcgtttgtatttttcgatgattcgcgtgttatggcaaccagttgttgaaaaagcaagaagcacatcaaacagcatacatggcctcaactcctggcatcggcgaatccaatgcgatgcctctccatgtcgaactcagtatagtatttgcccaaaaacacatcccccagaatccagagcggtccactgggcgatggcaggtccacggcaatgaacgccgaggagcagatccttcgatcctggtagatatcccgaaagacatactcgtgagactccaggaaaaatctacgcccacccaaggtaaaggtgattttgggcaggtctggtacgctgtcgcacggaactagaaactgtccaaaggaggagggagttcccccaatggattcattgataagtatagcctggtcgtagggcaatgccaggaaagaggtgcccgtgtcgataatcacttcacatccctgctgacatagctcgagattccggataactgctgaatccattttcacctgccaataggcacgatggctcacctggacataagtaaagttgccggtgtagtaatgcggattggatccgccaaagaagatggctccaccatccttttcgccatttctgctaaggtaaacactgaatatgggtttcgttagaagtccttgctccatcatcgcatagaatggtggcttgatgcgctgcatagagatgctgcgataggccaatccaaagatgccgtcgaattttgctgccaggaagatgggacccggcatttcggtggcctccgcgaaggtctgatcccgaatctctaggccagccacccgaacggtgtcggtggaaaggaagccggacagactgccgctgccatagtggatggcaaagtggtctcccctcacctggtgactggtcgaccgcttggcaaagtagcgattgtgcacacgacaggccaccattgtggacgcacacgtggcggatggcacccagagattcgaggaacccgtatcgaatatcaccttgaatgtctgcggcggcgtaccaatggtgatggggccaaagtactgggcgtctaggtaattgctcagtggtgtgctcttcaccgccgagttccactcgccacggaaatggctgacctcctcggcgtactttaaacgcagccggtccatccggatgcccaacttctcgaagcgatgacgggcggaggggaagcggcgcaggggaacgcggtacagctgcagcttgcaactgaccggatgttgaaactgtaccggaagtatgaagagcaccggaagtagcgaaacgagcagccacataatgctatcaaaagcagtcgataaccaagtactgttgaaaaccaggcaataaaatatcaaagcaaaaaggaaaggcaacttgccgctttctttgttgtgtaataaattgtgtttaaatatttcaattcagtatgccaacgcttcgattacagatatgaagtacattccttaaggatgagacatacggttacccttggagaaaaacctttgaaggagctcaaatttataaatataaataataaatctgaagattgttgcgaaacagaaaagcactttaagcaatcgaaatataacggcacggcttgagcatttaaaatatgtttaatttttctcgaaaaaaactcgatatacccaattcattgaaataaccgcccggcagcataaaaatttccatgaaaatgtaattggaaatgtgaaacgtctgtgtgttggcagcagtttggaatcgagctgtgatcgaatgtgtttttgttgctgttggaaaagacgacgaggaaaaccttttcaatgcaatgtgaaaagcgtctgtaggtgttgagtatatgttgaatcgatgtgtgtactcgactgaaaaaaaaatatgagtgtgtgcaccgttgacagggtcttctaattgtacttgctgccattctggggagctgtttgattgcactttcatttgtgcactgccatttgcgtaaatgtgtgctcaattgcttggatacggaatgtctatcaaaatgttcatatcgtttattgaagttgttttaaagcaaactgcaagggcctttggcgtacccatcatacgtctcgatgatccccaattaaagtgtcaggataatgcgacaataacaaaggccttcagcaaagaaggagagaaggacacaaatcccgaaaacctcttcggacgaccttctcgccctgaaagccagctgtcaatggcaggccacacctgtgctaatgggccggggaatatgacaattcccggggctccggctccttggcattattactttcagca

SEQ ID NO: 21410 - DNA, 1215 bp, DROSOPHILA
atgtggctgctcgtttcgctacttccggtgctcttcatacttccggtacagtttcaacatccggtcagttgcaagctgcagctgtaccgcgttcccctgcgccgcttcccctccgcccgtcatcgcttcgagaagttgggcatccggatggaccggctgcgtttaaagtacgccgaggaggtcagccatttccgtggcgagtggaactcggcggtgaagagcacaccactgagcaattacctagacgcccagtactttggccccatcaccattggtacgccgccgcagacattcaaggtgatattcgatacgggttcctcgaatctctgggtgccatccgccacgtgtgcgtccacaatggtggcctgtcgtgtgcacaatcgctactttgccaagcggtcgaccagtcaccaggtgaggggagaccactttgccatccactatggcagcggcagtctgtccggcttcctttccaccgacaccgttcgggtggctggcctagagattcgggatcagaccttcgcggaggccaccgaaatgccgggtcccatcttcctggcagcaaaattcgacggcatctttggattggcctatcgcagcatctctatgcagcgcatcaagccaccattctatgcgatgatggagcaaggacttctaacgaaacccatattcagtgtttaccttagcagaaatggcgaaaaggatggtggagccatcttctttggcggatccaatccgcattactacaccggcaactttacttatgtccaggtgagccatcgtgcctattggcaggtgaaaatggattcagcagttatccggaatctcgagctatgtcagcagggatgtgaagtgattatcgacacgggcacctctttcctggcattgccctacgaccaggctatacttatcaatgaatccattgggggaactccctcctcctttggacagtttctagttccgtgcgacagcgtaccagacctgcccaaaatcacctttaccttgggtgggcgtagatttttcctggagtctcacgagtatgtctttcgggatatctaccaggatcgaaggatctgctcctcggcgttcattgccgtggacctgccatcgcccagtggaccgctctggattctgggggatgtgtttttgggcaaatactatactgagttcgacatggagaggcatcgcattggattcgccgatgccaggagttga

SEQ ID NO: 21411 - protein, 404 aa, DROSOPHILA
MWLLVSLLPVLFILPVQFQHPVSCKLQLYRVPLRRFPSARHRFEKLGIRMDRLRLKYAEEVSHFRGEWNSAVKSTPLSNYLDAQYFGPITIGTPPQTFKVIFDTGSSNLWVPSATCASTMVACRVHNRYFAKRSTSHQVRGDHFAIHYGSGSLSGFLSTDTVRVAGLEIRDQTFAEATEMPGPIFLAAKFDGIFGLAYRSISMQRIKPPFYAMMEQGLLTKPIFSVYLSRNGEKDGGAIFFGGSNPHYYTGNFTYVQVSHRAYWQVKMDSAVIRNLELCQQGCEVIIDTGTSFLALPYDQAILINESIGGTPSSFGQFLVPCDSVPDLPKITFTLGGRRFFLESHEYVFRDIYQDRRICSSAFIAVDLPSPSGPLWILGDVFLGKYYTEFDMERHRIGFADARS

SEQ ID NO: 21412 - DNA, 3764 bp, DROSOPHILA
agataggcataaatcatttaaccccaaacagactggtcatatcgaacatgaaaatgggcgttttccttttattttatcggcaattttagatcgcgcggatttgttaggtattttgttgttttttttgttttttttgctgcctatgcggcgtatgagtgatgctgaatttaggtctcacctcagccacttcctcggggaattgcagcgtcagttgcaatgttttgttcacttgaacataaatcgaaagctgacatttgcctcgatttggtcacgccaacagcatcatcatcgccatcagacgaacggcctcaaatgtcgcgcattttggcgtgatttcgagtcactaaccttggccttagaacgcgctgctgcaatcgcttggttagccgacgctgcagatgcatatgcatgcaacgatcgtctaacggcagttagccattattctcgactactccacagctgttagcaggcgacctaggcgcccaacccagtcatcgctggcattgcaaaactaaaaataaacagccagaccgaaaacaatatgtgcagtaatacgactaaccgttggatccgtccccgtctggttgtctgtgcgattaattgcacattgattacagacaattgcagtgggtagagtgagaaaaacggaaatgaaaaccagatatactgctaaaaacgcggccaaatcgcgcgtgaatcgcttcaaaaccgcaatgtaaacgccagcggcaaggcggaagcaaaaatgtagagattaccgattttaagtgtaaattttgcaattttattttcaggaccaggcttcgtagttgggtgagttcaataaatacttacaggctaggcaaacatgtgtaacacaatctttagttagcaactaatacaacttatcgaacaggaggcggaggcggaggcggagaagtaggcggggacgttgcagcggcagtgacagttgcccgcctgctaggcaaacgagcgacagccgctgccataggaataaatactacaacttcagctgcctcttctcctgcttccgatcgcgctgcaaaaggaactcgcgcctcagatcgctggatcgcatctctagtatgcagttcagcttgttgtggatctgctccgccgtgtgggtgtccgtatcgaagtcgtagtgcttaaagcgaatattgctgcttgaaaagagtccggaagagtgacccggactgctgggcgagtgggcaatcccaccactgccgcttcccgcattcagtgtggttacgctggcgttgatcggcgccgaagtgcagcccgtggagaaggaaggggacgaggagtttgacttcagccagatgcgcaacagagccttcaggtggcgtcgctccaaaatctcgcagtgagcaacaaagtcaatgggagtggatacgggcttcttctgcggccagaacttggcattcttgcactgatcgatctctattctctcaccagatattcccagagtcacatcggatttgaagaacctcttgtcgatgatgttgaggcggaaagtacgatgcatgggtgcttccagcatatcgttgtgattcaacaatcgcttctcatactccttgacattatcgtgtggactatcgcctcctccacctcctccacccggatcactagttcctccatttaggctaatattttgcagagccttgacagccgcatcggacagagctgtcttgtcttccacggaagtcatggatttactgcccagctggctgtggtaatcaactcgcgtcactggagccaatggccgacgctctgcgagggtcagttgggagaagccaaacttagagcagggttcgcgattgtccaacggtgggaagtcttccatatcatcattatcctctgtcatatacaaagcgtaatgctgcagggacttcaaaggaacgtcgggatattgtaaggaggtcctgtagcagacaaaaccaattacctcctggattttggcagtggctacgacgcagatcttcaacgggtagttgcgatccggctcgggaagcatatttaaaaacacgtttatccgtttcgtttgcatacccacttgggaggtgccatcgaagcgggcgaattcaatgaagcgattctgtgcttgctttggacttttggccaactgttcagtgagctggctctgaacaccctcatctgacagatcatcgtcgttggctttcggttcatttttaactcgctcagctttgctgaggggcaactctttgcgtttaaagaaatcatcgctctccggtggctgcacttcctcctggtagttaacactcttgatgcgcgccgcccttcgcttggcaatatccagtttctctagtttttgggcagtgttggagcgaaagcggtgggcgcccacctccggatacatttggatgtcaaaggagtgcgtggacatgtcctcctcgtcgtcgctgaggtccagtcccggatagcagatgaagtccacttcctggagtggcgcatccggatgccgggtgttccgctccggtgttgtcccgccccccgtcggcggtgtcttgtgcgcccgtcgccaatgatagtgatctcctccagcgcccgagttaccgaattttcgcaaatagtgtttgggcatgtcatcgctcagcatcaccgtctcgcacattccggtgtcgtccgtggatatgaaggagttgcggatgtgggagagcagccaatgctggttggagtaggtcgccatggtagtaaacaaaagaaaatctctttttcaaaattaatttctatttatctcagcatctcggaaaaatgcactaacgcctttggattatctagagatggaacattgcggttgttactggtcactttttggtggtggtaacgaatagcacgcacaagtcaccgttcccaacagaacataagaggaatacctactacatgaatatacttaaattatgcaattaagataaaggttataccaagtacttattatcaaagtaatattttgaatttacatgcaagtctagttgtagcggtactcgttaaatctggtcttttttcattcaacgcaaacggtcactctaggccaccatatgacttttttctggacgcgaaaaattgccgagttacagaataagttaattatagtgagtttatcgtcgcctgacctgccgtttttcgatgtccacttcttgagaactcccaatcggatagagtcgatgtgctagccaacggcgaaatggcgggcatggaggtagaattcgacgagacggtggccaatcagttcagctgcaagcgctgcgaccgagtaagtgtgtgggaaatgtctcctattacctcaatctaaccactatccattgatgcagaccttcagaagcaagcgggatcagacgttgcatcgacaagaggtgcacaaccacaacaagaccacctacgagtgcaagctgtgcgcgaagagcttctgcaattcggggaacctggatcgtcacatgaaggtgcacaacgatgtgcggcctttcgtgtgtaacatttgctcgaaggccttcgcccaggctgtgaacctgcagcgccactatgcggtgcacagcggggagcggccattcacctgtaacttctgcaacaagtccttcacccagcagagcaacatgaagcgccacaagatgacacacactggcgagaagccgttccgctgccagcgatgcggcaggtacttctcccagctggttaacctcaagaaacacaagcttggccacctcaacgccaagccctaccagtgtaattactgcgagaagggcttc

SEQ ID NO: 21413 - DNA, 1764 bp, DROSOPHILA
gctgagataaatagaaattaattttgaaaaagagattttcttttgtttactaccatggcgacctactccaaccagcattggctgctctcccacatccgcaactccttcatatccacggacgacaccggaatgtgcgagacggtgatgctgagcgatgacatgcccaaacactatttgcgaaaattcggtaactcgggcgctggaggagatcactatcattggcgacgggcgcacaagacaccgccgacggggggcgggacaacaccggagcggaacacccggcatccggatgcgccactccaggaagtggacttcatctgctatccgggactggacctcagcgacgacgaggaggacatgtccacgcactcctttgacatccaaatgtatccggaggtgggcgcccaccgctttcgctccaacactgcccaaaaactagagaaactggatattgccaagcgaagggcggcgcgcatcaagagtgttaactaccaggaggaagtgcagccaccggagagcgatgatttctttaaacgcaaagagttgcccctcagcaaagctgagcgagttaaaaatgaaccgaaagccaacgacgatgatctgtcagatgagggtgttcagagccagctcactgaacagttggccaaaagtccaaagcaagcacagaatcgcttcattgaattcgcccgcttcgatggcacctcccaagtgggtatgcaaacgaaacggataaacgtgtttttaaatatgcttcccgagccggatcgcaactacccgttgaagatctgcgtcgtagccactgccaaaatccaggaggtaattggttttgtctgctacaggacctccttacaatatcccgacgttcctttgaagtccctgcagcattacgctttgtatatgacagaggataatgatgatatggaagacttcccaccgttggacaatcgcgaaccctgctctaagtttggcttctcccaactgaccctcgcagagcgtcggccattggctccagtgacgcgagttgattaccacagccagctgggcagtaaatccatgacttccgtggaagacaagacagctctgtccgatgcggctgtcaaggctctgcaaaatattagcctaaatggaggaactagtgatccgggtggaggaggtggaggaggcgatagtccacacgataatgtcaaggagtatgagaagcgattgttgaatcacaacgatatgctggaagcacccatgcatcgtactttccgcctcaacatcatcgacaagaggttcttcaaatccgatgtgactctgggaatatctggtgagagaatagagatcgatcagtgcaagaatgccaagttctggccgcagaagaagcccgtatccactcccattgactttgttgctcactgcgagattttggagcgacgccacctgaaggctctgttgcgcatctggctgaagtcaaactcctcgtccccttccttctccacgggctgcacttcggcgccgatcaacgccagcgtaaccacactgaatgcgggaagcggcagtggtgggattgcccactcgcccagcagtccgggtcactcttccggactcttttcaagcagcaatattcgctttaagcactacgacttcgatacggacacccacacggcggagcagatccacaacaagctgaactgcatactagagatgcgatccagcgatctgaggcgcgagttccttttgcagcgcgatcggaagcaggagaagaggcagctgaagttgtag

SEQ ID NO: 21414 - protein, 569 aa, DROSOPHILA
MATYSNQHWLLSHIRNSFISTDDTGMCETVMLSDDMPKHYLRKFGNSGAGGDHYHWRRAHKTPPTGGGTTPERNTRHPDAPLQEVDFICYPGLDLSDDEEDMSTHSFDIQMYPEVGAHRFRSNTAQKLEKLDIAKRRAARIKSVNYQEEVQPPESDDFFKRKELPLSKAERVKNEPKANDDDLSDEGVQSQLTEQLAKSPKQAQNRFIEFARFDGTSQVGMQTKRINVFLNMLPEPDRNYPLKICVVATAKIQEVIGFVCYRTSLQYPDVPLKSLQHYALYMTEDNDDMEDFPPLDNREPCSKFGFSQLTLAERRPLAPVTRVDYHSQLGSKSMTSVEDKTALSDAAVKALQNISLNGGTSDPGGGGGGGDSPHDNVKEYEKRLLNHNDMLEAPMHRTFRLNIIDKRFFKSDVTLGISGERIEIDQCKNAKFWPQKKPVSTPIDFVAHCEILERRHLKALLRIWLKSNSSSPSFSTGCTSAPINASVTTLNAGSGSGGIAHSPSSPGHSSGLFSSSNIRFKHYDFDTDTHTAEQIHNKLNCILEMRSSDLRREFLLQRDRKQEKRQLKL

SEQ ID NO: 21415 - DNA, 6610 bp, DROSOPHILA
gactcaaacagcccatttagttcaggctcgtgtggtgccacagcagacccaaaatgttgtctaccagcagttgcaggtgcaaaaggtgcagccgcagcaacagcagcaggctccacagcagcagcaaccgcaattggtggctcagcagcagccgcagctagtggccacctctgctgccggtggcactcaactagtacgcgcctcgtttaggaaatcgccccgaggtggagctgtgctggccaggccgggcacactaattaccaccaggcctacacttacgcccacaacaattgtgcggcaagttcgtccgcgaggaggtgcagtgcccggcggactggttaggaatatgcgacctgcgggcgtacgacccactcgagcgcagttggtggtgcagactagcgccagcggcgagggacagaccatgctagtgactcagggccaaatgaagcacattaccatcagcacgaatctcggccagccgcaacaacaacagcagcagcagatgcagcaacagccgcgccacatctaccgcacacacatggtaaccgacggaaatcctcagcagcagcagcagcaggcggcgcaacagcagccgcagcagcaccagcaaatgctgatgatgcgccatggtccggttcgttacagagctccggtgagctcagctgtcgcagcgccagttcaagcgcctgctcctacggccgcaggtggaggtgtccaaactagtaatataggcatggatttggaagagcgcatagaggcggcagtgctgaaaaaggagcagcagaagccccagccaacggctcagccagtggcctccaatcaactacagcccatgcagataggaacgggaactacactgaccacctactatccagcaggaactgcctcacaagaagaggaacagcaacagcagcagcagcaacaacaacagcagcagcagcagcagcagcaagtggtgcagagtcagcaacagggaatacgaccacccagtggagcaagcatgactttggcggagtacaagaagaggcaaaccctgtcggcctcaccggctccagttccgccttcaaatcccggacttgcgccaatgagagccactccacctggaaccatggttcgcccaacggctaagataacacccacgcaacatgctggcgccttgccccccggcactaggatcatgcagccacagaggccagtaccagccgcagtggcggctccaattccagcgccagcggcggtcacgcaaggatcatccgtgatgaagacatcgcacaataactacgagattcactcgcagcatgttctgaataaccgagccggtcaggaaatcgccgagcgcgataagaatagtgccaagatgctggtgatcctggccagcggagagcaacgtctgatcacctttacgcttccacgtgagtcctgcaccgtgcaggatctcctcgagcaggtcggcgtgccctttgaccacaacaccaccattcagtgtgtcgagcatcgcggtgccaatgtggactttgtggtcaccgtcggatttacggtgcacgagtcggccagcgaactgatttcacgggcggaggagagtctgcaaatgaaccgttcgcaggagaatcaagctgccgtcgccggagcagcagcagcagccaattccaatcctgccacaacgagtgcctcgcctgcctatgcccaagcgaatgccgctgccgagcaggcgaaacgcgaagcggccagttcggcaagtgggaacacagttgttgggacagtttcctccgccggttccgctggagccactccgtcggagggcaggaagctgatcgacggttttctggccgtctgccagctgtgtggattcactggcgtggatcacgcccgctgcgagcggtgcaaacgcgtcttcccggagccgccgaaacgcaaatcctacgtgcccaagaatagtgctgcatcctcgccagcctcgtcgtcatccagcgaacccgtatctgctgtcccaacggctgcggataagaaacgagagttggcggcagctagattcaacaataaaatggctggagctaacttcgcagtcggagttggagttcgcggacgcggatccatggccatgagaggtggcagagccaggggaggcagacgggtgcccgaagtggatcccgtggtgctgctgagcagcgaggatgaggccgaggggggcgaaggcacctcggactcgagcaacgtaagttactcctgtcaattactttctatgacttgcatttatttattatttcgttatctcttgcagcaaccaacaaacaactccaagctgaactccaatggaaatctccacgaactttccgccgcctttccctgcgagccaaatctgccagagatcgatgaggagcccttgtacaaaggtaggatttaattatatcattcacatatcatattcgattccgcgaacttggtttaaaaacttcctattttctgaaaatttatctatttccttagaatagatatcatttgatatataaaaaagcgttaaaatatttaatttatgagatacaatttgtgatctaaatcggataataacatttctgagatacattatttgactaatacaaaagaacagatacaaagaatctctaagatacgaaaacctaacatcgcgatatacattttgtttgaatgtcagatacaaagagtgttacagtatgccgatatatcaatttattttaaagatatattgaatttattttcaaatcatattgaagtgtcagaaatttcagaaattttaatagtttaccaaaaattcacataagacatttagcttttttttgcaaatctatttcattttgcgctagatctagccgtttttagctagtagcaccacttgtgcatagcaatgttgtgtgtgcagttattttgtgttggcaatgccacaggccaagagttactacgtttttcccgctaggtggagctctgaccagccagagcacgccatttttacggtcgccgaagaagaagcagacaagcaaagcgaatgcgtgaaaacacatcgttttcctcattcttttgcaattttctcagagtagcaaggttttttagtactctatatttaattacttaacgactcagagtagacgaagcattctaccgcaatgaacgatgaaggtaaatgttgggcgaaatcaaaaactagcgagtgaatgaaaaatgtgactggtggccacgaggaaaatggtacaattaaataacaactacgaaaatgttccaaccattgcagatttctcccgtggcgatgttagagacttgtcggatatacccgaagcggatcaattttccgcctccttgaaatgcagctgcgtgcgtctggtgccctacagattcgagattaccgagccggtaagtagtcaccccctctatacactatctcccctgccctggaaatgtgtataatacaattgactattaattgtatattcgtaataccacaggtatgcttcaccacgaagggcgttcgcattgctggcatcctgaaggacaaggacgagaagttcgagctgaacatccacaaacaggaggtgatcaaggtgatagcccacttcggcaacgttgagcccgcccagccactggtcacgctatatctcctcaagacgtgtgccgaatacgtaaagaaccagctcaagctgcccgacgatcagcatcacgaacgtgagtttacgtccataaacaagcacctcatactaaattaactaatcaatgctaattaattcttgcatttgtagataccggcttcaagacgcacagctatcacactcgccgtctgatcctgttgttcgacagcatatccgtgtccgcccgtggtaatatcaagtctatgttcagttgtgtagacgagatatcctcgacagatgccgccgagattctcgagaggatcgcggactccgatcgcaagacgcaggacaagagctcgcagccaccgcctcgccaactgagagcagacgagcaggttagtctgctgatgtatccgccgaagggaacgggtggcctgtgcatacgcatggaggacttcgtctgcctcacaaaggagtcctacctcaacgacatcatcattgacttctatctgctctggctgaggaacacgctgattccggagcctcaacgcgaaagaacgcatatcttcagcacattcttttacaagagactcacaacgctaacgcggccagcggacatgaagcagacggcagcacagaagcgacacgccagggtgcaaaagtggaccaagggtgtggacatcttcgataaggatttcattatagtgcccatcaatgagcagtcgcattggttcctcgccatcatttgctacccgaacttaaaaggacccgtcacgttcgatacgaaccagcctgtagagccgcagcagttgaagcgccctcgaggcaagaaggtggccctgcaaattggtaacaccaccataaccccgctgacgaaaagggcagagggaggacagcttccagcggctctgacggcagagaacgtgtgtcggatagcagacgatgagagcgaaagggatgaggccgaaggcgatgagagcgacatggcctcggaggatagtgaaaactcgaattcggccaaggaaccagcggccacgcccacctccacgacagccagcacccccagtctatccagttcgcagcccacagccaccggtccagcgaggaatattgcatccgatgatgtgcccgccgtaaagcaacctttaatccttatctttgattccctggcgggagcatcgcgtagccgcgtggtggccacactgcgagattatctcacatgcgagtaccgggtaaagaagccggatgcgcaggcgcacgtcttcaacaaggacaatatgccgggccactgcgtcaaggtgccgcagcagaacaacttcaccgattgcggcctgtatctgctgcagtatgtggagcaattcttcggcgagccaatcagagactacagactgcccatcaagcagctgaccaactggtttgacttcctcacagtgacgaaaaagcgcgaggacattgccaatctcatccagcagctgatggacgagggcaatcagcagcaacgcctcatactgccagtgatcgagttcccaacgctgaatggacagttggtggagtatccagaggacacggaaagtgccgagtttgaggaggaggagggccatgacgacgaagatccagctagtgaaatggtaagtctctaaaagatttatagctgccacatcacgatcgctaactataatatttccttcagcatgatgaaaacaatgccggcaccgacatggaagtggaccccgtgaacgaggagccagcgttggcagggaaaaccgccgcgttagcacctgcgtccacgactgcggcagcgcccacgggtaaaagattcgtgctgaagcggcgcctgcacaacggagccgtctcaagtccgaccaatggaaacggcgaggctagcagtaatggcggtgcactgataccccagctggtgagcacggcggccgcaacgacgacgggcgtttcgtccggagtcgctcatttggggccgcgtgggcccagcggtggactgaagatccggaagatagagccgtagcaccaaacgattctcgccctgcgagctcgcgatccggatgcgcacatgccccacctgcctgcgctgctccagttgccacagctgcggcaccacctgtaaatacgccattacattacatcggttattcaattctatgtatctaaacgtttgactctaaaaaactacactaaactaaaactataaataaagactaaattactatgtatgaaatacaagaaactggtgtttggactttttaagcgagtattaatgggaaaagtgagaaagttgttatagtttttggaaagtcatttgaaatggagtcatttgtttaaaaataaattcacaataatttggtttaattcctgaattaatttgcaatttcaatgatcttgaaataacttattaatttcgaacagctaaatttatatgtataacaaaaataagggttttattatattacagtagtgcgttacttgtttgttcttggggaggctttcccagcaccactttattttacaacaaatttcgtggtcgcccttgcccaaaccagtttcgcatgcctcgccatgtaggctagaatcgccatgtagatggcacctacatggtgggactccccgaggcacgttgttgaacagaatgcaatttcggccgaaattcgtataaattagcttgcagacttttgcaaacattgcatgcgcgctcaacttgaattgcagctttggatggttttgcataattttggttaatctttaattgatagccccccaacccgcgatttatgccatgtagttactttagaacatacatgacgacctacatggtgactggcacgcacacacccgcacttgtgcgtgtgaagcaacaacacacactagcacgccgccatgtagttaacggcggaaaagttaggttagactcacagctgctctcgcaaaggaggggtgggaaggcaagaaaaaaagactgttgaaggaggggtagcggagaggcgaatggcaagcgaaaagcgaccggaaga

SEQ ID NO: 21416 - DNA, 3447 bp, DROSOPHILA
atgactttggcggagtacaagaagaggcaaaccctgtcggcctcaccggctccagttccgccttcaaatcccggacttgcgccaatgagagccactccacctggaaccatggttcgcccaacggctaagataacacccacgcaacatgctggcgccttgccccccggcactaggatcatgcagccacagaggccagtaccagccgcagtggcggctccaattccagcgccagcggcggtcacgcaaggatcatccgtgatgaagacatcgcacaataactacgagattcactcgcagcatgttctgaataaccgagccggtcaggaaatcgccgagcgcgataagaatagtgccaagatgctggtgatcctggccagcggagagcaacgtctgatcacctttacgcttccacgtgagtcctgcaccgtgcaggatctcctcgagcaggtcggcgtgccctttgaccacaacaccaccattcagtgtgtcgagcatcgcggtgccaatgtggactttgtggtcaccgtcggatttacggtgcacgagtcggccagcgaactgatttcacgggcggaggagagtctgcaaatgaaccgttcgcaggagaatcaagctgccgtcgccggagcagcagcagcagccaattccaatcctgccacaacgagtgcctcgcctgcctatgcccaagcgaatgccgctgccgagcaggcgaaacgcgaagcggccagttcggcaagtgggaacacagttgttgggacagtttcctccgccggttccgctggagccactccgtcggagggcaggaagctgatcgacggttttctggccgtctgccagctgtgtggattcactggcgtggatcacgcccgctgcgagcggtgcaaacgcgtcttcccggagccgccgaaacgcaaatcctacgtgcccaagaatagtgctgcatcctcgccagcctcgtcgtcatccagcgaacccgtatctgctgtcccaacggctgcggataagaaacgagagttggcggcagctagattcaacaataaaatggctggagctaacttcgcagtcggagttggagttcgcggacgcggatccatggccatgagaggtggcagagccaggggaggcagacgggtgcccgaagtggatcccgtggtgctgctgagcagcgaggatgaggccgaggggggcgaaggcacctcggactcgagcaaccaaccaacaaacaactccaagctgaactccaatggaaatctccacgaactttccgccgcctttccctgcgagccaaatctgccagagatcgatgaggagcccttgtacaaagatttctcccgtggcgatgttagagacttgtcggatatacccgaagcggatcaattttccgcctccttgaaatgcagctgcgtgcgtctggtgccctacagattcgagattaccgagccggtatgcttcaccacgaagggcgttcgcattgctggcatcctgaaggacaaggacgagaagttcgagctgaacatccacaaacaggaggtgatcaaggtgatagcccacttcggcaacgttgagcccgcccagccactggtcacgctatatctcctcaagacgtgtgccgaatacgtaaagaaccagctcaagctgcccgacgatcagcatcacgaacataccggcttcaagacgcacagctatcacactcgccgtctgatcctgttgttcgacagcatatccgtgtccgcccgtggtaatatcaagtctatgttcagttgtgtagacgagatatcctcgacagatgccgccgagattctcgagaggatcgcggactccgatcgcaagacgcaggacaagagctcgcagccaccgcctcgccaactgagagcagacgagcaggttagtctgctgatgtatccgccgaagggaacgggtggcctgtgcatacgcatggaggacttcgtctgcctcacaaaggagtcctacctcaacgacatcatcattgacttctatctgctctggctgaggaacacgctgattccggagcctcaacgcgaaagaacgcatatcttcagcacattcttttacaagagactcacaacgctaacgcggccagcggacatgaagcagacggcagcacagaagcgacacgccagggtgcaaaagtggaccaagggtgtggacatcttcgataaggatttcattatagtgcccatcaatgagcagtcgcattggttcctcgccatcatttgctacccgaacttaaaaggacccgtcacgttcgatacgaaccagcctgtagagccgcagcagttgaagcgccctcgaggcaagaaggtggccctgcaaattggtaacaccaccataaccccgctgacgaaaagggcagagggaggacagcttccagcggctctgacggcagagaacgtgtgtcggatagcagacgatgagagcgaaagggatgaggccgaaggcgatgagagcgacatggcctcggaggatagtgaaaactcgaattcggccaaggaaccagcggccacgcccacctccacgacagccagcacccccagtctatccagttcgcagcccacagccaccggtccagcgaggaatattgcatccgatgatgtgcccgccgtaaagcaacctttaatccttatctttgattccctggcgggagcatcgcgtagccgcgtggtggccacactgcgagattatctcacatgcgagtaccgggtaaagaagccggatgcgcaggcgcacgtcttcaacaaggacaatatgccgggccactgcgtcaaggtgccgcagcagaacaacttcaccgattgcggcctgtatctgctgcagtatgtggagcaattcttcggcgagccaatcagagactacagactgcccatcaagcagctgaccaactggtttgacttcctcacagtgacgaaaaagcgcgaggacattgccaatctcatccagcagctgatggacgagggcaatcagcagcaacgcctcatactgccagtgatcgagttcccaacgctgaatggacagttggtggagtatccagaggacacggaaagtgccgagtttgaggaggaggagggccatgacgacgaagatccagctagtgaaatgcatgatgaaaacaatgccggcaccgacatggaagtggaccccgtgaacgaggagccagcgttggcagggaaaaccgccgcgttagcacctgcgtccacgactgcggcagcgcccacgggtaaaagattcgtgctgaagcggcgcctgcacaacggagccgtctcaagtccgaccaatggaaacggcgaggctagcagtaatggcggtgcactgataccccagctggtgagcacggcggccgcaacgacgacgggcgtttcgtccggagtcgctcatttggggccgcgtgggcccagcggtggactgaagatccggaagatagagccgtag

SEQ ID NO: 21417 - protein, 1148 aa, DROSOPHILA
MTLAEYKKRQTLSASPAPVPPSNPGLAPMRATPPGTMVRPTAKITPTQHAGALPPGTRIMQPQRPVPAAVAAPIPAPAAVTQGSSVMKTSHNNYEIHSQHVLNNRAGQEIAERDKNSAKMLVILASGEQRLITFTLPRESCTVQDLLEQVGVPFDHNTTIQCVEHRGANVDFVVTVGFTVHESASELISRAEESLQMNRSQENQAAVAGAAAAANSNPATTSASPAYAQANAAAEQAKREAASSASGNTVVGTVSSAGSAGATPSEGRKLIDGFLAVCQLCGFTGVDHARCERCKRVFPEPPKRKSYVPKNSAASSPASSSSSEPVSAVPTAADKKRELAAARFNNKMAGANFAVGVGVRGRGSMAMRGGRARGGRRVPEVDPVVLLSSEDEAEGGEGTSDSSNQPTNNSKLNSNGNLHELSAAFPCEPNLPEIDEEPLYKDFSRGDVRDLSDIPEADQFSASLKCSCVRLVPYRFEITEPVCFTTKGVRIAGILKDKDEKFELNIHKQEVIKVIAHFGNVEPAQPLVTLYLLKTCAEYVKNQLKLPDDQHHEHTGFKTHSYHTRRLILLFDSISVSARGNIKSMFSCVDEISSTDAAEILERIADSDRKTQDKSSQPPPRQLRADEQVSLLMYPPKGTGGLCIRMEDFVCLTKESYLNDIIIDFYLLWLRNTLIPEPQRERTHIFSTFFYKRLTTLTRPADMKQTAAQKRHARVQKWTKGVDIFDKDFIIVPINEQSHWFLAIICYPNLKGPVTFDTNQPVEPQQLKRPRGKKVALQIGNTTITPLTKRAEGGQLPAALTAENVCRIADDESERDEAEGDESDMASEDSENSNSAKEPAATPTSTTASTPSLSSSQPTATGPARNIASDDVPAVKQPLILIFDSLAGASRSRVVATLRDYLTCEYRVKKPDAQAHVFNKDNMPGHCVKVPQQNNFTDCGLYLLQYVEQFFGEPIRDYRLPIKQLTNWFDFLTVTKKREDIANLIQQLMDEGNQQQRLILPVIEFPTLNGQLVEYPEDTESAEFEEEEGHDDEDPASEMHDENNAGTDMEVDPVNEEPALAGKTAALAPASTTAAAPTGKRFVLKRRLHNGAVSSPTNGNGEASSNGGALIPQLVSTAAATTTGVSSGVAHLGPRGPSGGLKIRKIEP

SEQ ID NO: 21418 - DNA, 6992 bp, DROSOPHILA
cactcggcagcctgttgatgagcccacaatgcgcacatgctgcaagctattcgtgccgcggatgatatgggctctgtgttgagccggcgggtcctccataatgataagtgcccgtcgaggaggccgtccacattaaattcggcgtttgtcgctcaatggcagctgccaccgattccttcggcggcttaagcaaatccaaaggactggacgcgagggacgagcttgagtgtcgaaagttcagataggtcaagttgtcaaaatattcggagacagttgtcggtgcttttcgattcattcataaaatttgcgaggctctgatcgctgaatgaatttggcaattcgccttgcaaggcaataaaattataaaataaggtttatcagcaggttaagaatcattaacattgttattccttattttttataaatatttatttggcataaaagtatatcagtcatcagaattttattcgtggttaaattgtcaaacttctgctgcatatttccactggcactgccttttgttatccgtttcctgtttcagaattcgcactagtcatcctagcagtcaacatcccttttggcgcccttaaatgtgaacatatgccgcctgtttgttttgtttcggctatgtcacccttatggttgctttttctctcactgcaatattgggttatatggtacatgttttcatttttcaaaaacaccaggcttaatctgagcccaaaaaattgcatttgagtataaaaattatacaaaaataaataaatatttttaaattttgttttatatttgaaaatatatatatgatttgaaaatatgatatattttgcatgacttttatttcattagtgtctagcttatcctttatctcttatttttcccatcgatccgacaacgctcgccactctcgcatgtcatttgccagatgtggcagcccgcaggcacaaattttgaaagtggtgcccagaatgcgatgaggacaagcaaggctcattcgaaatttgtgcgtgcaacgcgaaggacgtgccgctccgtagctcgctgtcccgctctcgctctccccgctctctcgctctgtcgcacgcgttcgccgcttggcatttgttgtttgccacattttcgcggcaccccaaaaaatcgtgaaaatacaaatacaatacgagtgcgaaagtcgaatatcggcagaagttagtgcgacctttggtgacgtcagaggctgggaaaaatcgccaggatgtctaccaatcagcagcagcaggcgaatccttcggcggccgttgccgcacccgccgcctcctcggaatacctgaaacgcacctgcctcatctgcggctgccacaccaaccagacgatcaatatctacgagccccgctccggacccaatatcgttcagctaatccaggcgaaattcaagtttcaggtatggatttttcccaacttagagcaaaaaaaataaaaactcagttaggcggggaacgtataaaaatcgatattggggcaactcggcggatgagtcatgcaacgaaggaacgtccttcggacaaagttttccctctgcgcgtgtatccgtgtgtgtttttttttttgggttaaaaggggatgaacttcgctgggcggaaaatgggaaaatgggtggcacttctataggcaggtacaggtaactccctcacagcagcccactgggaaaaaaagagtggcaagctatttgatgattgatttcgagcgcagttttctaatatttttaagtgattatttgcaaagaactaaggtctcggaattagtagttctatcacaaactactttcttaatgaaaatttcaaaatcctttatccctattagttttgtggtatgcccaccttttcctgtgccctttaaactgcatatcctgtcgccgagcagatgatgcatttccccgacaacctttggtaattggacactttgcatatgtgccagtgccacagagccgccacttagttcgattcctttcccataatttttaacagcttgttctaatatgcgagcagtgcggtgtgtgtgtgtgtgggaaatgcgacagcggaagatggccagggaaatcgatcctggctgaagatcctgggcttgtttttctgtggaagtgagtttcgggtctcggattacaggcactcctcctcactcaaatgactacccatgactacctgtaccggcggcgcacacataaacctgctcgaaagggcagatgtgctgtggatttgccgagattgctccaatttctgcgggcagtgaacgaacccggtgtgttcgttctcttcgtttccatatcccaaaacgacagctgtatttgccggtcggcactcaaaatccaacccatcggggtttctggatcctctgctgctgctgctgctgcttctttatcagctcttcatggtctcgagtgagttttttcgcatatcaactattgaactcggatacctggatgcgagttcacagtttattgtttgtgagacgaagggattttccccagcagcattggtggttgaacccttggagaatgccaaatatctttggatagaaattccggtttcttaagctgcgcaaatccaaacaaaggatctacccttggaatagcgtttacaaaggtgatttcaaatgcccgaattttcagccgaagtcccagaagtgccaagctagacaagatttccatttagaggtcttcgtttagtttggtatttttgggaaatagtttttactaaggtttccgttcaattggattacaaagtcagaatgagagttcttaaaacgaagtcctataaaaacataaacaatattaagtggttgctaacataggttgttaaaatattgggtagatattggtagattgtatttccacatattttcggaatatatgtttcggtcttagattaattgaagcattgtgcttaactagtattgtgtgtatagcaatcaatttaattacgaaatgctcgagacgcacgcaatgcgatttcataataacaaaaaccctcagctaaccccgcaatatcagacactagaagctcaccctctatgcacatagaatatatatatattcaccccctccggacgtcgttagaatttcgtttgaaccgtttttgcgaaaccctatacggtgggcatacaccacctgccgtgatcgtagcctggcaaccgatctcccccacaggaacaacaccctcgccgggttctctataagctcgagttctgaatgacagtgccataaagtccagttgcaattaccttatcagactgcgcccccccacctcccactcttatgcacttagaaaaaaggaacattacaaattgagtaaatatgcagctatattaacagaagcacgaagagttgttttcaaactaatagaagtacttttaaacatatttttcatgtgcccatatttaactgatcttaggagtgcacacctttttctcgcagtgcatctgcgatcggcgtgcgtgcgtgtgcgtgtgtgtgtgtgtgtttgtgtggctttctgtctgctttgcacctggcctgcaatttgcattattataccgtttacacatggcccttggagcacaccttttcagcgccgaacccaaaggtaaacagccagccacaatcgctcctgatcctttctaccctgcacacctcctcctcctctatcgccatcctggtcgatcctttcggttccccgaccctcgtaccgatcacctttatctaatttctcggcgcagctgtcgcgcatgcgcgtgcctaatggtcgtcatagttggggttttaacccagttcccgcttcggttccacttcggcattatgtgttttttttttttatatatatggatagggcgcgtggctcttggccgaaaacgagtttccttcgaggctcgaactaagtagcgaatgtccctttggcttgttactggttactggttttccgtaccttttgggccagctgctaccgctgggcgcttagtttttgctggcaggtgcacgaaattattgatacccgaggaatgctgaggtctggctgggtaattaatatgcccgggtcgtctggcagttgtttttcggaattgttatggtcttttttttttttttgcacctctggctggatgctcattagtggtagtggtggtggtagtggtcgggtgtcgcgagcgatcactaagtgcataggcgtatcgtaattttctagaggtttattctgtgggttatgcctggcttcagattgcgagtcacgcaatcggatttgggtcaattttcattctaaggttggttcctgatgaccttaacggtttcatggctataatcaataaatgattggccttcgtggctctgcaagttacaatgtaaccgccttcggttctttctaatggctttttatcctttacttggaatgctacatatcagtctaaggcagtaagcaatttataaaatgggttattactcagccattaaattaattgaaggaccaaatgagtttgaatagttatgattagtatattatgattagcaataactttatagtctagataaaactacttctactacccgtactcatctattccctatatatctctactttcagcccctgaacgaggacaaattcctctgctttagctgcaacaactggctgatcaactggcactccctgcaggcggtcaacagcaatgaggccgaaagccagagccaaagtccctcgcacatgggcaacagtgtgctgcagcaggaaaggacgaagctccgtccggtggcgatggttcgacccacggtgcgagtgcagccccaatcgcagccccaactgcagccccaagttccaattaatcccacacccgcacccatagtctattcgaagcgaagagccagcagacgcagtgcctccgtcagccggatgagccgagtgctgcgccagtgttgtgtggagagtctgcggcggagtcccaagaagcgcaatcagcagtcggtgttcgtctgtcttaggccgcagggccagaagaggagcaatgcgatctgcaaggtggagtgtgtggcgccgcgccggaaaccagtggagcgactggttaaggatgtggcagctacagctacacccacaccagtgctcaatacacaatccacgcccacttaccaaagattcccgcagcccagtgtggatggcaaagtagtggccatgttccgtcgactgggaaccacactcagtcgggaagaacccgccgcatattcagcagaatcaaaccccgcctgctcgaaactcccgcagatcatgagtccgctcaaagaggcgccgcgctggacgcgggacctcgatgatgatgagatactgctggaattcgataccgccatatccgaagtcctgccaactgcccgctatcaggttacccacgaggagaacaaggaaaaccagcaggcacaagaaatggagctggagctggaggaggaggaagaagtggatggccgagcggaactggaagtggtgcaggaggcggaagcgccactggaaccgcagagccaccacaaacaaggaaacagccaccaaaattcccaccaagcttcaatccaactcgctggcctgcgattaccaatgggccttagcattagcctcgtctaaaaacgatgggtccaattgatgccccgcacacaaaatagtcaaattgcatgcacaatacgcaaattatgagcattagcaaatgtctaagttaatagtacctcgattacattttaattgttagtcaaataccttaattaattagcggacaaaaaaaaacacacacacacaaaacaaacaacaaaagacctaagaatgttaagttaacggatgtggaaagctatatttaaaatatacatattagtcgtaggcaaatccctgacttacccaaaaaaaaaaacaaaaaagagaatcccctcgagccaatgtagttgaatttgtttgtttgctccaaaagacaaaagtatttcaaaataacatgcgaaataaaaatagcacaaaagcaatcagtatataaatgaatgtttttatatttaaatgtacgggtggtatgaattttctatttattccgaggaataaggagtgatctttatgaaaaccaaattaattttacatttcccgccaaatgttactcatccaattaaatttttacgttgaaaagtatgcactttttctcgttactaaattggggctgccaacttgttttcttcacggcgccaaaaagtatgctctaatttttctgtcttgtggcgccaaaatcaaaatgtagaactgcagaaaattttcctacagaaaatatttctcttcaatatttaacataaaatatgaagtacgagaaattaaattgttaattgttaaattaactaaaattactatgttttacttaaaaattttctgcaatatatttgctaataagttaactaatagaaaagctaagaaaattcatcacattagaaatccattttaagatattccagaaccaacgaacgacatgctcttaaatacatacatatatcattagttttcgccttgcgtgcgaaagtccgatgtgtaattgttgatttctgatgctctagcgtatttatttgatttaggcaattgcgtagtgagaacgaacgtgtggaggtcagcatcgtcgttgttgttgttgtttatgcaactgagacagcggtgcgtatacttattttggcttacaatatggcatttcatcaatacacgaactgatgactgagtggctggctggctggctggctggctggctggcaattgtggtttcgccgacatgactggcaacgttaataatgtggtgcggaaatttctacgcgcacttcaagtacgccttattgagacggcgactaaggttacttttatttataaataaaattcatcgtgccttctgaacttgaagatgacttgccgccacgtcgaaggagacggagagagcgtgcagtttccggaaatcgcgtatacgcccgatggccgtgcgaagagcttacgcctcgcgattctcgccac

SEQ ID NO: 21419 - DNA, 1829 bp, DROSOPHILA
tttgtgcgtgcaacgcgaaggacgtgccgctccgtagctcgctgtcccgctctcgctctccccgctctctcgctctgtcgcacgcgttcgccgcttggcatttgttgtttgccacattttcgcggcaccccaaaaaatcgtgaaaatacaaatacaatacgagtgcgaaagtcgaatatcggcagaagttagtgcgacctttggtgacgtcagaggctgggaaaaatcgccaggatgtctaccaatcagcagcagcaggcgaatccttcggcggccgttgccgcacccgccgcctcctcggaatacctgaaacgcacctgcctcatctgcggctgccacaccaaccagacgatcaatatctacgagccccgctccggacccaatatcgttcagctaatccaggcgaaattcaagtttcagcccctgaacgaggacaaattcctctgctttagctgcaacaactggctgatcaactggcactccctgcaggcggtcaacagcaatgaggccgaaagccagagccaaagtccctcgcacatgggcaacagtgtgctgcagcaggaaaggacgaagctccgtccggtggcgatggttcgacccacggtgcgagtgcagccccaatcgcagccccaactgcagccccaagttccaattaatcccacacccgcacccatagtctattcgaagcgaagagccagcagacgcagtgcctccgtcagccggatgagccgagtgctgcgccagtgttgtgtggagagtctgcggcggagtcccaagaagcgcaatcagcagtcggtgttcgtctgtcttaggccgcagggccagaagaggagcaatgcgatctgcaaggtggagtgtgtggcgccgcgccggaaaccagtggagcgactggttaaggatgtggcagctacagctacacccacaccagtgctcaatacacaatccacgcccacttaccaaagattcccgcagcccagtgtggatggcaaagtagtggccatgttccgtcgactgggaaccacactcagtcgggaagaacccgccgcatattcagcagaatcaaaccccgcctgctcgaaactcccgcagatcatgagtccgctcaaagaggcgccgcgctggacgcgggacctcgatgatgatgagatactgctggaattcgataccgccatatccgaagtcctgccaactgcccgctatcaggttacccacgaggagaacaaggaaaaccagcaggcacaagaaatggagctggagctggaggaggaggaagaagtggatggccgagcggaactggaagtggtgcaggaggcggaagcgccactggaaccgcagagccaccacaaacaaggaaacagccaccaaaattcccaccaagcttcaatccaactcgctggcctgcgattaccaatgggccttagcattagcctcgtctaaaaacgatgggtccaattgatgccccgcacacaaaatagtcaaattgcatgcacaatacgcaaattatgagcattagcaaatgtctaagttaatagtacctcgattacattttaattgttagtcaaataccttaattaattagcggacaaaaaaaaacacacacacacaaaacaaacaacaaaagacctaagaatgttaagttaacggatgtggaaagctatatttaaaatatacatattagtcgtaggcaaatccctgacttacccaaaaaaaaaaacaaaaaagagaatcccctcgagccaatgtagttgaatttgtttgtttgctccaaaagacaaaagtatttcaaaataacatgcgaaataaaaatagcacaaaagcaatcagtatat

SEQ ID NO: 21420 - protein, 400 aa, DROSOPHILA
MSTNQQQQANPSAAVAAPAASSEYLKRTCLICGCHTNQTINIYEPRSGPNIVQLIQAKFKFQPLNEDKFLCFSCNNWLINWHSLQAVNSNEAESQSQSPSHMGNSVLQQERTKLRPVAMVRPTVRVQPQSQPQLQPQVPINPTPAPIVYSKRRASRRSASVSRMSRVLRQCCVESLRRSPKKRNQQSVFVCLRPQGQKRSNAICKVECVAPRRKPVERLVKDVAATATPTPVLNTQSTPTYQRFPQPSVDGKVVAMFRRLGTTLSREEPAAYSAESNPACSKLPQIMSPLKEAPRWTRDLDDDEILLEFDTAISEVLPTARYQVTHEENKENQQAQEMELELEEEEEVDGRAELEVVQEAEAPLEPQSHHKQGNSHQNSHQASIQLAGLRLPMGLSISLV

SEQ ID NO: 21421 - DNA, 14648 bp, DROSOPHILA
tgcccaaaccagtttcgcatgcctcgccatgtaggctagaatcgccatgtagatggcacctacatggtgggactccccgaggcacgttgttgaacagaatgcaatttcggccgaaattcgtataaattagcttgcagacttttgcaaacattgcatgcgcgctcaacttgaattgcagctttggatggttttgcataattttggttaatctttaattgatagccccccaacccgcgatttatgccatgtagttactttagaacatacatgacgacctacatggtgactggcacgcacacacccgcacttgtgcgtgtgaagcaacaacacacactagcacgccgccatgtagttaacggcggaaaagttaggttagactcacagctgctctcgcaaaggaggggtgggaaggcaagaaaaaaagactgttgaaggaggggtagcggagaggcgaatggcaagcgaaaagcgaccggaagaaggaaatcgatctatcgatagaatcggggaatgttgtaaattgcgcattaatgcttacaaacttctatagtaaacaaaacaaaacataatacatgtattggcaagcagattattaaattattaaattatttttttattaaaattaaattatcttaaaatacttttcttatctgcagaattgtgtttatgtggaaaagcaagcatatttaaaataaaaatgtattaatctgattttaaagtttcattgaatatatgttttacaaacttaaatactttaaatttaaaactaaaatacacaattgaaaactatttaatatgaaaaatatgaaaggtgaaccgttttgaagaaataaagtcgatttaccaatttaaatccaaaacaaatatattaactatcgtttagagccactttgccccgagtgccgcatctctagtgaaccatcgatggctggcgtgttgacgaatttcagaccaccactagttatcgagagccacgataatttcttcgccgcgtttgctgctcgctgaagaaaaataaaattaaccaggagcgcaaaaaaacgcgaatcgcgtattgtctgcgcagatagccagattaacgggatcgaaacgggtaggcatgccgttcaatcaatcgatcgcagcgaactgtttagtgcgtgctgctattgttgtgaaataattaataatattttatggcagatggagcccctctgcgtacaactatgtgtgtgtgtgccctggcatccgagtgtgtgcgtgcgtgtgtgtggaaaaagaaattgagggggaaaaagcagaaagaaaagatgactgggaaatgggcgtctctaaagttaaatgacattttcacacgtaactgaaaaatatatatacgtgtattaataaaaataaatacacactgcccagcaggcaaaaaacggaggcggagaaaagccgtcggtcgtcagccgccgcgcgcatgctccacaaaattggaagttaaataaactgctatgtacgccaactaaatctgcgcaccataacctttcatcgcgtgcaatttgcggtgaaaagcggaaaaaaaccaactgcccaaaagccgtgtaaattgcacattataattgcaaaataatcgagtgcagtgtagtcaaaatagtagtgcccattcgcgggagcgggacggcatgcaaacgtgaaaaagtgagcggttcggctattggctcaatgtactggtgccgtcccgctttgacgcacgccttggccgcttgtcggctgtctgttttgattttctcttcgtgaaaataagcgcgcgtactttcttttgacctaccgtccacccactcgacccttcccactcccatccccatcccctgcgctgcccagacccttgcgtgcatcggaatgtttgataagtgataaagccagatgtttgtgtatatatcgccgccaagtgtcccaacacacacacacatgttgcacacattttttttgtctgaattctgcgctcgctctttttgccgccttttgactttcggtcgtgtaatttgagcctaattcgttaacgcctgaccacatacgttatatatacatatatattatatacgcagcccgacttccacaccagagagctactaaagaggcccaggaattgttcttactgacatctataaaatcccgcagaggagcaacgtttccaataagcaagcatacataaatggtttctactttcattggattattaggtgagcaataaatttaccaaatcagttcctacttaacaaaaccaatataatagtggaaatatatacaacaagagtcgcaagttaccgaaaaatttgctaaatcacattgtttttctcttcgcagacattcaatcatggtgggagataccgtgtatttcgcatttctgttcattgtttagttctgcctttgatctgcccgacatcgacatcgaggtgagtaactgataaacaccttctaaagagaatcaatcataaaaaacgcactgcatccacaggacctcgaatcggcgctgctctccgatggtaccagcgatgaggatcaggtcgccctagtgcccgagttaattgtgcgcctgctcaagggctgcgatgcgctacagacggtagccaaggaaatcacacacagcaactatcagatgttcttgcgtcgcttcctgcgccaacagtgtcgcctgcaccagaccgagaaccacttcgacacggacattgacttccagtcgctgcccgtgcgcaagcgcctgcacattctgcacgatctgtgccactttcgcctggactccgtcgatgtgcaggtcatcctcagcaatctagaggcggatagtctgcgcgtggagcctctgggctacgacgccaagaattccggctactggtacttctacggcacgcgactatatcgggaggacaaagccaccggtggatcggcctcctccagttcgggttcgggatcaggtggcgctggagcctcaactggcggagcatccaacagcaagggcatcggcagcaacggtacagtttggcaagtcatctgcttcaccgaagaggactggcaaaacttggccgccaagtttaagacctcgacgaacgccaaggagcgcgaactctttaacatactcgatgacaactttctgcccaagctgccgcagcttttccgcgaacgtgagcgtttgaggcgtaggaagtgagtgaaataccttacatttctccaaaagataaagatttataaagcaacattgctaatgaaaaaatattttgcttacccagacttttgcaagtgcgcaactccagccgcattcgcaacatcgcggagttgaaggcacgccaggaggaggagcgccagcgtcgtgagcgggagaatctctaccaggatcggcaaaacgcacactggttggcaccgccgcagcagcagcaacaacagcagcaacagcagcagcaacaacagcagcaatcgcagcagcgcacacgcagacggttagcacgccaatgttcctaggaaggctggcggacgcgacggccacatccattctactcacagagcgcgaatcagaaacaagacagatacattgaactcacttgcataccaaaagcatctttgatttattttttcaattgatcttttgagttgccgtaattttataatttcttgagccaaaatactcttcgcttacaatttctgttgctgcagttgaaaagccaaatcgccatcatcaacatcgtcgataaacccaggatcagcatagacggaacaaggatgagcacttaatttcagttttgcccatcatttaattttgtatatggaagaattggttggatttcgttttcaaaaacaatctgtaagcatgctttttgacctatttctattcgatatatgcattaccttatggtttaagtttattttaaagtcaacatctcagtttcatcccatccaagagacacagacattgacatccgattctcaaatcgtaaaaacgctgattcaatcttatcttatttaaatttatcgaaaattaaaattaattcatcaaaattaatatgtcgcgttggcttccaattaaaacaatattataatattgaaacgcattgaatacaattttagtaatacattctcatatcttaaaacccatttgtattacaaaatttatctgcattattacaaaatcatatggatagtttattaataacatttttgtgtctttcttaactgcttgtattttagatcccagtctacgtcgacagctagtggtatttcaacctacgcaagctccctgagacgaacaaccacaactaattcgagcgaatttctgtgccacagggaaaccttctgcctctcgccagaaaacgacgaagacgacgacgacgacgacgaggccctcgacgcggagcagcagtccgatcagccagagcagcagcggcaacaagaagagcagccgccagaagaggagcagcggcaggaaccagaggaattattagcagtctcagcaactgacgacgattttcgctctccagaagcgccgaaatcgcaaacgcctgcggaattgaagagcaagagtagtcaccaccaccatcatcatcaccacaagaagaaaaagtcgagcaagaagcagaagaagcgacatcatcgtgataaaggtcgtgagcgggaccgcgagcatcatcatcatcatcggcggcgacacaagcatgcttcagaggcggacgaaggcgaggacgacaacaataaccacaacagcaacagcaatagcaacagcaacaccaatagcatcagcagcaacaatagtgtccagccaaagcgaagacgtagtggtcagcagcagcagcatcatcagcaggcagagactaccgagcccagcacttctctaagtcccgaggacaaggagaacttttgcaggcagctgcaacttctggacaccaattcggcggccattgcagtagccacaagtattgccgatctcagtctgccctcgccggtggcacatgagagcgaaaccgaacaggacgagcaggttgatcagccggcagtagtggaagcacagccaccagcattaacttctgcaatggcgccagcggccaatgtcaagttgcctggcaggcagacgaacaattcgctcagttcgctgactggaaacattttcataccgtcgggaagcgcccaacagcagcagcagcaatcccaggagccgccgagcagcagtagcagcagccagagtggcaccaccacgactgccagcactgtgcgttccaagaagcagaaggccgtgctcaacagcagcgggagcagcagcacaagcaaaatggctgacaaggcggatcgcaacttgagcaagacggagacgacgggcaagtccaagaagtcggccgcgggctcatcggcgtcatcgtcctccagcaaggcggagcgcatcagcggtgcctactcggacaagagtggcgatgagtaagtgagggtggacagtttcgatccgcagacacaacacaatcgtactatccatatgctcttggcacattctttaattatatcttatgcttctgcttgctgttggatgtgtgggcatcatagatttacatcttgattaagcttaaattaaatcgcaatctttttctctaaaagctacgcatatcatttattttatttaatgccacagtaaattattttgtggagaaagtaaagaattaatcaagatacaattttatatattttgcataagcattcatgatgctccactctggtattgttgttgattttgattattgagtttgggccctgtgctgtggtcttggttccttttctgtaacattttctcctaccttgattgaacattttcataattcgttcttaagttccattctaatctataaggcattgcatgttgtcggctcatttcattcacacacccatcaaattgtatataatatgatcaattgattaacatatttatcattgttattgtaaatttttgtacccacccgcaaaaaaacaaacgataaaaaacattccgactgttgatcatcacaaaacccaaaaaccccgataaaatgtagccatgtaaatagtagcaaccgtagcaccaccaacaacaacagcagccttaacaacaacaacaaccataagcacgcgccgcaccacagtcacaacaacaacaacaacagccattcaacgacgacatcggctacaacaacagcaacaacgacaacgtcgcagggatatcattataattccaatcttaatcataatcagaaccaccaaaactcccactcacaccacacacaccaccaccaccatcatcaccaccatacaacgaataatcacagtaacaaacataaaaccaaatcgcaccactcccttgcccacaacaacaacaacaacaatagtcccacaacaaacccaacaagcacatcactactccacccagtaacaacaaacaacaattcaacgtacaactcctccaatcatgcgaatattcttagctttaccgaaacggaggaggtcctgcaaatcgggatgcacaaggtgctcgtctacgtgaagaaccatcgcgatgcctggccatttgtggatcccgtggaggaggatatagcgccacgctattactccatcatcaggaggtgcgtacacttagccaaatccgactgcaaaatgtaatctcttaaaccgctttccagacccatggacttgctgaaaatggaggacaaactggacagtggggaataccataagttcagcgaattccgtaacgactttcgcttgattgttaacaattgcagattgtacaatgggcacaacaatggtactcatccgctttaacataaatatttaataacttttattataatatacctatattattttgcagaatacactgagatggttaacaatctgcaggatgctttcgagaaggccaccaaaaagtacttcgataatctctccgatgacgaagatgatgatcccaatctgagctatcccgccgccgactccaagatgaacgtgttccgcgagaagtatttcagtaaaaaggcaaaggaggagacggagaaggatgcgccaggtcggccggcggtgagcagcgccgaggaggatctcagcgagatcgaagcggaggcacctcaaaaagcacaaaaacgcaagcgtaaggagaaagacaaaagacgtaaaaagaaaaccaagagtaaggcggatgtggaaacggatgatgaagatatggaagccgaaagggaaccaacgccaccacctcctccgccaacaagcaagaagagcaaaacgagcaagacaggaaaggaaaaggagaaagataaggagaaggaaaaagacaaagataaggaaaaggacaaggaaacgtcttcattcaagcgagggcgaaaaactaagagcgataagtccgcgtccaaatccagcaaaaagaccaaaaagggggccaagaagtcttcggccgattcggatcctgagtccgatccgagcgatagtcgcgagagcgaggattacagcgatgatgaccacatttcgttggccaaaactaaatccctggttaaacccacagctcgcacgatagcagcccaaaagaagaaatctgttcccgctgaatccaaagttaagatgcctactccagtcaagcgacaagtgaaaggcaagggcaaaggtggacgcaaggcaaaggacgactctctggatagcgaccagtccgatgtgaatgttaagaagcagctgccaccaacggcagctgccgctcttgccgaatccgccgccgagctggaagaagatccggatgatccgccgcctgatgaagacgaagatgaggatagctcgcggtcgcgaagcatgtcacccttcaaggttgatctccacaagaaatactcaaaaagtgcccttaacgatgatctctccgagctgctgaccaccgtaaaaaaggttcccaccgcggaaaccacaaagctgagtgctcgccaccaggatgaagcggatgaggagcgatcttcccgagaatctgacggggactttaaatccttaagcaacagcaggggcagctccgaagagcgaccgccggtggcaaagaaaggaaagaaggcagaaagctcgaaaaaggagaaagaaaagaaaggcagggataaggatcgagatagggacaaggaaaaagacaaagataagtctcgcagcgcaaaggataagaagagtaaagacgaatcccccgttctagtggccgctgctgaagcagcagcagtagtgcaagccgaactggatatgctgttgcctttcatggacaagtacgatgtgatcaagtatcgacgtagtcgtgccgccttcagcggttccagtgcatccaactcgttggctccctccgaagattccaagtcagccatcacgaaaagcaatagggagaacagaaaagcttctgcgaagcgagaaaagtcacctgatgctgtggaaaacaagcgcgggcggaagagcaaagaccaaaagcgatcaaaggagtcggataaagcggaaaaatctgataaagcttcaaaggccgacaccgagaaacactcggaaaagtcgaagaaaaaggaggagccaccaaaagtagtggaaaaggcccaaagagaaaaatctccggcgccggtatcagctttagaaactattaaggaacctcctgctccaactccaatagccacatcagcgtccggcaaggtgaaagaaggaccagctaaaaaggaacctaagaaaagacccgacaaacaaatgccgcctcctccgaaaccggccgataaatcgagtgaaaagggatcgggtaagaagagttccagcaaaaaggcagcccaaaaagcgggacaaccgcagaccaacaataacacaaatctcgaagcattggatgtggaaacagaacagaccctcaaggatattaatcgctggctggaacacacgccccgcttcacggagttcagttcggccagcaattcaccatcccgatacaatcttttggatgatttcgactcaggaatcggtagtaaactagatgcggccgattttcggcgaccagtggcattggctgcaccaaaggcggaattggtaccaactaaattggctgaggccctcaacgaactggtgagcgagccaaaagaggcagttagcaaatcggaatccgagtcagtggctccaacgccgagcagtgtgagcagcagctgtggtactcctccgcattcgatgcactcagggaattccattggaagcacatccgccactgctgcttccagttcaaattgctccaataactcgatgcctacgcccttacccgtggcggtaactcccacgccaacgcccgcgcctccgccacttcttccaattccgaagccaaaagagcccagcaccacgcaactgatcctcaatccaccaccgccgccacacattaaacagcagctggcgaaggaggccaaacggaagtccctgaaagaaaagcaggcggctcaagcagcacaggctcagcaggtgaaagccaaggcaaatgttatgagaaccatcgatcggcttcaaccaggcaaagcgaagggtaatcttttgcagaatgtagtcgctgtcaaatcaacggaggagggcggagattctcacgcaggtgttaatccagttaccaccaaagttaaggagctgaagaacgctcttatcacggaaacatgcgagggagcaccaaaactgagtttgggcacggttctaaagactcaggacttttcgttgggcaaatcacttgaggaaatgtctggaaaaaaggacgcgaatgaagatgaccgtccaaacgaggaagcaagcccgaagaattcttcaccacctacaacaccgaacacagaggcgccaaagccatttgaggctcttcacgaactgagtaaaaggggcaaatcctcagagccatcgaaatcggaggctagtcaaaaggagaagcccaatctcagcgcctggctaaaagcgttcggtggcccaaaggttagcaagaagtccgaagacgaggaaaagcagcagactcctgtccaagatcttcaaggtgattccaaggttgctccgccagctcactcgccggctggggataacttctccttacccacagtaatgcgccaaaggaaaccaagcactggcagcacaaactcagagcgaagttcctttagccaggatccggattccccaagaattgccatcgatgagcgttatggatcttatgcggctggttcttatacctctccgattggagcgtcgcccattggcgcatcccccattatggtttctcctaagcccaatgacgatatgggcaaaccagcttcgccgtatcctctaaatggtgctatcaaggtgggcttctaccaggacactacgaccaaaagcagtccggacaagagctgcagtcccagagagatgaactctccgtatccccagtactcccagcatatttactcctccgcctcgtcgcctaatgtgtccactccggatatgagtggaacgtccccttatggaggaggaaacagctacaatccttcgggctcggaggcttctaagactccagcgtattcttccacatccccgcttccgatctatgatcaatacaagcagccgcgctcccaggaatcggactacaactcttccatgagtccgagcacaccgaacccacattcgccttatcaacagcctcaaagttctccgtacaccaccccgcagcagtcgcaatcgacacacccgtcgccgtatcataaccagtcgccgtaccaccagcagcagcactcaccatatcatccacccgcggctcagcagcaacagcaatcctcacagccttcacatagtccggcagcccatcagcaggctctcagtcctatgcacagtgtggaatcgcctgcgtcctcggcggcaacgcaaccgcccacaccgttggctcagtcgccggcggaacagcagcattcgccgtatcagcagcccgtgctgtcaccttatcagcagccgcaacaacaggtgcagccgccggtggtaccgccagttcaaccatccgcaggtgctcaggcatcaacaggtaagaatcgatttgataccgatgatttcaaccgatgttctaatacatctctttgttttagctctgggcaacaatggatatgcgcccacgcacgatagctaccagcagcttcagcaacaacagcgatccttgtataacccagccactttgattaatcctctgtcgaccgctgcgtcctcaactgcttccataaccaagcctaacaatgactggagtctaaatcgcagtttgctgccgccaagtattacgaatactgtgaatcaggcagcacagcagcagcaacaacagcagcagcagcaagctgggcagttgcaacagcagccacaaatgcaagctgcacagcagcagttacagtcaacacctcagcagcaacagcagcaactacagggcacgcctcagcagcagcagttgcaaggatcacagcagcagcagcagcaacaacagcagcagcaacagttgcagacatctcagcaacagcagcaacaggtgctcggccatcagcagcaacacaaaccgaaatatccaacctatgcgcagtatcagtctactaatgccgcagcaaatgctgctgccgcagcagacgccgtggataatttgcagcaacagcagcagaaaattgcgccaccaacttatggtagcgatatggccacatttatgcagcatcaaatgcagcagccgcccaaaactgatacattaataaatcctctaaagcgacctggagaggaaatcggtatggattacagtggaaatgcggccaataaaatgcagaaaagagaagagactccggcgcagcagcaacaacagcagcagcagcagcagccaacacaaaaccagacgcaatccctgcttaacaagcagcagcaaatgtttaacagtttcctgggcactatggcattcggcaaacctattggcaacattgcaccggacaaagcatttgagatgtataaccgtgcagcggccatgggtttccccaaggattttgcaaaggacaatagttgtcagctgcagcagcagcaacagcaacagcagtcgccccaggtgacaacaaacaagcaacaggcgaaccaacaaacgcagcaacaaccgcagcagcagtcccagcaatcgcagccacatctcactcagcttcagacggcactcagtcaaaactaccagcaacagcagcagcaaacgcaggcgcaaaaattgccgcagcagcaacaacagcaaccgccgcaacaactcaactatcagcaacagcaagcacaacttaaccataattataccgcccagcaacaggcaactgcagtgccggacaaacctcctgcagctcagtcgacagttgctgctgcggtaagcgaatcgagcagcaacatgatgaacctgccctctacggcgcaccagcatcatctcagtcagacgcatcacttggccgcctacaacaagccaacgccaccgcctccgcaaacctacagcaatcctttgatgcaatcgatgttgggctatgctggaaactatttcgacaagaccatgccgccagcagcccatatgtacagcgcttcgagctcagcggcttcggcttatggtaatccggcgcagcaactgccgggtaattatgttcctggcaacaacaatcccgctcaccagcaacagcagcagccacaacaacaacaacagcagcagcagcaagctcctgccgttccgccagcagaagtcaaagctccagcgaaaaggggacggaaaaagaaggcagctacaattgcggctgaagctgcggctgcagctgccaagcagcagcagcaacaacaacagcagcagcaacaacaggcgcaacagcagcaacaggtggccgctcagcagcagcatcagcagcaacaagtctctgcccagcagcagcaacagcaacatcaacaggtggccgcccaacaacagcagcaccaagccatgccgcagtacaatatgccgcaatcaatggcttccgcagccgcagccaccaataatcagctgcaggcacatgcgcaggcgctgcagcaaggcttccaattgtatgcgggtctgaaatcaggaggtgtatcctcgcccgtgggcagttcagcagcaacgccggtaaacagtggtggttccaccaccaatcagacagcggccgatgcggcagccatttccctgaaaacatcgacaggtggaatggtgcccggaagtgccttcaactttgcgccaactccaggaacgctgggcttgtacggagaccaggctgcagcagctagcagctatttggatcaattcagagatgcacccaatccctactacatgcctccggcgccggcacacagtggcacagctgcgaatccgtctggaaatgccgccgacaaaggacaaaacccattgaacacggcagccggatcgtatcccttcctggcggcggcacatccatcctcgcgagcagcggctgctgcagctgcttatccgtttgccgatcccaactcgcagttgtaccagcagtatctaaggcgcgatgactttcacacgcggatgatcttcaaccagagtctactgggcggaccagcagcggcggcggcagcagccggatatggtcaaccgccgccgcctccatccgcctatcaacgcgctgcactgggcatgcccaagccgtatgacattaaccggcagtcatggttttagcagtacgccagtgccgccaacgtggatctccaaggagacgacctgacgggggcggcaactggaacagcatcgggaccagcagcagcttcatcttcgacagcagctacacagcgatgagattgaaagagtgggcaggcttagaacggtttcaaatccacatgcaaattgtttccaaaaaggttaacgtttcatttttgagcttacatatgcagatatttaagtaggtgtttaatttttttaaattggctttttatattgtatattttttattcatgctcagaagaaaaacatacaaatcgtttagtaaggaaaattacgtgtttagcaaaatgtttagcattcttatatatttattctcgtaaacgaaaaagaaaaccattttaaaattctgtaagaagaaaagtttgcgttgtgtgtaatagtaaagtgaaatatttgaggcgtcattgttctgtactgatatttgatattcatttgcgagactcgaattccactgcccgcatcctctgactcatttatgtatcctatgaccatattcatttgtgcaatgtttccttttgactgcagttgcgccctggactttggccacgcctaaatggcaagtttgttggtctttagtttgtaaactttcagtagtctgtaggtttcaagcctttggttaatgacaattaattttaatagctttagctaattaggcctctaatctaatttaattgaacttaatttgttttaaatgcttaacaaaagaaactaagcagaaaacgaaagagaaataatgcaaaaattcaaagaattactctcaagccccccctgactataattagattttagttttttccagaacctaactcgtaactatagaactcgtgtaaattaactacgattattagttttattactattgattatgtactacgactattataactattatcgattcgtgctgcgggcgatttgttgaaatatttattaattcaagtaaacaaagagattcgcaaca

SEQ ID NO: 21422 - DNA, 9443 bp, DROSOPHILA
ctcgctgaagaaaaataaaattaaccaggagcgcaaaaaaacgcgaatcgcgtattgtctgcgcagatagccagattaacgggatcgaaacggcccgacttccacaccagagagctactaaagaggcccaggaattgttcttactgacatctataaaatcccgcagaggagcaacgtttccaataagcaagcatacataaatggtttctactttcattggattattagacattcaatcatggtgggagataccgtgtatttcgcatttctgttcattgtttagttctgcctttgatctgcccgacatcgacatcgaggacctcgaatcggcgctgctctccgatggtaccagcgatgaggatcaggtcgccctagtgcccgagttaattgtgcgcctgctcaagggctgcgatgcgctacagacggtagccaaggaaatcacacacagcaactatcagatgttcttgcgtcgcttcctgcgccaacagtgtcgcctgcaccagaccgagaaccacttcgacacggacattgacttccagtcgctgcccgtgcgcaagcgcctgcacattctgcacgatctgtgccactttcgcctggactccgtcgatgtgcaggtcatcctcagcaatctagaggcggatagtctgcgcgtggagcctctgggctacgacgccaagaattccggctactggtacttctacggcacgcgactatatcgggaggacaaagccaccggtggatcggcctcctccagttcgggttcgggatcaggtggcgctggagcctcaactggcggagcatccaacagcaagggcatcggcagcaacggtacagtttggcaagtcatctgcttcaccgaagaggactggcaaaacttggccgccaagtttaagacctcgacgaacgccaaggagcgcgaactctttaacatactcgatgacaactttctgcccaagctgccgcagcttttccgcgaacgtgagcgtttgaggcgtaggaaacttttgcaagtgcgcaactccagccgcattcgcaacatcgcggagttgaaggcacgccaggaggaggagcgccagcgtcgtgagcgggagaatctctaccaggatcggcaaaacgcacactggttggcaccgccgcagcagcagcaacaacagcagcaacagcagcagcaacaacagcagcaatcgcagcagcgcacacgcagacgatcccagtctacgtcgacagctagtggtatttcaacctacgcaagctccctgagacgaacaaccacaactaattcgagcgaatttctgtgccacagggaaaccttctgcctctcgccagaaaacgacgaagacgacgacgacgacgacgaggccctcgacgcggagcagcagtccgatcagccagagcagcagcggcaacaagaagagcagccgccagaagaggagcagcggcaggaaccagaggaattattagcagtctcagcaactgacgacgattttcgctctccagaagcgccgaaatcgcaaacgcctgcggaattgaagagcaagagtagtcaccaccaccatcatcatcaccacaagaagaaaaagtcgagcaagaagcagaagaagcgacatcatcgtgataaaggtcgtgagcgggaccgcgagcatcatcatcatcatcggcggcgacacaagcatgcttcagaggcggacgaaggcgaggacgacaacaataaccacaacagcaacagcaatagcaacagcaacaccaatagcatcagcagcaacaatagtgtccagccaaagcgaagacgtagtggtcagcagcagcagcatcatcagcaggcagagactaccgagcccagcacttctctaagtcccgaggacaaggagaacttttgcaggcagctgcaacttctggacaccaattcggcggccattgcagtagccacaagtattgccgatctcagtctgccctcgccggtggcacatgagagcgaaaccgaacaggacgagcaggttgatcagccggcagtagtggaagcacagccaccagcattaacttctgcaatggcgccagcggccaatgtcaagttgcctggcaggcagacgaacaattcgctcagttcgctgactggaaacattttcataccgtcgggaagcgcccaacagcagcagcagcaatcccaggagccgccgagcagcagtagcagcagccagagtggcaccaccacgactgccagcactgtgcgttccaagaagcagaaggccgtgctcaacagcagcgggagcagcagcacaagcaaaatggctgacaaggcggatcgcaacttgagcaagacggagacgacgggcaagtccaagaagtcggccgcgggctcatcggcgtcatcgtcctccagcaaggcggagcgcatcagcggtgcctactcggacaagagtggcgatgactttaccgaaacggaggaggtcctgcaaatcgggatgcacaaggtgctcgtctacgtgaagaaccatcgcgatgcctggccatttgtggatcccgtggaggaggatatagcgccacgctattactccatcatcaggagacccatggacttgctgaaaatggaggacaaactggacagtggggaataccataagttcagcgaattccgtaacgactttcgcttgattgttaacaattgcagattgtacaatgggcacaacaatgaatacactgagatggttaacaatctgcaggatgctttcgagaaggccaccaaaaagtacttcgataatctctccgatgacgaagatgatgatcccaatctgagctatcccgccgccgactccaagatgaacgtgttccgcgagaagtatttcagtaaaaaggcaaaggaggagacggagaaggatgcgccaggtcggccggcggtgagcagcgccgaggaggatctcagcgagatcgaagcggaggcacctcaaaaagcacaaaaacgcaagcgtaaggagaaagacaaaagacgtaaaaagaaaaccaagagtaaggcggatgtggaaacggatgatgaagatatggaagccgaaagggaaccaacgccaccacctcctccgccaacaagcaagaagagcaaaacgagcaagacaggaaaggaaaaggagaaagataaggagaaggaaaaagacaaagataaggaaaaggacaaggaaacgtcttcattcaagcgagggcgaaaaactaagagcgataagtccgcgtccaaatccagcaaaaagaccaaaaagggggccaagaagtcttcggccgattcggatcctgagtccgatccgagcgatagtcgcgagagcgaggattacagcgatgatgaccacatttcgttggccaaaactaaatccctggttaaacccacagctcgcacgatagcagcccaaaagaagaaatctgttcccgctgaatccaaagttaagatgcctactccagtcaagcgacaagtgaaaggcaagggcaaaggtggacgcaaggcaaaggacgactctctggatagcgaccagtccgatgtgaatgttaagaagcagctgccaccaacggcagctgccgctcttgccgaatccgccgccgagctggaagaagatccggatgatccgccgcctgatgaagacgaagatgaggatagctcgcggtcgcgaagcatgtcacccttcaaggttgatctccacaagaaatactcaaaaagtgcccttaacgatgatctctccgagctgctgaccaccgtaaaaaaggttcccaccgcggaaaccacaaagctgagtgctcgccaccaggatgaagcggatgaggagcgatcttcccgagaatctgacggggactttaaatccttaagcaacagcaggggcagctccgaagagcgaccgccggtggcaaagaaaggaaagaaggcagaaagctcgaaaaaggagaaagaaaagaaaggcagggataaggatcgagatagggacaaggaaaaagacaaagataagtctcgcagcgcaaaggataagaagagtaaagacgaatcccccgttctagtggccgctgctgaagcagcagcagtagtgcaagccgaactggatatgctgttgcctttcatggacaagtacgatgtgatcaagtatcgacgtagtcgtgccgccttcagcggttccagtgcatccaactcgttggctccctccgaagattccaagtcagccatcacgaaaagcaatagggagaacagaaaagcttctgcgaagcgagaaaagtcacctgatgctgtggaaaacaagcgcgggcggaagagcaaagaccaaaagcgatcaaaggagtcggataaagcggaaaaatctgataaagcttcaaaggccgacaccgagaaacactcggaaaagtcgaagaaaaaggaggagccaccaaaagtagtggaaaaggcccaaagagaaaaatctccggcgccggtatcagctttagaaactattaaggaacctcctgctccaactccaatagccacatcagcgtccggcaaggtgaaagaaggaccagctaaaaaggaacctaagaaaagacccgacaaacaaatgccgcctcctccgaaaccggccgataaatcgagtgaaaagggatcgggtaagaagagttccagcaaaaaggcagcccaaaaagcgggacaaccgcagaccaacaataacacaaatctcgaagcattggatgtggaaacagaacagaccctcaaggatattaatcgctggctggaacacacgccccgcttcacggagttcagttcggccagcaattcaccatcccgatacaatcttttggatgatttcgactcaggaatcggtagtaaactagatgcggccgattttcggcgaccagtggcattggctgcaccaaaggcggaattggtaccaactaaattggctgaggccctcaacgaactggtgagcgagccaaaagaggcagttagcaaatcggaatccgagtcagtggctccaacgccgagcagtgtgagcagcagctgtggtactcctccgcattcgatgcactcagggaattccattggaagcacatccgccactgctgcttccagttcaaattgctccaataactcgatgcctacgcccttacccgtggcggtaactcccacgccaacgcccgcgcctccgccacttcttccaattccgaagccaaaagagcccagcaccacgcaactgatcctcaatccaccaccgccgccacacattaaacagcagctggcgaaggaggccaaacggaagtccctgaaagaaaagcaggcggctcaagcagcacaggctcagcaggtgaaagccaaggcaaatgttatgagaaccatcgatcggcttcaaccaggcaaagcgaagggtaatcttttgcagaatgtagtcgctgtcaaatcaacggaggagggcggagattctcacgcaggtgttaatccagttaccaccaaagttaaggagctgaagaacgctcttatcacggaaacatgcgagggagcaccaaaactgagtttgggcacggttctaaagactcaggacttttcgttgggcaaatcacttgaggaaatgtctggaaaaaaggacgcgaatgaagatgaccgtccaaacgaggaagcaagcccgaagaattcttcaccacctacaacaccgaacacagaggcgccaaagccatttgaggctcttcacgaactgagtaaaaggggcaaatcctcagagccatcgaaatcggaggctagtcaaaaggagaagcccaatctcagcgcctggctaaaagcgttcggtggcccaaaggttagcaagaagtccgaagacgaggaaaagcagcagactcctgtccaagatcttcaaggtgattccaaggttgctccgccagctcactcgccggctggggataacttctccttacccacagtaatgcgccaaaggaaaccaagcactggcagcacaaactcagagcgaagttcctttagccaggatccggattccccaagaattgccatcgatgagcgttatggatcttatgcggctggttcttatacctctccgattggagcgtcgcccattggcgcatcccccattatggtttctcctaagcccaatgacgatatgggcaaaccagcttcgccgtatcctctaaatggtgctatcaaggtgggcttctaccaggacactacgaccaaaagcagtccggacaagagctgcagtcccagagagatgaactctccgtatccccagtactcccagcatatttactcctccgcctcgtcgcctaatgtgtccactccggatatgagtggaacgtccccttatggaggaggaaacagctacaatccttcgggctcggaggcttctaagactccagcgtattcttccacatccccgcttccgatctatgatcaatacaagcagccgcgctcccaggaatcggactacaactcttccatgagtccgagcacaccgaacccacattcgccttatcaacagcctcaaagttctccgtacaccaccccgcagcagtcgcaatcgacacacccgtcgccgtatcataaccagtcgccgtaccaccagcagcagcactcaccatatcatccacccgcggctcagcagcaacagcaatcctcacagccttcacatagtccggcagcccatcagcaggctctcagtcctatgcacagtgtggaatcgcctgcgtcctcggcggcaacgcaaccgcccacaccgttggctcagtcgccggcggaacagcagcattcgccgtatcagcagcccgtgctgtcaccttatcagcagccgcaacaacaggtgcagccgccggtggtaccgccagttcaaccatccgcaggtgctcaggcatcaacagctctgggcaacaatggatatgcgcccacgcacgatagctaccagcagcttcagcaacaacagcgatccttgtataacccagccactttgattaatcctctgtcgaccgctgcgtcctcaactgcttccataaccaagcctaacaatgactggagtctaaatcgcagtttgctgccgccaagtattacgaatactgtgaatcaggcagcacagcagcagcaacaacagcagcagcagcaagctgggcagttgcaacagcagccacaaatgcaagctgcacagcagcagttacagtcaacacctcagcagcaacagcagcaactacagggcacgcctcagcagcagcagttgcaaggatcacagcagcagcagcagcaacaacagcagcagcaacagttgcagacatctcagcaacagcagcaacaggtgctcggccatcagcagcaacacaaaccgaaatatccaacctatgcgcagtatcagtctactaatgccgcagcaaatgctgctgccgcagcagacgccgtggataatttgcagcaacagcagcagaaaattgcgccaccaacttatggtagcgatatggccacatttatgcagcatcaaatgcagcagccgcccaaaactgatacattaataaatcctctaaagcgacctggagaggaaatcggtatggattacagtggaaatgcggccaataaaatgcagaaaagagaagagactccggcgcagcagcaacaacagcagcagcagcagcagccaacacaaaaccagacgcaatccctgcttaacaagcagcagcaaatgtttaacagtttcctgggcactatggcattcggcaaacctattggcaacattgcaccggacaaagcatttgagatgtataaccgtgcagcggccatgggtttccccaaggattttgcaaaggacaatagttgtcagctgcagcagcagcaacagcaacagcagtcgccccaggtgacaacaaacaagcaacaggcgaaccaacaaacgcagcaacaaccgcagcagcagtcccagcaatcgcagccacatctcactcagcttcagacggcactcagtcaaaactaccagcaacagcagcagcaaacgcaggcgcaaaaattgccgcagcagcaacaacagcaaccgccgcaacaactcaactatcagcaacagcaagcacaacttaaccataattataccgcccagcaacaggcaactgcagtgccggacaaacctcctgcagctcagtcgacagttgctgctgcggtaagcgaatcgagcagcaacatgatgaacctgccctctacggcgcaccagcatcatctcagtcagacgcatcacttggccgcctacaacaagccaacgccaccgcctccgcaaacctacagcaatcctttgatgcaatcgatgttgggctatgctggaaactatttcgacaagaccatgccgccagcagcccatatgtacagcgcttcgagctcagcggcttcggcttatggtaatccggcgcagcaactgccgggtaattatgttcctggcaacaacaatcccgctcaccagcaacagcagcagccacaacaacaacaacagcagcagcagcaagctcctgccgttccgccagcagaagtcaaagctccagcgaaaaggggacggaaaaagaaggcagctacaattgcggctgaagctgcggctgcagctgccaagcagcagcagcaacaacaacagcagcagcaacaacaggcgcaacagcagcaacaggtggccgctcagcagcagcatcagcagcaacaagtctctgcccagcagcagcaacagcaacatcaacaggtggccgcccaacaacagcagcaccaagccatgccgcagtacaatatgccgcaatcaatggcttccgcagccgcagccaccaataatcagctgcaggcacatgcgcaggcgctgcagcaaggcttccaattgtatgcgggtctgaaatcaggaggtgtatcctcgcccgtgggcagttcagcagcaacgccggtaaacagtggtggttccaccaccaatcagacagcggccgatgcggcagccatttccctgaaaacatcgacaggtggaatggtgcccggaagtgccttcaactttgcgccaactccaggaacgctgggcttgtacggagaccaggctgcagcagctagcagctatttggatcaattcagagatgcacccaatccctactacatgcctccggcgccggcacacagtggcacagctgcgaatccgtctggaaatgccgccgacaaaggacaaaacccattgaacacggcagccggatcgtatcccttcctggcggcggcacatccatcctcgcgagcagcggctgctgcagctgcttatccgtttgccgatcccaactcgcagttgtaccagcagtatctaaggcgcgatgactttcacacgcggatgatcttcaaccagagtctactgggcggaccagcagcggcggcggcagcagccggatatggtcaaccgccgccgcctccatccgcctatcaacgcgctgcactgggcatgcccaagccgtatgacattaaccggcagtcatggttttag

SEQ ID NO: 21423 - protein, 3080 aa, DROSOPHILA
MVSTFIGLLDIQSWWEIPCISHFCSLFSSAFDLPDIDIEDLESALLSDGTSDEDQVALVPELIVRLLKGCDALQTVAKEITHSNYQMFLRRFLRQQCRLHQTENHFDTDIDFQSLPVRKRLHILHDLCHFRLDSVDVQVILSNLEADSLRVEPLGYDAKNSGYWYFYGTRLYREDKATGGSASSSSGSGSGGAGASTGGASNSKGIGSNGTVWQVICFTEEDWQNLAAKFKTSTNAKERELFNILDDNFLPKLPQLFRERERLRRRKLLQVRNSSRIRNIAELKARQEEERQRRERENLYQDRQNAHWLAPPQQQQQQQQQQQQQQQQSQQRTRRRSQSTSTASGISTYASSLRRTTTTNSSEFLCHRETFCLSPENDEDDDDDDEALDAEQQSDQPEQQRQQEEQPPEEEQRQEPEELLAVSATDDDFRSPEAPKSQTPAELKSKSSHHHHHHHHKKKKSSKKQKKRHHRDKGRERDREHHHHHRRRHKHASEADEGEDDNNNHNSNSNSNSNTNSISSNNSVQPKRRRSGQQQQHHQQAETTEPSTSLSPEDKENFCRQLQLLDTNSAAIAVATSIADLSLPSPVAHESETEQDEQVDQPAVVEAQPPALTSAMAPAANVKLPGRQTNNSLSSLTGNIFIPSGSAQQQQQQSQEPPSSSSSSQSGTTTTASTVRSKKQKAVLNSSGSSSTSKMADKADRNLSKTETTGKSKKSAAGSSASSSSSKAERISGAYSDKSGDDFTETEEVLQIGMHKVLVYVKNHRDAWPFVDPVEEDIAPRYYSIIRRPMDLLKMEDKLDSGEYHKFSEFRNDFRLIVNNCRLYNGHNNEYTEMVNNLQDAFEKATKKYFDNLSDDEDDDPNLSYPAADSKMNVFREKYFSKKAKEETEKDAPGRPAVSSAEEDLSEIEAEAPQKAQKRKRKEKDKRRKKKTKSKADVETDDEDMEAEREPTPPPPPPTSKKSKTSKTGKEKEKDKEKEKDKDKEKDKETSSFKRGRKTKSDKSASKSSKKTKKGAKKSSADSDPESDPSDSRESEDYSDDDHISLAKTKSLVKPTARTIAAQKKKSVPAESKVKMPTPVKRQVKGKGKGGRKAKDDSLDSDQSDVNVKKQLPPTAAAALAESAAELEEDPDDPPPDEDEDEDSSRSRSMSPFKVDLHKKYSKSALNDDLSELLTTVKKVPTAETTKLSARHQDEADEERSSRESDGDFKSLSNSRGSSEERPPVAKKGKKAESSKKEKEKKGRDKDRDRDKEKDKDKSRSAKDKKSKDESPVLVAAAEAAAVVQAELDMLLPFMDKYDVIKYRRSRAAFSGSSASNSLAPSEDSKSAITKSNRENRKASAKREKSPDAVENKRGRKSKDQKRSKESDKAEKSDKASKADTEKHSEKSKKKEEPPKVVEKAQREKSPAPVSALETIKEPPAPTPIATSASGKVKEGPAKKEPKKRPDKQMPPPPKPADKSSEKGSGKKSSSKKAAQKAGQPQTNNNTNLEALDVETEQTLKDINRWLEHTPRFTEFSSASNSPSRYNLLDDFDSGIGSKLDAADFRRPVALAAPKAELVPTKLAEALNELVSEPKEAVSKSESESVAPTPSSVSSSCGTPPHSMHSGNSIGSTSATAASSSNCSNNSMPTPLPVAVTPTPTPAPPPLLPIPKPKEPSTTQLILNPPPPPHIKQQLAKEAKRKSLKEKQAAQAAQAQQVKAKANVMRTIDRLQPGKAKGNLLQNVVAVKSTEEGGDSHAGVNPVTTKVKELKNALITETCEGAPKLSLGTVLKTQDFSLGKSLEEMSGKKDANEDDRPNEEASPKNSSPPTTPNTEAPKPFEALHELSKRGKSSEPSKSEASQKEKPNLSAWLKAFGGPKVSKKSEDEEKQQTPVQDLQGDSKVAPPAHSPAGDNFSLPTVMRQRKPSTGSTNSERSSFSQDPDSPRIAIDERYGSYAAGSYTSPIGASPIGASPIMVSPKPNDDMGKPASPYPLNGAIKVGFYQDTTTKSSPDKSCSPREMNSPYPQYSQHIYSSASSPNVSTPDMSGTSPYGGGNSYNPSGSEASKTPAYSSTSPLPIYDQYKQPRSQESDYNSSMSPSTPNPHSPYQQPQSSPYTTPQQSQSTHPSPYHNQSPYHQQQHSPYHPPAAQQQQQSSQPSHSPAAHQQALSPMHSVESPASSAATQPPTPLAQSPAEQQHSPYQQPVLSPYQQPQQQVQPPVVPPVQPSAGAQASTALGNNGYAPTHDSYQQLQQQQRSLYNPATLINPLSTAASSTASITKPNNDWSLNRSLLPPSITNTVNQAAQQQQQQQQQQAGQLQQQPQMQAAQQQLQSTPQQQQQQLQGTPQQQQLQGSQQQQQQQQQQQQLQTSQQQQQQVLGHQQQHKPKYPTYAQYQSTNAAANAAAAADAVDNLQQQQQKIAPPTYGSDMATFMQHQMQQPPKTDTLINPLKRPGEEIGMDYSGNAANKMQKREETPAQQQQQQQQQQPTQNQTQSLLNKQQQMFNSFLGTMAFGKPIGNIAPDKAFEMYNRAAAMGFPKDFAKDNSCQLQQQQQQQQSPQVTTNKQQANQQTQQQPQQQSQQSQPHLTQLQTALSQNYQQQQQQTQAQKLPQQQQQQPPQQLNYQQQQAQLNHNYTAQQQATAVPDKPPAAQSTVAAAVSESSSNMMNLPSTAHQHHLSQTHHLAAYNKPTPPPPQTYSNPLMQSMLGYAGNYFDKTMPPAAHMYSASSSAASAYGNPAQQLPGNYVPGNNNPAHQQQQQPQQQQQQQQQAPAVPPAEVKAPAKRGRKKKAATIAAEAAAAAAKQQQQQQQQQQQQAQQQQQVAAQQQHQQQQVSAQQQQQQHQQVAAQQQQHQAMPQYNMPQSMASAAAATNNQLQAHAQALQQGFQLYAGLKSGGVSSPVGSSAATPVNSGGSTTNQTAADAAAISLKTSTGGMVPGSAFNFAPTPGTLGLYGDQAAAASSYLDQFRDAPNPYYMPPAPAHSGTAANPSGNAADKGQNPLNTAAGSYPFLAAAHPSSRAAAAAAAYPFADPNSQLYQQYLRRDDFHTRMIFNQSLLGGPAAAAAAAGYGQPPPPPSAYQRAALGMPKPYDINRQSWF

SEQ ID NO: 21424 - DNA, 17561 bp, DROSOPHILA
gaatttttaaaaattattttattttatcatattgctacgaaattggcaaaaactaccctaatatgtactatgtaaattcatttcttcgatcagaattgatttcggcccgaaaatcgtcttctagcacaacacgcacacatatacagagttctcgactcttgtttttactcacacaagcaagcaaattaaatttttagatttcttacgctctcagcgggagtgagcggaaagagagcaattttggccgtcgctaaaaaattggctgcatagtgccaaaccaatgtatggccgttacgcatcttgttattctagtgtctttggtctaatcctccaaatagatttctttctctccagggttttttagctgtatatggatttacctctctgtataagagaagattgaagctgaaggaattcgaaaccattaccaaaatgaaacaattgaagacataaattggacgcttttgtgatgcgtcttgcctgtgtcacagctgaagctgatggcattctttatgtattttataatatatataatgtatatgtatactagattattcattgtataaactaacaacatcatcagtatcagtatcagttagttaactcaatgtgcaacagccgatgataggcgtacactcgtcgaacgaagaaaatacacatttccaatcgaagatcatccgaaaaaatgaaagaaaacttataggcgatgtataattaaagaaattgcaaactgtctgcttaattggtacttggtagtttgtaggtggtgcgtatgtggtgttcatgtgtttcatgtgttatatgaaggacatgtgggtatttgtgggtgtctgtggaaggcgcttcgtgtatccttgtttcgttgagcaactaatttagttcaaatagcgaaaacaattttgaaggcggcggctaggcgacaggcaaacaaattatgcagattgcgagctgatatatttatgtgtacgtagtggtgactccaaaatccctgccagcttagctagccctcgatctgagatcgcaggcggggccgtggcaagtccccaaaaacagcctcgccatggacacttctggtcagcgcttggatgcttgccgctatgtcgatgttgtccattccctgacaaaaaagaaatcagccattagtttcgtatgtttttttttttactgttaaatactgatctcacctcctcgcagccctgcccgaagttattgttgttggccacagcagctctctcggccagcgtggtgtttgctatctcgatgggcagactccgggcgaagttcatcaactgcgcatggctaggacgccctccgcctcgcactggtatggaaatggagctatccgggtccagagcatctgtaagttggaaacatattgggggtaaataaaaatgctagtgacgtacaattttctagaactcaccttcagcttcatccgcagcttcgtcatctaggacacttcgtaggccattttgttggctcagctgctggaagggattgtgctgaggctgctgctggtagatcaggctacgcgtgtagctaggcacaggcacggactgaaccggaaccggagcatccacatcctccagatcgaacaggcagtcatctgcatcttcgttaacactggactgacccactccatttggggtcaacgtctgggtgggtggaccaccagcaccgccggctgctgattgctgccggaaggtggggctgttgcccacgctcatgggcgtggcttctggggtggcgggcggtgtgtcaaagtgcgacatcttcctggccatcgagacactctgcggggcctgctgctgctgctgctgttgcgcctgcaactgttgctgctgttgctgcgccagcaactgttgctgcggctgctggttcagcgataggaagttgggcggatgtgtcaacgtagtagtgggtgtggtgggtccaccattcaactcccgccggctgctgatggtgttcctgcgccgggcagtcgcactctgcggctgattggccgccacatcaagggcagggagcatggcacgatcgagtagctccgaggcctgctcgggcaacgcacgaataactttgaatagcaacgcgcagtcctgatccgatttctcccggaaactgtttagtaactggaactgagtgcgcgtataccgctcgattctctcatttgtctccacaatctcctcctgcaatcgcgcctgctggtgcgcttgtatcattctcaatctctgcaccctggcatcagtgggattcgaagacagggatccgatgcttagactcgatgcggagttggatagtccactggtgggtcgagtggatccagagtcactgcctgtgtgatccatgatcagcagctcgaaggtctccgagaaggctttgttggacttccgttgagccagctcctcgctgctggtcaacagcgtgcagttgatgaggtagagagtgggcgtggccccggcgcccgccgtcaatcgcttggcgcatagcacctccttgcagttgatgcacaggctcagctgccaactctggccagcggcttccagggtgagaccatacaacagctcccgctgattaatcacagccacggtgaggtctggaatgggaccataggcctgaaacggcaagaaaaaagttgaatattattgcttgtttaattctattctattatttaattcctttattcctttttgttagattttttatcaaccatactacatggttattgatttgggtatcaggctttccctgggtgcaatcctcacattcatattaaattggattacctttagtcaacaagttgataacactttccacacagtcagtctggtcaatgtctgataaagagggattaccaattcgccccattattatctgcacttttgatcacaacagaaaagccagcctttcttcgatgtttacccagtcaacaaccccgccgcacagtagttcaagtgcaaatttgtcaattatgttcatttcgagtggcggcacccgattgtgtgaagactttatcggaaaacaagaaaccgctgatgaacacgaaaacaacaaacaattagtgcaatggcaaaatgatgttgatgatgggtgccatcatatagagcagaagacaacttgaattattctggctgtcatggtgacaaacagaagatgtgatgggtaaacaacaagttcatgatatcgccggaatagattaaaatagtctggtttccaaatgccaaaatagaaacaaacaagtttgcagtctgccaatgaaacctaaatatatctatcatcataatgccccgccaatttagacacatagttatgcaaaataattccggcatttttggaatcgtagcacgtgtttgccgactgacacaggagagaaaaacactttttatagacgtgcttggctaaatttgacactcgcgtccaccacaatcaagtaatattcatatagcttggacaatggagagcgcagggcgagatgtggagcgggtgggacactggacacaagtccacacaagtgcacaaacaaccattcgcacacgtagatacaccgaattaaattgaattaacgtacgaactgcaaacgtcaacagaaatcaaatgacaatgttgcccgacgtcagctaagcgcttctgaatcgcatagcatcgttttcgttttccacataaccatcctcatcactttttgccaggtggacaagagatcatctctctcatctctgatccacatatcattgaataatatactttaatatatacttcatatacattcaattaaattcttgaactaaaacgaaatgtttatcattcgttcaaaaggctgatattgtcataattttggctgtcaactcaatttccggcatttcaaaactgcagctgcattcgttcgtctttatttagaaatttgttttcgcatccattttggacaataacaagttgcggtcacacccactcaaaaaaaaaaaattgttttcaatgcaaattccgaacttgttgtttacaacgagtgcggtaatatctaatcaggcccagtcagtcggtggcaataattatacatatgaatgaaaccgaaaaacaggcactaaaatgtgacacagcaaatgcattgttgtcaagtgttttggcactcggctgatattattgccggcaaacgcataaacatatttatgggctcaagcctatttgctcggtttaaaattgcagttttatggctgttttcgtaaccgcaagacccgactgactggctgaccgactgacttgttgttcttgctgctaatttgctgtgctgataccctgtaagatggggatttgggcgcaatgagtaattatgcctttcttcgattgaggagcagataagataagtggtacgattttagatttatgattatatctgctgcgaaggcgtaattaagaaatcgagaagttacgagtaaatgccaacatataagtaacccaaaaatatcttgatcacatataaccattccccaaaaaatacagcaataaatatgggtatttagaacggaaagttttcgcatctagggtaactgataaatcgatcattgctgattgccatccatcatcattcattcagcatttttttgtttagcgttatttatggttttatggcacaagctggctaagcttgaagtgggtgtttttgttgactcgttggacgggccccaaaacgcccgacattatcagttaagatttaagacaaatcatcatcagagccatcatactgattagctgcattacctcctatgcagatgcagttttaccctttgcttgccaaacattttgcatgcatttttcgcccctgctgcgaatcgcgatctgccaaatgtcaatgactcttctcagtgactttcagactgcaatgacaacaattgaaggcaatagttgccttcgtcgttgtcgtcgtcgttctcgtcgtcgtcacttcattggattgcttaattaacctaactgcctgttcgaatgatcgactcttgcttaattgaaattaaatgtctgcgcgctgtcctgctaattatgtgactgtggcgccacctagtggccggaaccagtggctgttagctaattaaataaccgtttacgttcgactttgacgtatgaccatttgctttatggcccaggccagccaagacgggcatttgattaattgtaatcgcgtcttctggccgaaataataaataaaacatggcgtgttctaactggtagtggttggccgaaagagatgcaaaatcgccaaaggaaacgcgccgaggagcacgtaactactcaagtcgcacgctcttcgcatatcggaaatcagtatgaagcgatttaattgaatcgcgcgacatttaagtaatgtatgcaatctagacggaatcaattgcattggtgccaactgtcgaaaacgttgtccaactgtcagcttgagtccgtcgatcacttaatatgcatagtggataactatagaaaatcaaaatactttattgcaaccaaagacatggtgtaataataaatggattctagaacgaagctcagaaactatggcaattcattagattagatttattgatctctttaatgtgttaatgctacgaaagcaactgaaacagaattttaccttcgtttatatcattatatgtttgtatataattaaataaactgcataatatggccgtaaagtcgactataacttgagagttatgtataaatcatgtagcaatctcggacgggaagtacgagtgcattaagatggagctatcaagtgattctgcttttcagttatgctgcaaagcaaataatgacgttttgctatcattgaaaaacccttgcgtacttttcaattgcctgtatctattttatttggattttttctgtattatacaaacgagcgaggcaattgaaattcatatcagtgggtaatggtgtctggaaataatgcatattccctcggcgctgcttatgcaaccagaacgattcccataaaacaaacaactttagagcaaaatgtgtgtaataatttctcgcattttgcacattgctgcataattaatttgttgttgttgtgcgaggcgactgtgcagtttaattgattgaacggcattaattaagcctgtagtctgtgacacttgatgtgtctaaatactggtcgcctaactaactaaccacttacttatatttcgatgcatatcaaatcgctttgctattgacttggcgaaaaacaaaaacattaagctgtgtccaaagggataaattagtagtttgtcagacatattataaaatattttcactttcacaacggcacaaataaagatgacatgcataaaaaagatacgaagagtagcaacaaattgtattttaagcctcttaaattattctgcttttgttattctcctgtgagataataatttgcttatcagttgatctcgtattagtctgatatcacacttgaaaatctaatagataacaaaagggaggggattggctgaaaatgccgggagggggcattaacctgttgcaagtgctggcaccctcgttaattaccaataaatcagatcgtcaatcatccgtagctggcacacctttcgccgaaaaaaagatagattgaaagagagaaaagaaaataacaatcaaccgcccgattgacgcattttcctttgttttgttttccatttctaattctattttcattggattttacttttttttatagctttgagataactcgcccgtgttgcgtttcatcggcagaaaccgaaactgagccaaaaagaaaataagttgtaaacaaatcaactggcaaaagaaactacgaaaataatcttttatagatttggatccccctcgaaatggggatggcaaggaggaggggttcgctctggggtgcgacttggttcgcctcgctgctcgcgaataatacaataatataataccctctacatctccctcttccacttcttgcatttttttcttttttcattttcattttttctttttcgttttttcttttttttttcttcatttttagttagttttgcctcttttttttttgtgtcgaaaaaaagaggcaaacacatttcgctcagatacgtcgccgttcgtcgttggccattatcataaacaactttagacagctggggacacacgcgctggctgggcgttttcgctctgcggattgcgatgccaatttgtattgccgcgctcggtttttttgtaaaaaaaaaaaaaaaatttccactaccaatcggcgggcttgcgatttggccagtccagtccatctagggcttttgttgtgctcctccgtccgtttcttgggttctttctgggccgccaatgtgagtcactcgatggcctaagcccctacatcaaagtgcctttgggtcacttgttggtcgaaacttgttttcccagccatttaatgggcctaatatttagggttttgggttctgttttttttttattggaattaattgtttacccaatttaaagggcttcgtttttgaatcgtaacaacgcatttatagcagattctcatgaagagcagcttagctatacaaattgtattttaaagaatttaaaatgctgttagtctttcgactagtattcaatccacttaagttgtggctttgtaagccttagtaaaaattgattatcaccccagcttttatttagatcgtacacgtattacaaaattaattgctgtcatgttcaactttctaaaccaatttaagcttattgttttccaagccctccgtcccctgcacccacctcattcgcacttccctaataaaatgttgccttatctacgaaaaaaaacaaaaaataaaaggaaaactagtaaaaaaaaaagcgtatcattcaatgtcgtttgaaaacaaaatctgataacgccccagacccaaaacatcgcatatagtctcgccagccaaagtgcctaccgcacgctccctcctccccctacctctccaccgagccctgctcccaaaagatatatatttcaatcgggattagaatgaggaactggaaaaaagctagggaaacgtgcacacgtgtgctccccgcagaaggattaaactttttttttgtaagtatgtaaataaatgtgctgaaatgagtcgaatctcgattgtctacacatgaaaataaatttacctataaaattattaattattaaataaataattattaaataatatatgctccataacagtttgtttaagcaactagacaagaaaacattatgtttacttagccagtaagtaggtatgcttttatgaataacatcagattagattatcaaatcagataactttttggtgtgaccttactttacgaaaatataaaaaaagttaaatggtaaaagcttattttattgaaatcataaatgctcagttattaatatattattaaaatcaattatcaataattacgaatttaattttaggtatttgacttttcaaggcccttctttatatatatattacacggtcaaatcaactcatcgatttcgctcagtgtgtaacagtaaattaagcgcaacaatgtttgcccatcggcactgctaaacagacttcgaacaacgaagtgtgcgaggggtaaaaaaggggttgggggttctggggggactgcgaggtacataggtgtgccagtgttatctaaaaactttgacaaacaaatttacgttggcgtggattttgtttgcccagcgcgcaccgcacagccggctacagctcaaatttaataagcaaacagcaaagatggcggaattctcgggcctgcccaacgtctgctgttgttaattgttagttttatacacactcacacagctcgtataaataataatatgaatatacggccacatatgtacatttgtactagaataatgagatcatctcatctctagcgatcccaaaacgcgacctgcgcctattttcggagctaccgaattatagagttgtgataagacctgcttatttgtgcaaacggtctaattatagcttttttccaggcgtaataattacaagacagccaaatattgataagactatcaacactaagaaaaaataataattaaactgtttgaagaatactgaagaacacaagatgttgatgatcaaaaacggacgtactagaattcatttgtataagcgttttgagaacaagatttttgatttcgatctaagaattcttctacgtgctctactcttaatatcgtaaactatttgaattttttttttttattttccactcctatttgcgtatcaaatttagaccccttgtttcgtgtttatccgaagtaaacaaatctttgtggccgccgcacatttgacacagttttcattatttatttatttctcgcctggccactactattatttctattttttcggctgcattgtgtgtgttgttgtgcctcagagcaaatatttatgcgaaaccatcataatttgggggaagcgatcaaaattaacccctcacccgataaaatcacgcatgctaaacgtgatcgacgtgatcaaaaagaaaaaaacaaaatagaaagaaagaaagaatgaaaaaatcagagaatcaaccccccgaacccaaaatgccaccaccccttttggcattcttcaaccctcttgcacacgcaaaataaattattcgcgtttagatattttgaaaagaagaggtgttttctttgctttatttttatttttatttttagccggcttgcgatttctcaattcaagaatttatagttctgtttacacgagagcatttttgtaccatgtatgtatatggcactcagtagctacatacatgtacatatgtatgtattatgtacattttacaaggcaagtgaaaaaaggttaagagtttacgagcaagggccaggctcattagattggcccaaagattggttcgctgaagtgtgtgggctttataacagtacggcaatcgactgccgctgacttcaaggttatatttgttaaagattaacattggttttcaattaaccgacacgcgcgctgcaagcagctggtcatatgtatatgtatgtacataaatgtatttatttttccatatgtatttatgtggggtcaaaggggtggttaactgtgattgaccagcgtactcttctgggactctgaagctctgaccttgccatatcataatggcaatctcctgcttgggatgatgtgttgctttccaaagggtcagtaaatgaatataagcataagcaatcagtctaaaagagataattgaacttggcatatcaggtgaaaagtatagaatacaacctcaacaatttgcttccaattttaactttttattttagatgataagagcccgcccgactttttataaagggccatcttagagagtgataatatagcccacagttttgataagaaatttcttttataagcaaatataataccttccagtttgcattattattcatttcctagacacattttatcatcattgttttttttttttagttttttctttttcggcccagacagcaattaggccctactcgcctgatttttgataaagtatttgtgatttcccacttatcattccacaattccacttactagtattgttacacaaacccatgcagcaaaaccgcctcgattcacagactttacatttgataatgactatttttagagtacacaaacgttgtcattgcaggcgcgccttatattctcaaccatatgaggaaaatataacttaaactgattgataactcgtgcttgggatttgctctgttgatatttgccttgtgggtaatcggtggattggaaaagggttttcggtttcataacgcgattaactgggataaaaataaacatggccattagcatatgaatgcagttgttttgttttctcttgttttagctttgttcaacaaactcgtttctcgacccattcaaagatcgtgtattgttttgattttcaattaaccaattttcacaggtgagagtcccaacaattgaagaagggcggaggagattaaaggctctaatcataaataaaccacttggaaaggcgaaactgggaggcagacatcgattgacgacagcgcgactggcagcaatcgttttatacatatgtactcgtatatatatactctatactactatatagaaaagtggcagggagtatcagtatttgtgtcgccgcgtttttaccgtttgataacctagaaaagacgcctaggtaggtgtgagtgtatgcaagagtgtatatatatatgtgtgtgtgtgggcgctggacaatcaaaattgataaggggcgtgcgcacaatcacaatcacagctacttttactgctggattaagaggcgatgacaaacaaactgcaagatacatgaattcattttgtaaacaacatacatagtcctaattctagtccattcgcacagaaatatccaaaagaatgcgcaataattgtacattcttttagtttactgatttatacaaaaagttctaaaatgtttaaacttcatttaatagctaccataaataatatgaaacacatatttaattcgctttgtagacaattgtagccatatattattcatcacaaaatcataaaagcataattgagtgctttcaaaaacaatcataattacaaacagatgtcactttaagtgcgcgtttcgagttagcgagcactattgtcagtcaatttcattagtgttgcacaagtcattaggaagttcgagttgactaaattcaagcatatagccttgtaatggcccatcacacatcttgcccatatgtcgtccggcatttcaacaaattttatgcataaattcataatttaaacatttcggagcctacgcagtggagagcttttatggccagggttggggtattttcagtggtggggatgatggggagatggtggtgctccgacttgtcaactggcccatcaagtgggcccgaaaaagccattcgccagcagtccgcaagcaggcatttatgccttagtgaccccctacccggctttcaatacatacatacatatgtatgtatgtacataatatatgtatagtttttatggctgccttttgtacgcctacacatggcaaaacaaagtaacattgaaatgtttattaaccatgaagagaaactactaaggctagaaaatgaaaatcaattgactagaataacttaatcaagaaaagagcgaatttacagggtataggatagtacaagttaagtgttgcttattgaacattccaaaagcggacagaaatacactctacagggtatgcgatagttcaagttgagaatagaaataatccgattttgctttcttgatatgaagttgttttgatccaaaggtctcccagctgaccaatcccaaaggattaacaatttatttatctagctagcagtatggcactactgatatcgtttggagtttcttcgagtgagcgcctcttggagcaactccctctcttttgggcgcccagtgggccttttgtagccccctttcttccgctgcccggccaactccgtcgactttacggcggtccagtgcccggccggccgcatttggaaatctcgaaaacttgtttatccaacacacacactcacacacaccctcacacacactcgaaaaaaaatatactgccaagagatgggggaaaaaattataaacaagttttttgttttgtatttcggctcgaccgttgttgttcttcctctgcctgtgccttcgcctctgcccctcgccacgccccgcttgccaacccctcgcgaccgctctttgtgctttttacttcttgcttgtgtgttttgtcgctggtttcgtaatttattctaaaagcgttccgttttggctctacatagaagtgtatacatataaacacacgagcctgcatactgatttatacatacagactcatacttgtggcatatacatatgctgtgaggggtattttaataacagttataccctcgatcgatgatatcgaaactaatttatcagttgtgtaagatagtttcttttgattttagataccgctgctcaaaaacctatagagattttacaagattcaatatttgtaatatcctaaaagatttatgttactattatgcttaattagatatgctttattaaatttttaatgtcgacactcatttataatacgaaaaatatataagaagtgtttgaaaggtgaagatagcgtatctgcaattcggtgtagttgcaaatttggtttactttgttttcatttggttttttgttttgttttgtgagctttgaattattcaaaataacacttttggtctatttgtccgcgttgctgttgttgtagcacgcctcagcgcttttgaagtgggtgcaacacaacacacaaagcaacaaaagcaacaatagcggctatagccgacgatctgccaaccgcaaaaacaaaaactaacaagtcgttgccgtattggacaattcaattttgcattacaataaatacagcactcgagttacaaacgtgcggtgaaggtacttttgtgcaagcaccgcgataaccgattttctaaaatattaatgagtcaatcttcaatatatgtatgtatattcaaaatgaaaagatttcattacatatatacatatatttaagcactcaggactgctttaagttcggaacatacatatgcaactggtaaaatctaagaaataaaaatgatcctcccgagaccacgtccacccactggctgtcaaacctcgggccagcaactccagtggctgtcaaaatctgacgagtggcgtggtcgaaagtggggataaaacggggacagagcgaaagaaaggggggatactgagatttaaccttgaaaagtgtggacaagacaagcggcgatgacgcagatattcagttgtttttattttgttaaatggataaggtagcaccaggaacgaaagatggaaaaattcggcaaaacttaataataacaacaattacagacataaaaagtgagggggagaggttcccgaaaaaaaaaacttcgtatacagcgcggtccaccaaagtattatttgcctgcaaatgtcaactactcaagaaccagtttaccttcttaataaatacacttatgatccgtatttatgcacataattttaatataaatataataaaaagcaaatattaaccattcgattatgaactttaataaattcataattcataatcgaaattttaaatgccaagatagctactacaaataaacaacgtgattatttccttatatgctatttgttagtggcaaaaaaatgtatttaaaataaataattgccgtgctaacttttcattccaatcgctttaccaaaaacattattatttgatttattcgcaaaaaaaattattttttgctggtcttgagttgataaattcaagtttgggaatttaccacttgtttatatctttcgactaagttatgaagaaacaaaatgaaaaacaactacaataacaatcaagaaaatatgggaaagtttttcaagaaatccccattttacaacaaaagaccagatattaatttgtgtatttaagtaatgactaatgacgacatcggtgatctataaattatacatacatatgtatacatacagatacatacatacatatataatcagataaaaattaaaaaatacatacatatgcatatatataaataaatatgaatgcttgtaagtactacctgttatttttaataattaaataattggtataacaaaatatttccaggtgcatttgtataattattttcttggtagggacacccttaaattcttttacaagaaggacataaatttgcgactttattaaccattaacacacaacttccgaattccagaactggaatattccacttcgcttaacccctgaatgccaacccctttgcaactttgtgacgtttttgggaaagcgaaaccgaactgaaaatttactaaacgaaattatgcaaattacttgcaactgagggtgtgacaaatgaaaagcaagagcgaataaatcataaaaaaacgcgaataaaaacgggaaaaagaaggcgagtgaaacagaagctgacgcaggaaactaaaaataccggcgatcaggttggcaaagagaataccgaaccagaacagggtgctcctgcttgaaaaggaggagcgaatgataaacaggtgcggaacaggaggagagtgataatggtggaagagggggggaggggaacgcgaaggagcgggcagaccaaaaataaaccagaaaatgtgaggattcctcacgagtttcctatgagcaaatggatgaccctatttcttcttgcccttccatattccctacatcactcagtagaccttctccttccaattcacgattccaggcctacatatgcacacacatatgtatgtataggcctatgtttgttttgtgtgtgtgagaataggcggcacaggcagaaacggcaaaaaaaataaagccggcacacaaaacataaagaacgataataaaaacacataaacacacactgacagcgcaacaacgcaaatacagtgaatttcgcttaacaattactttgattaatgcaactaaatagagtgtactgttaggttacaccagctcaattaaggggaatagcatattaagcgaaaaacttttaatacttttaagctataatatatgcttttcattgtgtttgcattttttgttaataacaatgtattagcggattattaatgcattgcttgagcgaacattgtgttctattcccctgtggtccttttaatcgtatcttcactgtgtgcccgcaaagagagcgaaagagcgcgaactagtgtcccagcataggcctttagcccattgttgttgccttttatgctgcgccgttgttgcctttgcctactccccaatcaatacatattccgtcctgctctggcacgctgggcgataatcggttgacgaactatataacggctatagttgaataccgagagagacttacgtgcttaaagaactccatgatatggctgtagaagacgaagtccagaggatacttctgctggaacacctgcgacaggaggatcgcggtgggtacctcgccgctggcgacctctgcaccgcccacgcggccccctgcgccgctgctgctgttgctgcgctgcaatttcgaagtcgaagcaacgaaattcgagcatttgcacgagatcaacatgattttgttattgccggttagctgataacggtaattgatgcgttgctctctttctctctctctctttctatatttcttctcacttcactagcaaaacacttcgatgttcttcttcctcttcctaatttatatcttgcagcgcttgataataactaacaacgagtcctttaaatcactttcccgctcaatgttgttcgatacttcgagtgcaattcaagaacccctcgagtcagaagtcgacgggcatttgcgggtattccgagattttacgagttttcttctggtgaccgaaaacaatcgaacatagcatacacccacaaccgttcaatttttttgtcgactgtctccgatatcaggaggttgtttgcctgaagcaatcggttatcgcaattcagtatgaccgaggtggaaatagccggtcattttgggaattccctaaaatatcttcgctgaaacagttcttggtaacaccagatgaaagtgatctggcaactctgaaagttaccaatgttaacagagcgtgcggctaacagtgaataatattatatctaggtgtttaattgctgacattaaatgttatgttccagggattattataaataagaatgtttatttagcttgcgcaagaattccatatcctgtttcattaacaaactttcagtatcgtcatgggataaccgtgaaaaaatcatatttatacatgtggggagttgccatccaggtttgttaacttgattttttgaatccaatagttaaaagtcatattgaaaagtctagacttcaaccatgtcaaatatattatgcatctgtcaaatgtcaaatacgtaagtaatatgtatatgcataaaatatttttgttaattgcttctacatgttattcatatcaagagggaatccttaactttattcaaagctgaaaatttgcacaaaaagatggctgcaaaattgaaaagtctacacatttttcttgtttgccagaattttgatgaaaaggagcaaaaggaattcaaatagctgcttatgaaatcttttcatgttgttattattaattattattgtaagatcgaaaagataatgtttttatttttgaattcttatttgaaagtaatattatttttttgtaaatttttattatttatttttatttataaatataaggattaatttaacagattagtttaaaaagtggaaatttcaacctgggaaaacccctccttcgcaaaattcagcaccacgaatccgaggaagactcttagaagagaagccgcaacgagaagagaccactcgaagatgatacggatagaaggacatagcgagattcttctagtatacccttttaatttacgggcataaaaatgagtctggtgtgaatttacgc

SEQ ID NO: 21425 - DNA, 2067 bp, DROSOPHILA
attgcttcaggcaaacaacctcctgatatcggagacagtcgacaaaaaaattgaacggttgtgggtgtatgctatgttcgattgttttcggtcaccagaagaaaactcgtaaaatctcggaatacccgcaaatgcccgtcgacttctgactcgaggggttcttgaattgcactcgaagtatcgaacaacattgagcgggaaagtgatttaaaggactcgttgttagttattatcaagcgctgcaagatataaattaggaagaggaagaagaacatcgaagtgttttgctagtgaagtgagaagaaatatagaaagagagagagagaaagagagcaacgcatcaattaccgttatcagctaaccggcaataacaaaatcatgttgatctcgtgcaaatgctcgaatttcgttgcttcgacttcgaaattgcagcgcagcaacagcagcagcggcgcagggggccgcgtgggcggtgcagaggtcgccagcggcgaggtacccaccgcgatcctcctgtcgcaggtgttccagcagaagtatcctctggacttcgtcttctacagccatatcatggagttctttaagcacgcctatggtcccattccagacctcaccgtggctgtgattaatcagcgggagctgttgtatggtctcaccctggaagccgctggccagagttggcagctgagcctgtgcatcaactgcaaggaggtgctatgcgccaagcgattgacggcgggcgccggggccacgcccactctctacctcatcaactgcacgctgttgaccagcagcgaggagctggctcaacggaagtccaacaaagccttctcggagaccttcgagctgctgatcatggatcacacaggcagtgactctggatccactcgacccaccagtggactatccaactccgcatcgagtctaagcatcggatccctgtcttcgaatcccactgatgccagggtgcagagattgagaatgatacaagcgcaccagcaggcgcgattgcaggaggagattgtggagacaaatgagagaatcgagcggtatacgcgcactcagttccagttactaaacagtttccgggagaaatcggatcaggactgcgcgttgctattcaaagttattcgtgcgttgcccgagcaggcctcggagctactcgatcgtgccatgctccctgcccttgatgtggcggccaatcagccgcagagtgcgactgcccggcgcaggaacaccatcagcagccggcgggagttgaatggtggacccaccacacccactactacgttgacacatccgcccaacttcctatcgctgaaccagcagccgcagcaacagttgctggcgcagcaacagcagcaacagttgcaggcgcaacagcagcagcagcagcaggccccgcagagtgtctcgatggccaggaagatgtcgcactttgacacaccgcccgccaccccagaagccacgcccatgagcgtgggcaacagccccaccttccggcagcaatcagcagccggcggtgctggtggtccacccacccagacgttgaccccaaatggagtgggtcagtccagtgttaacgaagatgcagatgactgcctgttcgatctggaggatgtggatgctccggttccggttcagtccgtgcctgtgcctagctacacgcgtagcctgatctaccagcagcagcctcagcacaatcccttccagcagctgagccaacaaaatggcctacgaagtgtcctagatgacgaagctgcggatgaagctgaagatgctctggacccggatagctccatttccataccagtgcgaggcggagggcgtcctagccatgcgcagttgatgaacttcgcccggagtctgcccatcgagatagcaaacaccacgctggccgagagagctgctgtggccaacaacaataacttcgggcagggctgcgaggagggaatggacaacatcgacatagcggcaagcatccaagcgctgaccagaagtgtccatggcgaggctgtttttggggacttgccacggccccgcctgcgatctcagatcgagggctag

SEQ ID NO: 21426 - protein, 562 aa, DROSOPHILA
MLISCKCSNFVASTSKLQRSNSSSGAGGRVGGAEVASGEVPTAILLSQVFQQKYPLDFVFYSHIMEFFKHAYGPIPDLTVAVINQRELLYGLTLEAAGQSWQLSLCINCKEVLCAKRLTAGAGATPTLYLINCTLLTSSEELAQRKSNKAFSETFELLIMDHTGSDSGSTRPTSGLSNSASSLSIGSLSSNPTDARVQRLRMIQAHQQARLQEEIVETNERIERYTRTQFQLLNSFREKSDQDCALLFKVIRALPEQASELLDRAMLPALDVAANQPQSATARRRNTISSRRELNGGPTTPTTTLTHPPNFLSLNQQPQQQLLAQQQQQQLQAQQQQQQQAPQSVSMARKMSHFDTPPATPEATPMSVGNSPTFRQQSAAGGAGGPPTQTLTPNGVGQSSVNEDADDCLFDLEDVDAPVPVQSVPVPSYTRSLIYQQQPQHNPFQQLSQQNGLRSVLDDEAADEAEDALDPDSSISIPVRGGGRPSHAQLMNFARSLPIEIANTTLAERAAVANNNNFGQGCEEGMDNIDIAASIQALTRSVHGEAVFGDLPRPRLRSQIEG

SEQ ID NO: 21427 - DNA, 6640 bp, DROSOPHILA
acacacaaatgcacactagcacatcggagaagtagaaaaatgacttttgttcctatttaagtaactaattgcgggtattttacctatttatggtacggatttagatctgtactagagcactatcttttgcataatgccgatttccgcctcgttaatggctcactaaattaaatattgaatgggggaaatgtgaatgccaaacacacaaacaaagcagctacaaaatgattcttttctagccaactatgccggtccctttctggcgcacgcgttttcccgtatcgggcgcagcgcccgtttctctctcacactcactatgcagaaaagctgcgtttaattgaatgaaattgtttaagttactacaacgcaaacactagtcactaatcacaccaactagttaatgttttttcgtggccagttttaaacgcaaaacgctcgaatttctggctgccctgccaagtccgatggggttgttgatgtcgcatccgatacatcggataggagcggatgtatttgcgcagtcactgctcccgcaccagggctgccaactatcgattgaacgatcaggtcaagaagtagctagaaataagctggcaaatatgaagcgttacgtacgtagcggttatttgattttaagttatgttacatttacgtacatatataatataattgtataacgtgtgcatacaaaataattgttataaaaatatacaagctctaagaccaaaatgcactataaataatttctaaatgtttagactcgtaacttatgcaaatacgtaacatacgtatcattttacatgttcagataaaaaaatatagcttttatttggtcaaatacattttgcaagatattaactaacgaaatacttaaaaaccgctaaaacaaaaagcaagacaaaaatcaagccaatatggtattccacccactaaaacggcgaacaagttttcacatccaatgagcgataactttgcacccacaatcgatagttccgcagctgctgtgtgtgttgggccggcaaattgttaaactggctgaaattgttaataatgttttaagaaattgcgacaccaattaaaccaccgcaatgttttcgatgtgcaagcagacgcactccgccacggcggtggagttttcgatagcatgccgcttctttaacaatctggatgagaacctggtggtggcgggcgccaatgtactaaaggtgtaccggatagcgcccaacgtggaggcgagccagcgtcaaaagctgaatcccagcgagatgcgtctggcgcccaaaatgcgactggaatgcctagccacatatacgctctacggcaatgtgatgtcgctgcagtgcgtctcattggcgggtgccatgcgggatgcgctgttgattagtttcaaggacgcgaaattgtccgtactgcagcacgatcccgatacgtttgcgctgaaaactctctcacttcactatttcgaggaagatgacatacgtggtggttggacgggtcgctattttgtgcccacagttcgcgtagatcccgattccaggtgtgccgtcatgttggtctacggcaaacggctggtggtactgccctttcgcaaggacaacagcctggacgagatcgagctagcggatgtgaagccaattaaaaaggctccgacggcaatggtcagcaggacgcctattatggcatcgtacctgatagcactgcgagatcttgatgagaagatcgacaatgttctggacatacaattcctgcacggctactacgaaccaacgctgcttatactctacgaaccggtgcgaacctgtccgggaagaataaaggtgcgctccgatacttgcgttttggtggccatttcgttgaacattcaacagcgagtgcatccgattatttggaccgtgaacagtctaccttttgactgcctacaagtgggtgtttgaaaatgccacttaccttttaggagtcacaacgtttaatgtgtcatttttcccttgcaggtttacccgattcagaagccaattgggggttgtctggtaatgacagtcaatgctgtaatctatctcaatcagagtgtccctccatatggcgtcagtttaaacagttcagcggataacagcaccgcatttccactgaagccacaggatggcgttcgtattagtttggattgtgctaactttgcatttattgatgtcgacaagctggtaatctcgcttcgcactggagatctatacgtgcttacgctttgcgttgactcaatgagaacggttaggaacttccatttccacaaagcagccgccagtgtgctaactagttgtatctgcgttctgcactccgaatacatatttttgggatcacgtctcggaaattccttattgctgcactttacagaggaggaccagagcacggtcattacgttagatgaggtggaacagcaatcggagcagcagcaaaggaatctgcaggacgaggatcagaatttggaggaaatttttgatgtagatcaattggaaatggcaccgacccaagcaaaatcgcgtcgtattgaggatgaggaactagaggtttgtaaacaatatacttaaagttttgaattgtttttaaatttgatcgtttttacaggtgtatggttctggagctaaggcatcggttcttcagctgcgaaaattcatatttgaggtgtgcgacagtctaatgaatgtagcaccaatcaactacatgtgcgccggagaaagagtggaattcgaagaggatggcgttacgttgcgaccacatgcggaatctctgcaagatctaaagatagaactagtcgctgccacgggtcacagcaaaaacggagctctgtccgtatttgtaaactgcattaatcctcaaatcataacaagctttgagttagatgggtgcctcgatgtgtggactgtgtttgatgatgccactaagaagtcttcgcgaaatgatcagcatgatttcatgttgctttcacaaaggaattctacattggttttacaaacaggacaggaaattaatgaaatcgagaatacgggctttacggttaaccagccgaccatatttgtcggtaatctcggacagcagcggttcattgttcaggttagtttgaggtcgtattaatggtattttgtatataattatttctttattcattaggtcaccacccgtcatgtcagattattgcaaggaactcgattaattcaaaatgtccccattgatgtgggctcgccagtggtacaggtgtccatagcagatccctacgtttgcctgcgagtgctcaacggtcaggttatcacattagcgctgcgagaaacccgtggaactcctcgtttggctatcaacaagcataccattagcagctcacccgcagtggttgccatttcggcatataaagatttatcaggactattcacagtgaaaggtgatgatataaacctgaccggcagctcaaacagtgcatttggacatagttttggcggctacatgaaggccgagcccaacatgaaggtggaggacgaagaagatctgctctacggcgatgccggaagtgccttcaagatgaacagcatggcggatttggcgaaacaatcaaaacaaaagaactcggactggtggcgacgccttcttgtgcaagcaaagcccagctattggttagtggttgcccgtcagagtggcaccttggagatctactcaatgccggacatgaagcttgtgtatctcgtaaacgatgtgggcaatggttcaatggttcttacggatgcaatggaattcgtgccgatttcactgaccacgcaggagaactcgaaggcgggcattgtacaggcttgtatgccgcagcatgctaactctccactgccattggaattgagtgtaataggcttgggtctaaatggagaaagacctttacttttggtcaggactcgagtagagctgctaatataccaggtgttccgatatcccaagggtcacctgaagatacgtttccgaaagatggatcaactgaatttgctggaccaacagccgacgcatattgacttggatgagaacgatgagcaggaggagatagaatcttatcaaatgcaaccaaagtatgtccaaaaactacgaccattcgccaacgttggaggactctccggcgttatggtatgcggcgtcaatccttgctttgttttcctaacattccgaggagaacttcgcatacatcggctgcttggtaacggagatgtgcgtagctttgctgccttcaacaatgttaatattcccaatggattcctttactttgacacaacctatgagcttaagatctctgtgttgcccagctacttgagttatgactccgtttggccggtgagaaaggttcctctcagatgtacaccaagacaacttgtttaccatcgcgagaatcgggtttattgcctaatcactcaaacggaggaaccgatgaccaagtactatcggtttaacggcgaggataaggagctgtccgaggaaagccgtggcgagagattcatctaccccattggctcgcaattcgaaatggttttaatatcaccagaaacctgggaaattgtgccagatgcatcaattacctttgagccctgggaacacgtcaccgcctttaagatcgttaagttgtcttacgaaggtacaagatcaggactcaaggaatacctttgcattggaactaactttaattacagtgaggatattaccagcagaggaaatattcatatatatgatattatagaagtggttcccgaacccggaaaaccgatgaccaaattcaagataaaggaaatatttaagaaggagcagaagggaccagtttctgccatttcagatgttttgggttttctggtgacgggacttggccagaagatctacatttggcaacttcgtgatggagaccttattggagtggcttttatagatacaaatatctatgtccatcagattatcaccgtgaaatccctgatttttattgcagatgtttacaaatccataagtttgctgcgcttccaggaggagtatcgcacattgtcgctggcctcgcgagattttaatcctctggaggtttatggaattgaattcatggtggataactcaaatctgggtttcctggtgaccgatgccgagcgcaatataattgtctacatgtatcagccggaggccagggaatcactgggtggccaaaaacttctccgcaaggcggattatcacctgggtcaggtggtaaacaccatgtttcgggtgcagtgccatcaaaagggattgcatcagcgacaacccttcctctacgaaaacaagcatttcgtagtttatggcacgctggatggagctttgggatattgcttgccccttcccgagaaagtctacaggagattccttatgttgcagaatgtgctcctttcctatcaggaacacctttgcggcctcaatcccaaggaataccgcactctcaagtcatccaagaaacaaggcatcaacccgtctcgctgcatcattgacggagatttaatttggtcatatcgactaatggccaattcggaacgcaatgaagtggcgaaaaagattggcacgcgcactgaagaaatcttgggggatttgctggaaatcgaacgactagccagcgttttttagacatcctatagtgtgaaagatgtaaagttttagttgatagttgtatttgtaatttatgttacgagtttcccaattgtaaatctagttttataggcacaacaaagtattttgttaagtaaacttggagtttcttatggttttggtggtctggaacacaattctgagcgctatggcagctcgttggactgtatatcaataatacaattaaaaatgtatgctatcttaaagacaaaaacatggatggccgaagtattgggtctaatcaaagacactagaataacaagatgcgtaacgccatacgattttttggcacacaattttttggccgtggctctagaggtggctccaggctctctcgaatttttgttagagagcgagagagcgaagagcgctacagcgaaccgctcttttctacgcatacagtgatagcagacaactttatgtgtgcacacgtatgctcatgcattgtaaatttgacaaaatatgccgcttcaccttagaagttctttgactttaaatctgtattatttttgatcaattggcaccatgcgaaaaatttcttgttttgcattgccttaacgttattattatttgaaaatagattaaaaatagtcaaatctatgtacatatcatcccaaaaataaatttcaaaaatgactttatattagaatatttgtcattagagtactcagcttgcggcgtgtgaaaaattaataaggcaattattgttgagtgcttggtgtccgcacctcgtgcctcaagatatgaccaaagcaaagacactagaataattctagtgtctttgatatgactttttcaataaacagggatcatatttttatgaaatttatgaaattacagtagttataataatttctattgtacttccctttaattatttagtatatttattaagtcatttgacttaatatgatgtaacattaacattaaaagtgtttcaaataaaaaatatttcgcttttaaaaaattgtcagatgag

SEQ ID NO: 21428 - DNA, 4456 bp, DROSOPHILA
gctgtgtgtgttgggccggcaaattgttaaactggctgaaattgttaataatgttttaagaaattgcgacaccaattaaaccaccgcaatgttttcgatgtgcaagcagacgcactccgccacggcggtggagttttcgatagcatgccgcttctttaacaatctggatgagaacctggtggtggcgggcgccaatgtactaaaggtgtaccggatagcgcccaacgtggaggcgagccagcgtcaaaagctgaatcccagcgagatgcgtctggcgcccaaaatgcgactggaatgcctagccacatatacgctctacggcaatgtgatgtcgctgcagtgcgtctcattggcgggtgccatgcgggatgcgctgttgattagtttcaaggacgcgaaattgtccgtactgcagcacgatcccgatacgtttgcgctgaaaactctctcacttcactatttcgaggaagatgacatacgtggtggttggacgggtcgctattttgtgcccacagttcgcgtagatcccgattccaggtgtgccgtcatgttggtctacggcaaacggctggtggtactgccctttcgcaaggacaacagcctggacgagatcgagctagcggatgtgaagccaattaaaaaggctccgacggcaatggtcagcaggacgcctattatggcatcgtacctgatagcactgcgagatcttgatgagaagatcgacaatgttctggacatacaattcctgcacggctactacgaaccaacgctgcttatactctacgaaccggtgcgaacctgtccgggaagaataaaggtgcgctccgatacttgcgttttggtggccatttcgttgaacattcaacagcgagtgcatccgattatttggaccgtgaacagtctaccttttgactgcctacaagtttacccgattcagaagccaattgggggttgtctggtaatgacagtcaatgctgtaatctatctcaatcagagtgtccctccatatggcgtcagtttaaacagttcagcggataacagcaccgcatttccactgaagccacaggatggcgttcgtattagtttggattgtgctaactttgcatttattgatgtcgacaagctggtaatctcgcttcgcactggagatctatacgtgcttacgctttgcgttgactcaatgagaacggttaggaacttccatttccacaaagcagccgccagtgtgctaactagttgtatctgcgttctgcactccgaatacatatttttgggatcacgtctcggaaattccttattgctgcactttacagaggaggaccagagcacggtcattacgttagatgaggtggaacagcaatcggagcagcagcaaaggaatctgcaggacgaggatcagaatttggaggaaatttttgatgtagatcaattggaaatggcaccgacccaagcaaaatcgcgtcgtattgaggatgaggaactagaggtgtatggttctggagctaaggcatcggttcttcagctgcgaaaattcatatttgaggtgtgcgacagtctaatgaatgtagcaccaatcaactacatgtgcgccggagaaagagtggaattcgaagaggatggcgttacgttgcgaccacatgcggaatctctgcaagatctaaagatagaactagtcgctgccacgggtcacagcaaaaacggagctctgtccgtatttgtaaactgcattaatcctcaaatcataacaagctttgagttagatgggtgcctcgatgtgtggactgtgtttgatgatgccactaagaagtcttcgcgaaatgatcagcatgatttcatgttgctttcacaaaggaattctacattggttttacaaacaggacaggaaattaatgaaatcgagaatacgggctttacggttaaccagccgaccatatttgtcggtaatctcggacagcagcggttcattgttcaggtcaccacccgtcatgtcagattattgcaaggaactcgattaattcaaaatgtccccattgatgtgggctcgccagtggtacaggtgtccatagcagatccctacgtttgcctgcgagtgctcaacggtcaggttatcacattagcgctgcgagaaacccgtggaactcctcgtttggctatcaacaagcataccattagcagctcacccgcagtggttgccatttcggcatataaagatttatcaggactattcacagtgaaaggtgatgatataaacctgaccggcagctcaaacagtgcatttggacatagttttggcggctacatgaaggccgagcccaacatgaaggtggaggacgaagaagatctgctctacggcgatgccggaagtgccttcaagatgaacagcatggcggatttggcgaaacaatcaaaacaaaagaactcggactggtggcgacgccttcttgtgcaagcaaagcccagctattggttagtggttgcccgtcagagtggcaccttggagatctactcaatgccggacatgaagcttgtgtatctcgtaaacgatgtgggcaatggttcaatggttcttacggatgcaatggaattcgtgccgatttcactgaccacgcaggagaactcgaaggcgggcattgtacaggcttgtatgccgcagcatgctaactctccactgccattggaattgagtgtaataggcttgggtctaaatggagaaagacctttacttttggtcaggactcgagtagagctgctaatataccaggtgttccgatatcccaagggtcacctgaagatacgtttccgaaagatggatcaactgaatttgctggaccaacagccgacgcatattgacttggatgagaacgatgagcaggaggagatagaatcttatcaaatgcaaccaaagtatgtccaaaaactacgaccattcgccaacgttggaggactctccggcgttatggtatgcggcgtcaatccttgctttgttttcctaacattccgaggagaacttcgcatacatcggctgcttggtaacggagatgtgcgtagctttgctgccttcaacaatgttaatattcccaatggattcctttactttgacacaacctatgagcttaagatctctgtgttgcccagctacttgagttatgactccgtttggccggtgagaaaggttcctctcagatgtacaccaagacaacttgtttaccatcgcgagaatcgggtttattgcctaatcactcaaacggaggaaccgatgaccaagtactatcggtttaacggcgaggataaggagctgtccgaggaaagccgtggcgagagattcatctaccccattggctcgcaattcgaaatggttttaatatcaccagaaacctgggaaattgtgccagatgcatcaattacctttgagccctgggaacacgtcaccgcctttaagatcgttaagttgtcttacgaaggtacaagatcaggactcaaggaatacctttgcattggaactaactttaattacagtgaggatattaccagcagaggaaatattcatatatatgatattatagaagtggttcccgaacccggaaaaccgatgaccaaattcaagataaaggaaatatttaagaaggagcagaagggaccagtttctgccatttcagatgttttgggttttctggtgacgggacttggccagaagatctacatttggcaacttcgtgatggagaccttattggagtggcttttatagatacaaatatctatgtccatcagattatcaccgtgaaatccctgatttttattgcagatgtttacaaatccataagtttgctgcgcttccaggaggagtatcgcacattgtcgctggcctcgcgagattttaatcctctggaggtttatggaattgaattcatggtggataactcaaatctgggtttcctggtgaccgatgccgagcgcaatataattgtctacatgtatcagccggaggccagggaatcactgggtggccaaaaacttctccgcaaggcggattatcacctgggtcaggtggtaaacaccatgtttcgggtgcagtgccatcaaaagggattgcatcagcgacaacccttcctctacgaaaacaagcatttcgtagtttatggcacgctggatggagctttgggatattgcttgccccttcccgagaaagtctacaggagattccttatgttgcagaatgtgctcctttcctatcaggaacacctttgcggcctcaatcccaaggaataccgcactctcaagtcatccaagaaacaaggcatcaacccgtctcgctgcatcattgacggagatttaatttggtcatatcgactaatggccaattcggaacgcaatgaagtggcgaaaaagattggcacgcgcactgaagaaatcttgggggatttgctggaaatcgaacgactagccagcgttttttag

SEQ ID NO: 21429 - protein, 1455 aa, DROSOPHILA
MFSMCKQTHSATAVEFSIACRFFNNLDENLVVAGANVLKVYRIAPNVEASQRQKLNPSEMRLAPKMRLECLATYTLYGNVMSLQCVSLAGAMRDALLISFKDAKLSVLQHDPDTFALKTLSLHYFEEDDIRGGWTGRYFVPTVRVDPDSRCAVMLVYGKRLVVLPFRKDNSLDEIELADVKPIKKAPTAMVSRTPIMASYLIALRDLDEKIDNVLDIQFLHGYYEPTLLILYEPVRTCPGRIKVRSDTCVLVAISLNIQQRVHPIIWTVNSLPFDCLQVYPIQKPIGGCLVMTVNAVIYLNQSVPPYGVSLNSSADNSTAFPLKPQDGVRISLDCANFAFIDVDKLVISLRTGDLYVLTLCVDSMRTVRNFHFHKAAASVLTSCICVLHSEYIFLGSRLGNSLLLHFTEEDQSTVITLDEVEQQSEQQQRNLQDEDQNLEEIFDVDQLEMAPTQAKSRRIEDEELEVYGSGAKASVLQLRKFIFEVCDSLMNVAPINYMCAGERVEFEEDGVTLRPHAESLQDLKIELVAATGHSKNGALSVFVNCINPQIITSFELDGCLDVWTVFDDATKKSSRNDQHDFMLLSQRNSTLVLQTGQEINEIENTGFTVNQPTIFVGNLGQQRFIVQVTTRHVRLLQGTRLIQNVPIDVGSPVVQVSIADPYVCLRVLNGQVITLALRETRGTPRLAINKHTISSSPAVVAISAYKDLSGLFTVKGDDINLTGSSNSAFGHSFGGYMKAEPNMKVEDEEDLLYGDAGSAFKMNSMADLAKQSKQKNSDWWRRLLVQAKPSYWLVVARQSGTLEIYSMPDMKLVYLVNDVGNGSMVLTDAMEFVPISLTTQENSKAGIVQACMPQHANSPLPLELSVIGLGLNGERPLLLVRTRVELLIYQVFRYPKGHLKIRFRKMDQLNLLDQQPTHIDLDENDEQEEIESYQMQPKYVQKLRPFANVGGLSGVMVCGVNPCFVFLTFRGELRIHRLLGNGDVRSFAAFNNVNIPNGFLYFDTTYELKISVLPSYLSYDSVWPVRKVPLRCTPRQLVYHRENRVYCLITQTEEPMTKYYRFNGEDKELSEESRGERFIYPIGSQFEMVLISPETWEIVPDASITFEPWEHVTAFKIVKLSYEGTRSGLKEYLCIGTNFNYSEDITSRGNIHIYDIIEVVPEPGKPMTKFKIKEIFKKEQKGPVSAISDVLGFLVTGLGQKIYIWQLRDGDLIGVAFIDTNIYVHQIITVKSLIFIADVYKSISLLRFQEEYRTLSLASRDFNPLEVYGIEFMVDNSNLGFLVTDAERNIIVYMYQPEARESLGGQKLLRKADYHLGQVVNTMFRVQCHQKGLHQRQPFLYENKHFVVYGTLDGALGYCLPLPEKVYRRFLMLQNVLLSYQEHLCGLNPKEYRTLKSSKKQGINPSRCIIDGDLIWSYRLMANSERNEVAKKIGTRTEEILGDLLEIERLASVF

SEQ ID NO: 21430 - DNA, 4641 bp, DROSOPHILA
aagttagacaaggaagctcaagaaacgcataccataattacgattattaattcgaagctacaaaccaaccacctgcttcccacatttattaggccatttattttggagtttacacactaccacgtttctcaagagcaaacttgccccacggacaagtgactccacctcatttttttggacccaaaaacccaataaatgttaattcaattaggccgtatctaaatcagccacaaagcttgcccaatttttccactgtagattccgaggtgggtgagtccaaattgcattccaaacccgaatcctccagctgttgtcgagtggttatggcgctgctgatccaaaacccgaaaagggtgccccaaacacaacgtaatgctccacttacttcctcgaacacacgaatcgaaatgtgctttcaatttgcacaaaaaaaaaaaaaaaactccgccgcatacataaattacataagttgaccataaaacctgtggaaacggagcatttgcaggagaagaagccgcagaatgggtgaggtaagtgcacctttttggagcacctcttggaaactggttggccaactgaccttgaagccgttcggagatggggccacttacgcaatgcagcgtatacagcgattccagttcgatcttattcacgatctacacgaaagtcaacaaattgcatctatcccaacgaccagattgcaaaattacatttgaagtttttattttttagtgtgaatgctgagtgtttcccccaacaacagtaaaacaacaacagcacacggcagatcttttacttgtcaaaaatgtaaacactaacgtctcgggtggggaaaaaaaattaaaaaaaaataaaaaaaaaaactgaaaagctgaaaagatgtctaaaaaagcgaagcgacgtcgctgccgacgccgccgctttttggccagctctcaagtgcgatataaaagcccggccacaagccgctcaacgatccacagtccaaagtcgcttgcagcgaaatacatctatccatacccagtgcacagaaagttgaaacaccccagaaaatatgtacaaattcgtgttgatcgccagcctgctggtcgccctctgcatggcagctcctcccgtgagtgtttagaaaaaaaaattgttaaaatatttacaaattatgaaagacatatgaagaacactgaagaaagtttacgggctaaagagtttgcatttagtgacaaattaatgagtttataacgtgatattgctgccgtgtccgttgattttgctgcctggttttcacgatctcacgcacttgggtcgcttggtgctgcgatccatttcgcatttctcaaagctgccgcacttgacattgccgcaataactgccagtagctccagctagaaaattaagcacacaaaaattatttttttttttattcaaatttggatattaaaaagaaggttaaaaagaaaaaaccaaaaaaaaattacagggagatcaagattccataaaattcaataaggtcaaaaaattgtaccttattattaagattctccacaaagatgattttaaattcgaaaagtcaaaaagccacttttaaacacgattcaattatacttattatagtagatagtagtagtagtagtagtagtagtagtagatagtagtagtagatagtatgttatatagatagtatgttacatagataatagtatgctatatagatgatatatagaaaacttacagttcttgctgccgaagggcgatttatcggctccagaatttcccaggacattcggttgagcacaactgcgaccgttgcacaaattcggacagcattttccgccgatggcgctgcactcgctgtcatgcaggcattttggcgtacagttctgaaccttggtggatgaaggacaatctggtggaaaaacgattgggattgtccatgagaaagctccgcgaaagctgagaaagccaacacttaccacccgcagcaaaggcagcaaccacacaggcagcaattaacagtgaaagaaagccgagcttaactgaaattatataaatttataggcgaattcttagtggttccgcatctcatgcgaatatttatagccacccatgatgatagttgaacgtccgctacgttactatagttaacatcgactggcgttcaacgggctttatatgccccgatcggcggtttcgagtcgaacaagttttctgcttatttgcctttgtattttttcatttttcacttgatttttatatatatgttttacctccccaacttgccttgacgagaggtactaaaaacaaaggagagaaaaaaaaacacggacaaaagcaacagcaaagcacttatcaatttgactttgaatttacatacgaacaggatggaaatacgcgatatctgaagacgctacctcaaaaatatatattcagttgattttaaagtatttttacaaatttttcgaaattcaaactattttcaaaaagagttgaatgggtaatcaaattgttggtctcactaaaaaaatttatttttatagatgccataatgttatagcgcataaaacaaccttaggtcttgaatctctatcttaactacatcgacacatttcaattactatttccgttcatgcacttggataaaaaaaaggggggaaaatgtgtcaaaacgtcgtaatgagtttgtcatttcttcttcttcaacttgaacgatggttgaatcatccagacaaaaactacgtttatacgaggctccggaagtcaagaaaaaatatttttaaaaatgtaaaatcacattttgtgtgacttgcttaaaattaaacgtgatagttttgtggctcaataggtcatagaagatattgtaggcaggtgatcgcattgtcgactgcggtaaatggagaatcccgcagtctacttaaccgaacctcacaatgtagatattggaattagaaactgaaacaatttgttattaaaatatacatgaataaatttaacaaaaagggggcgtgttttgtaagcttgaccgagagatattattcttaaaaatacatatgtacactcagttatctatagactaatacacttgaaagcgagtttctaaaagaatttgtttttttttatttcagcgccaggaatccgaagccgaaaggatagagagggaggagtacgagaaatatcagaatgaaaacgcccagtactcgttcaattcgagtgtggatgataagatcaacgatggacaaatctcacgtaatgaggagcgcgaaggaggcactgttcgtggttcctacagctacttcgatggtttcgtgaagcgccgtgttgagtacatcgccgataaggacggctacagggtgctcaaggacgagatcgaggatgtcggcaatggtccttcgttcaatcccgatggcatagccaacgtggagggctctatgatcggcaaatactccatcaaactggataaggccgacgatgacaagcactacaaggacattcatgcctagggcaaaatgaactgaggatttctaacatttagaaacggactgaatactttgtagacccccaaaatagagtaaaacacaatctgaacaaaaagtgtatttcttcttctcccaaataaaatattgaaaaaactttaaacaaatgaaaatgaattccactaaatagcaaatatcgcaagtccggttccacttcttcgtattactttcttattttcaaatttatttgtaataatgtttatgtattggttaattttgcggtgagtgcatttaggagcaaaatgttcttcgtttaagttttgtttttgaatttagtttagatcgccatcgcttcttgctgttgctgttgatttactggcaataatttgtgtagtttcctcataacgtgtttggtttttcgttcgtatgatgtatctcttttataattttcattgtatttttgtatttatcaacagttattagcttaacatatagggtctcgtttagaaatcaattacgtgtattacagttacgtttatacgctacatgctaaagaaatgtgggcatgaagagtcttagatcgtttgggtggataatactaaacttaaagaattacaaattatagcctaagcgctgggccaaagcgttttcaaaatacattatgaatatttcataaattacacggtaaacttaagtatgcttaactaataataagtattgatccagttcgcgtaatcaaaatcgaaccaatcaaatcacgcatatacagcgattaaattataaaaatatagtcatccgacgtgagtgagtccatatgctaacctaacctcgcacgtacttcataatgtatataaattacatttaaaacataaatatttacattagaaatagttctttagttttccattgttttcctatgccttttcttcgatcatatttgctttgctgtattttaaatgatatccatatcaagttctattatttttttacgtgcttgtgatatccttaaacaatcacaaaaaataacgagtatcttaagggatatgcaacaagcacaaaatagacaacactagcttgcattttaggcttaaccgatcctatctttatacaaaaagtgttacgaattgccagtgttcttagtttacatgaattgcaaatgaatttaattacatttatg

SEQ ID NO: 21431 - DNA, 639 bp, DROSOPHILA
cgaaatacatctatccatacccagtgcacagaaagttgaaacaccccagaaaatatgtacaaattcgtgttgatcgccagcctgctggtcgccctctgcatggcagctcctccccgccaggaatccgaagccgaaaggatagagagggaggagtacgagaaatatcagaatgaaaacgcccagtactcgttcaattcgagtgtggatgataagatcaacgatggacaaatctcacgtaatgaggagcgcgaaggaggcactgttcgtggttcctacagctacttcgatggtttcgtgaagcgccgtgttgagtacatcgccgataaggacggctacagggtgctcaaggacgagatcgaggatgtcggcaatggtccttcgttcaatcccgatggcatagccaacgtggagggctctatgatcggcaaatactccatcaaactggataaggccgacgatgacaagcactacaaggacattcatgcctagggcaaaatgaactgaggatttctaacatttagaaacggactgaatactttgtagacccccaaaatagagtaaaacacaatctgaacaaaaagtgtatttcttcttctcccaaataaaatattgaaaaaactttaaacaaatgaaaatgaa

SEQ ID NO: 21432 - protein, 144 aa, DROSOPHILA
MYKFVLIASLLVALCMAAPPRQESEAERIEREEYEKYQNENAQYSFNSSVDDKINDGQISRNEEREGGTVRGSYSYFDGFVKRRVEYIADKDGYRVLKDEIEDVGNGPSFNPDGIANVEGSMIGKYSIKLDKADDDKHYKDIHA

SEQ ID NO: 21433 - DNA, 60747 bp, DROSOPHILA
ttgtctgttcttgtgtctttgtttacctggtttttgtttttgtcgtgtcaaatacaaattctcaaatacaattatatatacgagttataatacaaaaatcctttacacacagatacaaaaaataaaacgcactgtacaaaatttgatctgattcgatatcaactttccacagttgcctatatgtatacgtatgtatgtatatgttgcagtgtatgcatgcatgagtatcctgtttaagagtgtgtgtgtgtgtgtgagtgtgtgtgcgtgtgttgtgcatatccttcgccttgggccacacacattccgaatatgcatatccatataactggcatttttgattattattattcgtagtcaacggcaaaaatgtttgtttgaaatgtttgatttatgtgcatgctgatagggaacatttcattgcatttgtcgtccctgtccatccatccatccatccgtccgtccgtccgtccattcgattccgtctgctcgctggcacagtcgagttttgacattcgcacagcatccattcatatacgtatgtattcatattgccgataagcatattcgactgataaatgctaaacaatttcgccgtttggcagtcaagagtttcgagtttcgagtttcgagagtcggggcatcaatcgactgcccactaagtatgcaagtatggcttcctaagaaccatttttctggccaggataaacacaaatagcagtacaataattcagtcaacctaaatatatatatgtgtttccagaaatctttggatacatgaaaataaagccgtaatataaatggcttggctgttcaaatattttttgtagaataaagaattgcacaaatattgaaatgcttctggtcaatccaaactcatttgatatgttgaagcttagttattgctttcagctcttattgcccttcgcacttggaaattgacaatgcgaaaaagtaaatacaaattaaaaatcaactaataaaacaaacgtattgaattcatctgcaatcgtgtatatttgttgtaaaaaatagttatagaaatatactttagctctagtatatgtatagaattgtggttgcttaaactaaaaacgcttcgcttcagagaagcctcttcttttgatatgcgcatgtggttaaaagttgattgcatattgataattgatttacgtacttcagtaaatggccacgataagaattaaaaaactgaggtgtccaaataaaaaattgcacataacgaattgaaaatggaaagctacttaaaccataaacttagcattagttaattgcttctcctcggcggatttgtgcatttatttctgaatggcccgaaaagagttcgtattccttttcagtggcaattactgctgctgttccataatagccacggataatcaaaagatacagtcgatgtgttttttatacggaattcgaggagcctcaagttggaatttaaaactgaaattgagacgactgtgccttgcgcatacacattcacattgataaatcactaactatacacggagagttacaacaaggacatacaaacatttacacatacaaaactcaactcacacagtacaaaaatcggctacttatgttcctagacatatatcaatttacatattgtatgtatgcatatagaaaatttgctaagcgcagctaatttgaaattagcaaaaaagatggcaaaatcgtttgcttcgcttgcagttaactaggctaattcacataatcgtatttaaggactatatatatatacacattgcatatataattgcaaaggatgccgtatgtttacatcgatgtacacatacatacatttacaagcgccctttggctcctaactaagtttcatcttttcgctactaataataattaacatagttcttgcatcgcttggccagcgtcaaaaaacagcatttcatctaaacatatgtgtgtgtgtgttttttctgtgttcatattcgtatggttattggtgttgatggtagtgttggtattggtattggtgtagctgtgggtgtgtggtgtatatgtattcagtactattaacgcttgtagctattgccaggatgcacatatcgctagctgccgaccaactcgatctggcggtatttcttgcgcaaattggaaactggatcacgatacagcatgggatccatgcgcaaattggaacgtatcagcggcatatagctgcaaggatatgaaagaaataggatgcgttttgaaaattgagatcggaagctttagaagaactagtctttgaagttatatgtagctcttcaggatgtgaaacttacccaaacacggccgcaaaggtattcaggcagctctggcgctggataaagtggtcgggatcgttccagggcgaacgacccgtctctcgatccttgtagcccttgcgctgcgtcaccttgatcggcggctttctggtcacgtgcgagaccagcaggttcattaggatgtcctcgcagttggaggactgctgtacagtcttaagtagcagcaacgacagccaattggtgtacaagtagttgtagtagcggtggtagaatgccgccccagttagcacaatcgaatagtagtttgtccacttggacgtataaccccaggcattctgcaagaaatagcaatgagtaatttcagtaaaattaaataccctcccccctcccaattcaccttggaatcatcccagaagtgagctctcgccggatagccaacgatgcgctcgggaaaatcccgccacaccgtgtaggcaaagtccagttcatccgtattgagtatggcatcttcatccagcgacagaacggcatccgtctgaatctcatcgtagggcaggaatcgttgtgatatgctaggtcgtccctcagtcgtctggcttgtgggtccagctccctgactcctcgtgctgccccccagggaaatcacgtgcaagggtatgtggctggtggggggccagcgtttcttcaacggcaacggccgatcggctgcccaaaggacaaggatctaaaaggcaaagtgtattgcattaatatgaacgtgcgatagcactgtatttacatacccgctccacgaactggctcttcgtgatggtcctgactagcttgtagagcgctgcattcggtcccagggcggcaccaatctgcacatagataaccgccgtgtagttgtgacgcggctccgcacccatcgagttgagcagaaacggcatgtacctgaagttggtggtggttataatcgattgagctacaagcttgcataacaagacatatgggtgggagaccaaccttgagctgtcggcaaaggtgggcaacgtgagcagggcgcccggcgagctgttccaaaccaggctgcttcgcaccggataatccggcaaacgttcgcgtatgatctgcaagatacggatggaagatacgcagtgactcagttaacgcttgtttaatggcttgtcgatacgctcaagtggtgattgccaattgattgcctaatgaggaggagagcaacgaggaacgcgaggcctttggagctgatctgaatttcgagtgcagttcaaggagcgggccaaattgcgttttgaatagtcctcccagtggtccactcccattccctggtgttccgacccggttttccccccatccgtttggtttgtcctccgctgagtgtgataactcaatgggcctgagttgttgcctaattttccgcttggcgcagatggtgcccttttttcccaaccagccagttttccccattcagatttacaacgcgggtcgaaaaaaaagagtactgaaagtgaaatccttgaactgcagccatctggttgagctttggagttattgcatcgagtggaaatggtcatacaaatcaatacatgttaccttggcaaagttttaagatgtagtatcaattatatgaatttatattatttctctcctataaataaataaatatgtgcactctctgatcgttagctattaagtcgagctcagctgtggatttattcacgcatatatgaatgtcgagcggtgttaccgcagtttccgctgcgcagcggaagtcgcacagtaaccactgtgggcggaagtgcccctccttccttccctcgctcttcacgtgttaggcaaaggagtcaagatacgagggctggcgtttggctttgcgtgccattaacgcggcgttaatttgtcgctcaaagtgtgagcgcaccttaaagtatgccatgccaaattagttagacatcacagctgcagttaactcgccgagaccccttagcagtttgcatttggcactgttttggttggctcaccgtttgcgttgcagttcgggttgaatgcaattataattgcaaagcctgaccccaactaagagcttagtgctgctggggcgctgttcgagttgagttatgcaagtacaggtgcagccacgtgcacctgacagaaaacagaagacggtgcgttatgcaagtgccacccactacccacccactaccacccactactcactatgcacaaaccatgcacaagccatgagcacccaacagccaccatttaccacccactccagttcattcgtgttatttctgtctggcacgctccgcttttgtgcgtgtggttagtggaatttgcatttgcatggacgatcatctcccggcggaattccactgctattcaggctaaaagacataatgagacgtttgggagcggtaccaacaattagacgcaattacggctgatagatcgacagttggcaatgttttgaagtgcataccctatatgttcaaaagctaaactctatatatatatataagacacaagttaagagataagctatactttaatatttacaataacataaataatctttttatcagaaaatggtaagaaaaatatgccaggagttcagaaagcttatggaccccacccatctgcagttttccaaactatcaatattcataagcttaaactaaagccagggcatcctaacttcgttggggatttagaatatttagtttttcacctggtttttttttttgtttacatccatcatggtttcatggtgatgccccgctcgttaagcgccacacggcaggtgcaggagcaaactaaccaaactaggattacgctgctgcagtctgctcgtcctgccgatccttggctccttgtctggctgccaacgcgtctcaagtgcctgctttatattttgtaattataattccttctttgggtcctaccatccccccctccccatctttgcataatcaacgctcagcgcggcgagcgtgtttgttttaaccctttcttttgggcccgctgtgtgtgcgtgattatctctgtgtgtgtgtttgaatatgggtgggtttttgttgtcctgcgacataattaagtcaatctcatgctgttgacgctgccagcataattgagagcgagaggcacctaacagacagagatggcctatgcctgcgattcaattatgcacattgcatactgcatatatgtttgggcctggcccagacagatggttcagccccccctcccccctcgctcgcattataattggccaacaaactgcgtttaattggcttagatccatgccccacagccagcatttttaagttgcctgcagcagcataaagctacagttgaaattgcctacagactatttaacaagcgagttgaaattaagatataagcgaaatataaccacacaaacgtttgtaaaattcataagagttttcacactttataagatggtaatcttaaattctcacaagtattgtttactcggtgggttaaggaggtggtatcactgtaattctgtttgcttggctacacatgtccgggaaatctcttattcggttgccggttttcttttccatcattcgtggctgccaggctgcatttggatgcaagccaggagacttatcgcagcataaggagcaccaggagcagcggcaacaatcgcagctgacactacttaagaagcatatatggcagtaagtgaggtgggcggaaaaggaaggcagccagaacttcatttccgtatcgcatcagcagcgagttcatgcatagatgtgtgcctttgcgatgattaagtggatcgagtgactgaggtagttgcaagcagctggaggcccaggacccaatagagtggataatgtagacaaataaaacaggtggatgccttgcaggcctgcaagtatttggcttaaatacgagacttaaagggctcaccagccatcgaaaatgaagcaaaacatgtaaatttgtcttgacttgtgtggaattccattaacagcttggccaacaattttactcgttgcactttacttgcacatattttatgcaatgtgcagtttacatgtctggcgaaatttgcttcaattaattgcaagaatttcctttggtctctcaaagtcaaagctcctattagctgccgtacaggtttattttgttttggccctcgttgaaagatattttaaattgaagcttttggcaaagggttactttagcagatttgcaggagattaatgaatgtttgtgtttcaaataaaaagtgaagctttaaaacagaaaagtttacatttaacagagatagattttaattaaaagcattgctgccagaggagatttgagtatataaaacatattgttaggttttataatataagatttacatgcagaagtttggttaacctatttatttttacttcaggtatcttcactgtttttttttttttgctaatcagatttaggcggcgcactgctgcagcttacataaaagcatatatgtatgtttacaaattcaattctgctgggtgatggcattgcaaaagttttcgtttcctgttctttgggctagcaataagaaaacgtcggtttcgttttctgcatactatttttcctagcatacttcttggggcctctcaacttgctgcatctgtgtatgttgtgtgtgtgagtgtgtgggtgggcgtggcaagcgggttaaaagttccaagctgtgcaaaggcagctgcatacataaaatgtagttctctgttggccaggctgaaagttgcactcagtgacacccaaaacactcaacatccaaaatacaacaaaaacgaggggggaaaaaatgagaaaaaggcgaaactccgtcgaagacaaacactaaattaacttatgcaagtagctaaaagagacatgaacacagagataaaaatgagaaaaagaaaggaagtaaaaaatggtatgtaaatgcttgacatcaacttcctcctacaaactttcgttgattaaaaattaacaaatgtcgcaaagtgcaaaattaagcaaacaaaatacatggcgtatgcgtatgtagttgacttcacttttaatttccataaataactcagaatctctactcaattatgctgcagacaaaaaaaggcacaaaactttataaaaaataggaaaacaagaatccctcccctgaaacgtagaaatatttaaaaattgaagcacgctcgccgatacgcaaacaattttacccttttgtggtttttggcttatgacaattaaacaaaaacggcaacaaatcgctaaaccaatttcgaaccgaattcattttatacacattactttttgtgttttttttagtcatatattttatatgcgccattgggacgtgtttttgcacagaaatttatcgatctaaacttgttgaccaacgttaattaagtgcgatttcaggagcgtagagggattggttttttttttgggggggcttatgcaatgatttgtaaatgcgcgggttgcacaatactttggctttgtttttggattagccagaattcaaataaatgattttatggtgggaatgggggagtaagctcctaaatatgcaaagtaaccgatgaaaaattcagggatttcaatatttatttattttagtttttctgtgcagtgcaaatagaatatgcatgttctgttttagttccttaggatttcaactgtatcttctttcgatttcttttttaagaataataaggtatttaaatcgtttcaaagttaagttcgttttttttttgagctctttaagctctgatctgcgattaaattcgacatgattccttcagcacctcttcagcttaatcgccagcaatttggctcttggcgttcattcatcttataacgtcatttgccatgacttcaaactttaagctgacgatgatgtcattatagttggcaaacttcggagctgtcgctacaacgcaaatgaaaatattaaaaaaaaaaaaacaacaacaacaaatgccgaagttatgaagcagctttgacaaattcgaaaaacaagcaaaacgaaaaaaaaatatatatattcagcaaagacaaacaagtttcgaaacggcggccgaaaagagaagttaactttaattttgtttgatttcagtttattcggtgcgagtatctttgtgtatgctttattcaacgataggcgcagcaggccaatatagacaagcaaatgtaacagaaggcaaataaatgccaaataaatatttattcgcagaagtttgcacaaattaaaagccctgcgggctacttgtttgtttatttgtcatttctttattttgggttaatcgatacgatacttgttgtgtcaaatggcgtgccagaaggtttcacatttcgttatgaaatgataaaaacgttaaataaaattgcagaaagatgcttgttacaattacagatactttaatatataatgattaaattaaagtgcctctgacttttataatcaaccattccattgagtaaatttccctttgccctcattcttatcaatttgtaatcttaatccccagctattcatcaagctaaaaaaaaaactcagctagaatactttgaagacaaaaaacaaaaaaacacaaagaacagaataataataaaaccaaacaaagtccaaatgagacaacaaacacaaacatttaacatctggttaggctttaatgttcgttttttttccacacacacaaacgggctcattaattaattttaattagctaacgctcacagcttacaaacggatcacaagtataattataatttcgaaaagggaagtggcgagtttgggtaagaaaataatttcaacgctcgttcatgattaaaaataattcggtgacgtcacagagaagcggctacgttttggaggtcagtgctatatacactcgatttacttttttctccgtctttcgtttttttttttttgtcgtttttctttgcttgactgcctctcgggtggtgacgtcacgggcgtcgttaacattgcacgagaagttcacatattttctcacagcgtgtgttgagacagagaattcacagctctctagttctctcactctcattgcgattctcaggggcaaaataaaaaacagtttgccggctattttttgcatttgaaaataaaagttggcaaagggggaaaaatcgctctgccactttttaggtgcttatttatttattatgactgtggggcatctacaaaagcgttccagtaaactcaatgtcaataaatatttcacttatgacatgttcacactacgccaagccgttttccaccaaccaccaaccaccaccacccaccaggaatgttatgtactggtgctactcccagtcgtatttcataattttggacaagtcactgggccataattgacccgccgctgatcgataagctcgagtgacacattgcgcattcgaactgtgggccaaatggcacggaattgatgatatgtgggcgggcgttcattgtggtcgcttttcatgtgtcgcaatctctattaagggaactacattatgcggccaacgaaaatcgaacaaatcataatgaaaatgtgtggccaacgggtggaagaatgtaatgatgccgaagggaaatgttcgttaggcaatgttcaaacatatgcatagatgggttatattccaacgttttcaaatcttacaaactattttctaaagtttactccatttctttttctagtaaaatttctaattctgtagcacttagcgcgttcattaaccttgggcaactcaatgaagatcttattgaagattggaatgcatcgctgggattccgcctaaaggtacagtgcagcttctttaaaaagaacactgtaagtttaatgctagaacttaacaaaaacatgtgtttcttacaaatttctttcattttatattaaaacacgattttcaagatttttaaagattttccagagaagtaaaacaaaatgtaaagaactcgtttttgggaccagttggtgtgtttgttagttgttcgatttctatttagagttccagcggcacaaacagctgtacataggaaagcacaacaactcttacatatgcgaatgggaaagcgaatatggtggaaggcgaaacaacaataatactaaagccaaaaggtgagagcggaaaaaatagagagagcagcgccgcattcgtgttgtatttggttttttatgaccgccgccgccgacgacgactaattttgtcgatgatagccgttcgtttcgagtcaaagtttcagtcaatttttagtcgtcaaagcaggcggacgtccaagcaaaaaaaattcagaatcaaaaatattgacagtgacttgagaggattacgtacttaacttagcaactcgcacctcgcaaaaagaaaagaaaacacattgcaaaaatgtcagcacgccgcgtcacattgaacacacgcgtttcgcgcgcctccacctccacgccggtgggcggggcatccacctcgtcaagggtgggcgccacctcacccacctcgcccacgcgcaccagccggcagcaggagaaggaggaactgcagcatttgaacgatcgcctggcctgctacatcgatcgcatgcgcaacctggagaacgagaacagccggctcacccaggaactgaatctcgcccaggataccgtcaacagggagacctctaatctgaaggcggtctatgagaaggagctggccgccgctcgcaagctgctcgatgagaccgccaaagagaaggccaagcttgagatcgatatcaagcgtctgtgggaggagaacgacgacttgaagcccaggtaaagctccaagacggcgggttcaggtttgggctcggaattggtaacagcgtattatcagccagtgatgtcatatgtacatatgtacccatgccgggccactggagcgcgagacacaggcagaaaatgggggcaactttgggagccttgtcaagaaaatgtggaatcaataatgcacagcacgaaaagcagcgaaatttcttcgatttgtaaagtaaaagtacagtcagtcgagatttctagaaatgcactactttttatcaaattgtttttttttttttacttttttgttgtattttgtattgaaataagcgaattttatatttatttcttaggtacagttgacctagaagttcaattccagctatgtagttatgtagcgaaaacaataacaaattgttttatttataaaggcaatatatttaattttcatatttcatgctattcgtaagaagaaaagagttttagtaagatacaaacttcagtttccatggttgttttttttttatatgtagggagtgacagagacagacagagaacggggcagactgagagcgagcgaggccgatgatgtcatgccaaaagcacattttgaaagccaagcacatgggaaactctctcgactctttcgctgttgtttattttttgcatttacacttccagaattctctaggcatttttatgcaaatgtttagttctcagctaatgtgtgagtagtaaaccaaaagaaacccaatgaaaatcaaaaaggaagaatcgaaataccgccgtaaatctcaatgaaggttacaagactatgatgtcatatggcactcagttacagatccatttgtaataccagtttctggtgggaagtcaacaaaagttgggttgcttagcttttccacttgcgagatttccgtttcgcgtcgtttgcgttatcatatttatttttggtatttactgcgcgatgaggcccaaagctttttcaattcataatagccacaatttgttgtttgtgcgttttgcaatgcgttaacgaagttaagagtttggctaaaaggcgggtgcctaaatgttgggtaaacttgatttttcggctacttaaggtgtggcttatacgttgagcaacggaccggaataaccaaggaaattgtttatgatgattacgattagatacgataagattgcagcagaattatggaacttgtgataaaagatttatcttttgttgagtgtccatattgcttaaattattttcatttgtgaatgctggctgtgcttaattattttaaatttttttttgaagaatttagaaagccaaatatattttcatatttattctttggtgacaatagcatacatatgtacaagcgaattaggtcagcggaaggaattggggaggaaaaatggaactttaacacgctcacacaaaacgcacaaaaaagggggaaatttatgaaaatctagaacgcaaacaaaacaaccttgaatctattttgtttttatatttccccatttttacacaacttttcttgattagctacgaaaactgtttacattttctcgttgcaacagcaaaaaccgaaagaaaatcgataaaacagaatagaagattttcaatccatgaaaataaactttcaaaaatggtcaacacaatcgccgtaaaaggcgccaaactatatatataattttaattacgttttcattgaacgcatgacatgcaaagtcaattatttcatagttgaaattattggatttgttatagagaataatttaaaacgtgccgaccacgcgagtcgccgattgacaaccaaaattgatatccgaaaatatgcagggattatttgtggaattttcgtagctattttttatagcgagtttgtttttgcctaaatagaatttcaaatacaaaaaataaaaggcgctcataaatcacagggggtggtggggtttcgcaggggggacggggtgaactggtcagaaatagccgggctactttatgctaatggcatgtgacgacttctcccaaggcaaacaaaaacctcgaaatgtttgagtatttgattcttctatggaggaggatcgatgaacgagtttccaagcgactatagcatttaaataaatgaaatgaataatacataagcgatataaagagagcggtttagctttcgcaaacaaatgtgagtcgcaatgtgactcagttataattatatagataagtgacgtcattcaatgagcacatgtagataaaagcaaaaaaaacaattgctcctatgaaccgcctaaatttcgataagggattactcaggcaaataggctgattaattattaaattaaaaagttctttgttataaaagattattaatttttaaaccaaatccattttaaatttaagactcgacaaaaagacgaaggaggctaccgtggcagagaacaatgcccgcctgtatgagaaccgctacaacgaggtgaatggcaagtacaaccaatcgttggccgatcgcaagaagttcgaggatcaggccaaggagctcgctctggagaacgaacgcctgcgccgccaactggatgatcttcgcaagcagctggaggcggagacgctggcccgcgtcgatctggagaaccagaaccagagcctgcgcgaggagctggccttcaaggatcaggtgcacacccaggagctcaccgagacccgatcccgtcgccagatcgagatcagcgagatcgatggccgactgtcgcgtcaatacgaggccaagctgcagcaatcgctccaggaactgcgtgatcagtacgagggtcaaatgcgcatcaatcgcgaggagatcgagctgctgtacgacaatgagatccagaacctcaaggctgctgccaatagggctgcccagggatccgctcttgccaccgaggaagtccgtctcatgcgcaccaagatcgatggcttgaacgccaagctacagaatctggaggacaccaatgctggcttgaatgtgagtactgcaattgccaaactaaattccccgtgtgattttaatgttgacattttctcatttaccataggctcgcattcgggagctggagaacctcttggacacggagcgccagcgccacaaccagtacatcgcctccttggaagccgaactacagcgtatgcgcgacgagatggctcaccagctgcaggagtaccagggtctgatggacatcaaggtgtcgttggatctcgaaattgccgcttacgacaaactgctgtgcggtgaggagcgtcgcctgaacatcgagtcgcccggacgcccgactaccgactccggtatctccagcaatggcagccacttgaccgccagtgccagttcccgatccggcagggtcacgcccagtggccgtcgctcggctacacctggcatctctggatccagcgccgtgaagcgtcgccgcaccgtgatcgatgagagcgaggatcgcactctgtccgagtactcggtgaatgccgccgccaagggagatctggagatcatcgaggcggacgttgagggacgcttcatcaagctgcacaacaagggaaccgaggagatcaatctgactggctggcagctaacccgcattgccggcgacgaggaactggccttcaagttctcgcgcggatcgaaggtactcggcggtgctagtgtaaccatttggtccgtcgatgctggtaccgcacatgatccacccaacaatctggtgatgaagaagaagtggccggtggccaactcgatgcgatcggtgctggccaatgccgacaaagaggtgagagtcttgtccatatacaacacatgcggcacttgcgacatctgccgccactgcagacacctcgaattcgtgctcgaccagtacgatatgccatagacctttgcatatttcgactataatttacgttatatcttttgcctttcaggatgttgccagctacgaccgtgtccgtgctaacgtttccagccacacctcgcggcatcgcagcagtggcacgcccagtacgggctttaccctcggttccggagctggctccactggcgtgaggagcctcttctccctgctcttctaggcgggagcttcaacttcgaatcggactggcttggcttggatcctgaggcccagccaaacaaaacccaactcaccgcagagactcacagactccgagctgcacattcaaaccacacacagatctgttctgcatatcaagcttattgtgaaactatgtacaacaatcaaaacttgttcaactcttaatgttaaatgtttaagtgaccttagtacatgtctttgactctatgcgtctcctatgtttaagtaagttttttcacgctctacaccctactctcactctctctctctgtaatttatgacgagaacatgcattttggtaaaaatacaaaaataaacaaacaaataaatgttacaagaaagttggctggaaaatcaattaatgagatttagccgtgcggtcgcctgcgttgatatcttttttgcgaggaagccaaatcggcttaggccagtggaaaacttcttgagatgctgtcgcggcattttgcactatctgggatccaggaccatgggccaggccataatggacaggtaagtgggggaaattaactacaagaagtcaggtggacaggtgcagctgggagcaaaactgtgggctaaaaccgaacgaggtcaacgaaaaagtttcgcaactttacaacttgaaaataaattaggttggatcactgggaaaggtcgagcaaaccgaagcaaaagtttttaatggagcaaatatacagcttcagggcagttgtagaaatatactatttaacaattctagggctgccattcaaactaataaacgactcgtttcggatacaaaaataatgcttagaaatacatatgtgcaataaaagccagttgtactagttcgtttctttctaatctccaactagaatacaggaaaaacctaggcgtcccactgtttaatctgcatcctttggcttactccaaaggaattagcattgccaggacgaagaagaagatcccttcacttggcgccgccttagccaaattgcgttatctattgcccaggcatttctcgcagtgcatgagcagccactaaggcaacttagcggcgcttgagtgagtgcacgattcaatggaatgaatgcgagagaaaggcggcggagaaaggtgaaagcggctgagacggctgcgaagactgagagggctcagaagactgagggggcgggcagacagttgacttcaaagtagttttccttggcaaagtttttttcctccttggcgcacgtttgcatgcgcataataggattagtcaaagtaataagttgtttttcttcctccacttttagctgctgatgctacctagattcctgctgctcacaggacctgcttttgccggattgctgccacttttaacggccaagcggcgagtgggcgtggccagtgctttgatatgcacgcctcgatgagacaaagcggacaggtgaggtgcagaaagtttctttcttttgccatctgcctgcgagtatgcaacatattatgttgcatgaaaaacaaagccacaaagcaaaaaaaaaaaacaaataaaataccagaaacaaagcgcgttaagtctgcatgggaaaatcaagaaaagggtttttccagcttacaatggaaatcttgaaatctgacgcataacagaaatgaacaaaaaatctgtcggtattacaggcttaagtttcccgattataaatattttccacaaagatatgactttcttctcgtgaattctttacagtatgattatttataaatgttagcgaaatttcgtttacttttccacagtgcacactgggtatgcagaacatttcgagcccaacccaaacttttggcttattgtggtttatttagttgttttgtgaatttttgtgaccattttcgaacttttaccagcttccgcttttcgtctccctgtgcaactcgagtgcatggcacacgcttatcggtcacatccattcggtcccaaatcacacacactggagcacacaaagagacttttggggcttaggccaagattttggggccactgtgggccgacagtaagttcggtaagtggactttgagtgaccttttttgtggggattctgtgggcagggccaatcggctccacacacacacacacacgtacatatattctgcggcctacgcacttagtttcctttcgacggatgttgtaaaagttcgactgtggtcttactttgggttcaatttttgatttattaattgaaataattggggatatcagaaaagggattgggatttgggattgagtgccaaagtgtcgaaggaattgatttgtgcttaaaaaccgaaaaggctgagtggaatattctgggttttaaatctttagataggaggaaaaaagctgccacattttatgaaatattgagcacaatcttagcattggtttaataaatttgttctgacctcgcaaaattatcaatttttaacggtatttaaaagatttccaaacccacctaattgatttaatcaagacaaaccacttaattatataatttgcgttatatgacataatttgggtcaagagtggcgctattcactgtctaataaagggcatggccatcgaaaacagagcaacacatttcaggatgagattcgggatgtgtgtgcgtggctgaagcgtctaacaacccaaataactgcttaatttgtttttcctccgacccgtgccatgaaaaacccctactgaaattcacctttgctgtttgcttgcacagcagcaacaataacaacagcaggcgatgagggtaaacaaaggttgacccaaacccgaacccaaactcaaactcgaacctaaaaaccgagaaaccccccttaaaaccgtcagctgactgttagtttgttgactttaatggaccagttttatggtagaggagcgagtggcaaaaggatacgccggacaaaactgacaccgcctggtcacatgcggttcaacgcccagaatgagcagattttcccaacaaggccagttgaggcagtcgaaattatttgccacttttttcgtagctctgggctttagagggttaagagcgttctaggcttgtttatgcctaaatcaatttgccgcatgaacgggtcttaagtgtaagcgaagggaaaaggatttccccaaagacccacatccccccggtacgccaacccattcatattcatacgtgccccggactaaaggattattaggaactttccgctccaaaagtgagacgtgagtggccaaccttaccaagggatgtacatgtacatgtatgtggtatgaggggcggcaaaaaaatgtgcaaaattaataataacaaattataaaggcatttcccgcagagaccacgccctgccaaagaggaatttctgttctgtttataaatattctggaattgttttgccccggggcaagtatttgtgccatctcaggaactcttctgcatattaaagccgcaaaggaggcggttgaaaggcgggcggatagacatgatgtttgacccttgcggagctgcattcctggccatatgcaaaatgtgggtcaaataagccagaaaggattgtgcacacacacggccattacgtgatgcacgtgccacacctcagcaggtgggcgtggtccgatgtctctgcctgcgcttttaacctatccctactcgcctacccccccatcccttccctcctgtcgaaaatgccacaattcatctttttaatcgcgacccataaatcaaatgtgcgccgcaaaaatgcaggccaaacgtaaaacttgtgcacgaaaaattctgatgcacttcgtggcgcaatttaagttttacagcaaaatcatagagggaatagtctactcactaattgcactcaaagggtttcataaacgcgaatcacgaattagatatgcacacaaaaatattgagtggctctttaaattgatttaacaatattcgtttgaataacgatttggttaattatggaaattgtcataaatcttcaacctgtgatgcctgtgggcagcaggtcgatcaaaacccaattaactttggttgcgaaccacgaacgaaccagcatctgcccctcacaccgacgaataataattattagagagcaggccaaattagttggccaagtgtgagcgaagcggtgaaagggggggagggggattgctttcaccttccgtcacataaatcaaactaaactctctctctatgcgtgtcgtcctttgttgaccatgttctggtcgattgtggacccagtcgttaattgccttggcaaacccacaccgccctcgtcctttcgtcctttcgaggcggtcacaaggtacagtaaaaatatttgtgtttaatttggttacacacattttggttgctgtaactgcaaattgattattactagccagaaacgctggcaaatgaacgagccaagaggccagcgggttaagggaggatcagaagtggagaatcctgccaatggagccgcaatctgcacaactctcggctacccatttcccttgccgctccattgggctgcggtttttgtcaacgagcagagcgacagacacgacgacattgcaatgttgtcggtcgtcatgggttaacatggctgggttgctctctacatggttgtaggtgcactgagataaaaagttatagaagaaatcctgaaactatcctgacaggactctcaagaagttctttaagcattagttacttaaagaagtcataaacatttagcgtttgtaaggcttcataactttctaattagagcgacgtaccttttgatatttcagctcgtgattaagtacactattctttctcactgaatgagcatgcaaaagattcgccacaatcgcgaatctggatgcgtactgggagtcagtcgtctccggtttcagttggcagcttcagcttgctcccctccccccctccgccactctctccccgcgatgattacacaaaattgaatgccgtgcagcatccttgccgtgaatgtgtctacatctctgcacgatgctccctgtccctggttgtgtgtcaatttgagtgttgaaaagtggtctccagtggcggcggtttagtttgcttttcgcgtctatacccaacacccctcccacccctccggaaaacgcaacccgcccttttggcattttgctactctggtcttctacgatgtgtgtgtgtgtgtgtgtggagaaacgcgaatttctgcttgccatttgtgtgcagataactttgttgttcgctgtttgttgttttccgtttgcatgcccgagaatgtgcggaatgcgtgtgttttatttatacacccccacccatttgccaatgggccacctcccactcatttgccacccccccaactttaggcattcggtgggcgtttttggcaaatgtattccaaaatcaaattcaatggctacgcaaaagttttgctacttagggtttaaatgtatctggcagatacacttgggcggcctgcacagtagttttcttgtacaaatcaaatttccagcactgttagccatcgatgttttaagaacttagagactacactaatgcctttttagccttaaagagcggaatctttagagaactacaaaaaaagagtaatgcaagctgagacatttctattctatctttttgaactcatttaaagacaaagcataaagtagctagcaatattttcgaactggccttaatacgactcacacatcgtaaatacaaataaaagtaaagttgggtacgcttaattacagcacgcagtgtgccaaagtccggaacacgagaccaagttgttgcatactcgtagttccatcgaccaagttgcaagttcccggctattcgatgcccaaaaaccccacctcggagtcgctaagtagagcaaagaacatactcgttacttgtttcttgtcgattgagcgaaccaacaaaagccgcaacaacttgccaagtaagttcgagttgctatttggaaacctccgaacctcagaaccttcgagcctcagctcaccccccccccccctgtcaaagttccatcatcatcctcctgctagccaagttatcagccgcaaataggcggcgtgtacacatgcaaatgttccccgggagaaacttagcactcacctcgaatgttgtgaagacgattttctcaatggatccgaagtagcgttcccacaggacctgcgtctgctggcggagggcgaagatgcgttccgccggtatggagcgcacgatgtcgggtacctatatatgtatgcggtagcagcgggaggaagagaagagaagaggagcggggattagagatggatgtaaccagtgctggcgtaattccagcttaatagatgcagctcatcccggcacctgagcaacaatgcattaatttagaatgcacagcttaattggttaaagggttacggccaaccacccacaggtgccattcatcataattgcaggggcagcagtggtgcccacactattgccccactaaattgcaacgccataaagagtttgcccagccagtcggatagagtcgagttgcgagtccgtgctcaagtttcctgctcaagttaacttaattaattgcatttcctgccaataaactacaaaggcaaacatgccaatggacggggacaggaagtgcaaggggaaaaagaagatggaggagcaggaaaagcagctgggcagaggtggaggtggtggtgggcggtgatatcccagtgggcaggccaattggcaaacattgtgccaagactttgtcgcgaatgaagtgcgacagcagtgaaaagttcacagagagcaaatatcgcagacatctttgtacttttaaatcacgacaaagtttctaaaaagtatgctaaacagaaatacttgcctctcttttgaatcggagaaagtccatttcttataaagttagtggctgaaataattttcctttttatatttatagtcaatgtagacttaagcgaactattttctctgtgtgcaacatcagcagttgaaggcgcaaaagcgtgaagaaaaggacactggcaggcaaacaaatgaagcaggacacgcgcacagggaaggagtgtccaagggctttcagtccggcgtaacatgaaaaggtgcggacattgggacaaagagctgcgaaccactcacctggctctgattggaaaatcttcgccgcaaacagaggctacctaccagtggactaagcgctcctcctaatggagcagccaaagttgagccgttaagacttgagggggattcttgctcttgctgtctttcgattcattttactaggaattatctcgtgtttatgctagtagttttgtcaacagaaatacatagtttttcgggagacatttaagtttaggttcaaaaagcatggcttacgataattacaaaaataggtatttgcagttaagttaactgaatatcaagcagcttggataaccaggatctctgagcaccggcgaaacgggtgcacgaatcttgctgcctcgttacagaatattcatcaacggcaaatggccagtcacttaaagagaccaataaaaagtgcatatttgtgacagctctctgggtttttttttttcaaaaggggctcacatcgcagccatccaaacaagcggcgcacataaacaatgaaaactttactctttttagacaggtctgaaatgaaatcgctttgaccaaacgactccaaaaagtggcacacgaactacctttcaatatttcatatatatgtatatgtacacatacacatatacacccgtacgtccacagatatcaataaatatatatatatatatgctccagctcacctgcagcaggagccgctcatcggcccaaatggcggcctgcttccaatcgattttcgattcaaacggcaacacccaggcattggacaatagtacgggaatgcaaccagcctgcaaggcttcgaggaatctgcaaaaaaaaaaagaggaacgaacatacgaaaaaatatgaaaaaaaactggcattgtgaaatgtaaaatgaaaattgttttttatgcttttcacccattttttattacgctttttatatcttttttgactttttctgtgaggcatttttttttttttttgtttgtgcttacctaaaggaacccaaacgacgtccgcgcggcaccaagcagaaagtggaattttgcagtaaggtctcgtagtcgtatctgcaatggaggtggaaaagggataggaaatgagtgagaaagagcgggcagaacatgtaaattagtgagagccatggcattgcataatgggattcgggagcaattaattgaacaaaggttcctggcgacgaaaatgtgaccccaaagagatgcagtcatccgttgagaacttaagggcattacgatatgataatggatggtgagggcggggggtgtggcaacgaattcggttcttaaggaaatcaaatttgcaaatgggtgcaaaagagttaaagaatggtttacgtagtcaaaaagtgctttaaaatacaacaatgtacttagttcctgaaatcgatagaataatttctcagcgactcacgttcgtttagctagcattaaagtaattatctttccgtttagggaataaactttccttccgactacatttctcttaattttttatcagttactttgctctacgttgcgtcttattcctgctgcttagcaattgaaacggattctattcaactcgttttgctctgctctttgatattcgacgaaatttctatcattccagcttcatgttcaacagggcgtatgcttagcatttgctcacattactcatacgccacgttacccgactacgcaatgtgctgaaaagtgtaatccgaaggatgcaaggaagggagggagtgggggtgctttaagcgaagaccacagtgcgcgttttgtgtggccatttcaatctttaattccaaaatcaaagccacgaaatgcatcaaacagccataatacgtatacgccatgtacgccaaacattgaatcaggtgtgtgcgtgtgtaggtgtgtgtatgtacatacatatattgtccacaggggtcggtggcttagttgggcgggaattaggtgcttttggagtcggacagagggaacggtgtgctggcagtttacaagttaagttgcgcgtaaaattacatgtagttggtcatgttctgccctccagccaacgtgcacaaccatccctaccatcctcttttgcgatccagcaaccaccccccccccccccggaaatcccgacccctcatcatgtaactcccctaaatggtcagcaatttgagctcggtacactcgcgttttaaaagcagaatcagcaaaaaaaaaaattattaggaaactgcatgcgcagctttttggacattgacaacgcaccgaaagctagagagagctgggtatagagcattagaaagaaagagaaagatagagagagaggggtggtgggaggcagcctgcaaaagtcccagtctttgctatgaataatcttgagcaaacaacataaattgcatgttggcttgcttctgacattttggcgagcgttgaaaaattacactgccaaatgcataggcaggcaaccaaagaggttgatggaattcgcaaagtagagaatgggttaaatctgctgttagagttcataaaattacgcaatgcaacctcaagcagttccgagaaattaaagtagtttcttaagctagaaaaataatacaaaatatataaataaacttaaggattatgtaaagagtttacaagctgaaataattctaaaattaagtttgttaaaataaatctcgcaaagctatttgaattacccatttatttctagaatttgttcgtttattctacactcttgtgttagggggcgtggtttttggcctaactaattagagaacattatgcatacaagacttttggttatacattcgactacatgtgtcggaacatttgcagctccttatgcaggtcactgcactggcttgtatctatgtactatgcatatattcatatattgtatctataaatgtgtgtatatgaagttctggaatgccgcttttcgacatttgctcttcgcttgttagctacttgtttaagcaattaagagccgccaacatgcaatgttgtatttgttgcacttgtttagacagcagctccgttcatcctgcgatccctacttgccgacccaactttaattaaatgatttttagctttcagccaagttgggcgaaacagttctattcggttcggttcagttaagttcggcttgggttgagttgcaccccaacagcatgcgagcgaaacttttgctatttacacgcgtttgttgtcaaaagttgttgctgactctgttctgtttctaaaaacagagatgtttatgccactggcagtgtgtgcctagttaagctggaaaagcaaaaacacgctacttcattaggcataatgcagatggccaagaattaatacgcaaaatgaggcagtaattacaatagctcttgatttttcttcattcttcttctctttatcacgagttcacttttccatttattagccggggaaaaaatttgcaaaagctcatcaagttgcttacaacttgcgtgctatattcaaagagttatttattttttaactcttattacaacagtttataactggcgtgttttataacttatgcaacaagttgggaattttattgcctttttccgtgcctttaaaaactttctttgatgtcacttaaaggctaaatgcgcagcagtaattaatattgcagcaaactttccgttttatgaaggttaagttcttttgaatgttatatatattggaacaaatccaacatcttcaaagatacaattctttattatacgcttgttatctatattagcatcatgtttcttaacttttaactgagtgtttcctttttaaaacaacaattatgtccgtctgccacaataaattcttaattaataaagaactttgtttttaatcgacattttttatgtcgaaaagtttgtcactcaaaagtttgcaatgaaaaaaaccttttgcaattttatgaaccgctctaggaaatcaaataaattatgagtttcttttatattgcctgtttcagagccgcgacaaactttgttcaataagaatttcagcacacactgtgcaattacttagtcagagttaaattgctccaatgtcccacctgttgccagcatttgctaccggagatttagggggagtttgggttcactgaaggcggagggaatgccacaaagtaagtcacttcagttcatgtcaattgctcgagcctaggccagcagaaaattaacataagcaactgggaggatggcggtaacccactaagctcgcagcaggcatataatttaagtggtttccagctgtcaaaggttgccctcctgctgccggtggtttcattttcctggggctttgtggacttcttttttttctgcccccgaagctgtttgttgttcggggaattctggttctagggctgattgagtgactgacaaactgactgactggcggcggtggggaatgaggttgtgatttcccatttagtctcatcattggggctttgcctttgacaggtggagcatccaccttttgcttttccctactccctgcaacgtaattcaccttttgtagttttccgcatatcggttctcgagtttttttggttgattttttttttctcttccgccggcaagcacttatgtatcgttcttttgtatttcagattgtgcctcgtcattgctgctttttgccaagagctcttctaacttggctgcggtggcgtatacgcaacatttagttaattgccaaatgtaaactatacgaaactgcctgtcagctgcagcagaatgcaaaattaattaaaaatatcaaaaaaaaaaaaaaaaacagaaaaaaccatcttaaaaagccgagcagagctgaggggtaaaaatatatacaactataattgagcaaaaagaagtgggcaaaatgtcaagaccgagtacgaagttggcaaaaagttttcgcgaaagagagagtctacgatgaattttaatgaaaattaaatttttcaaaaacagcattcggaataaagacaatttgaaaatcattttaaatgcggggcaagtcctcagaaagcaaagaagagaaaattgaacaaaaaagggagatgaaaaaaagacatccacccatacgcatcaaaatgggagaaaaaagcgggtaaaaacgcagctgtaaaagttgccattgtttggccaaaaagcagtagaaaactcatggcaaaaagttgataagaaggaacacaggaacacagcagctagaaaaatggtacagcgcaaaaaaggtactatttttaagatatgaaaaataataaaaataaaataaataggtggttatacttttcatgaagctatgttctggtataactaattatttggcttaaatgatgctatttaaatttagtttctacaaaatacaaacagaaatcctaaatgttgctggcattagtttttattaacttaaacttgttaattcatcgcgtaaaccagcaatgcatgctactttttataagtttaataaacgtatttgtattatgctaaaatattttaatattttttatatataataataataataataatataattttcttgctctgcagagcagcataaaggcaagtggagacggcagcgaaacattaaacatggcgcattagttacaagtgcaaagctcgcgtcaagcgttgtcgagagaccaccaccgatgtccctgttttagctaccatcctttggccatgctgctgcacccctcccccccccccccttggcccattctcttggccatttcgctggctttgtgtgtgaccatcggggtagtagtcgcttgtcgccagcttgtgataatggctcataatgaaagcaacagaagcataaccgcatgaagacgccgtgcaattgcgaatgcagctcgcacaaaatgcgtgcgggagttgcgaagcgaaaggaaaatgctttctttcgactgcaatcgggttgggtcggccaaaatgcataaaaaacaaatgcatttacgattattacagaaactgaaagacacttgaaacggggcggtaaccataagttgaggtaaaataaaactaaacgagcgtggcgagctaaagtaacatgtcgccagaaacttggttttgtaactaaacaaggaatttgtttttaatttgttctaggtactaaagctatctgtcaaatttgatcaagtagctcaaaactatttaaacataaggttcattgactatttacgtaaatcgttggcatatcgtcgctgaaattaaaagtacctccgagcaaagtctggttattattttcagggctcatgggaggtccttatgcgcaggacattacagcaatggccggcaattacttggcacgttttttggggcaactcacacacacctatacacctacatatatacatacacatacatatatatattatagcaaaggggaaatagaagaaagtactcaaagaaattgccattgcagaactgagcagcgttccctggttactggttctttcttggccaaggagccgacgccttctgttcctcctgctttcctgcttttgcgcctgcaagtgtgtcgcctttttaaagtgatttatgtggaaatctgagattaacgtggaaagtggcaaccggtggaaggtggctggcggaaggggagaatgggcaggtggagcttctcgaacaggtgcaacggcaggtgcaccttgcaccgaactaaagttttcactcgccctccttgcgtcctgcatgttgttgataatgatgatgctggcatgaaaatttattacttgggaaattacattatgaaaaatgcataaagccggatccgaggggagatgaagaggcggtggcaaaagcaggcattggggtcctttaatgagttgagattcttcgttttcatatgtttaaattagtttgcatgttcgacgagttgcagcattttaaattaagtttaatggggtcaaagaggatgtgcttaagaatcattatttctcattttaaaagggataacaagggcagcagccttaacctgatatatatacataaagatttataaatatgcatataaagaagaataaaagttgaagcaagagttttttatggctcgctattttataatttaatagggctgaaatatgcactaacatcttaacttaagatgacagagaatgaagatttaataaaacatgaaactacattacataaactagtttcctattgaaagtatatttataaaagtaatttaattttatttttcaatcacctgctgagtagttttctccacgtgccactcacatatttatatgtaaatgtttgcaaatgccaaactgtaattccagtttccccagggaccttgaactcccgaaattttccttgtaaatttgctcacacacacccataagccaccacatacgcacattaacacactggaaaataaactgcgtattgaaaaattgcaagccaaatagactttataaattgttaagctcaaattaaagggccacaaaaagttgaaagttgcttcgggacaaccttgaggcactccagggtggctacgtggggctgcaacagttggcgtggcagcaacgtggcgtatacgtaatttcgtcgcgtctgctgttagcggcaacgtaaaaaaaaaacaagaggcacacaaacaccaaaaagaaaatgaggaacaagtttcacttccaaggacatttacatggcgtctcattatttgccacagttgctactttcagctgacttcaaaaataggcaaagtctgacaaacaagtgaaagcgcatgtctgtacactgagagaataaaataatagaaaccaaaagaaacacatttagtaagtaactagtatgtatttaataagttaaagttaagctgttttaactgctttcaagcagttataaaaaatatgggttatatatggatggacaggacaacgttttttacgtcattataaacacataaaaagtatcctaagtcgtgccaaccgcagatccgaaaaagttcgaagaactggataaaatcgttgacctcgtatcaaaagccacgaagtgaaaaaatggatttaatgtcatgtggcttgtttctacccatcatcatcatcatcaccattatcctgatctgcgccggcccatcaagccaagtccttcgttttccgcgactgtaatgcatatggtgcatgacatcgtcatcgacggaaaaagccattgacgccttaggctcattacaatagcaacaatggaaaccaaagaaaaaaggccgcaaaacgtcagcgagaaaaaaaatttcattaaaagcagctcaaggtttttgaatgcagctaaaaaagtttatttcgaagtcacaggctgtggtaaagttgaagtaataagcaaactttttaatggattttgtgttgcggaatagcgctgtatatttaacatatacctatatatgtacatatgtatgctgttatatgtgctaaatgtgggagttggagcaattaactatgagcactaatggcctttgaattagtcatgtaattataaattcataaaagcaaattaaagcatttaaatagtataaatactattctttatattcagctgaaaaatgaaaacatttgttttgtgttaaagccactgccatttaataaattcaaaacatatttattacttataaatatttaggaaattcattaaaatattcctagatttaccaatagcctagatttgaagctccgttgaccagcaaataaacgagaaaactttaccaagccattgtcaaattgaatgcatttctgcttctggctttagatttgctaggagttaccccctccccctccccctctttattaccatcatcactatgtatattaaaggaggcaacaacaacaatgcgcattttgcatattaatgccgtggaaaactcatcaaaaatacagaagctcaactcacccaaagaactttggtgcccaggcgtattcacgagcttttagagattgcgagcaaaaaaaagaaatcgctgacgctattcaagggtattatgcaattttctccaaatatatatatatacatacatatatagttggagccaacacatggagagcgatgcgatgtagagaatgtaaggaagagatcgaaagatatatctgacaggtgcattaacgaagtttccagacagcgaaggccccttgataaaaaatgatgtgagtggaaaagcaatttgcttgattatgtagaacagtgcaggaagttcggtgtttgggggaatagattgaggaaagtggggagcataaatcgctgacgcttgacgccaaagcagatttgtcgcataagtcatgtcaaattacgagggggccaaaagggacccagaggagggggcaaaagggaaggcttaccgccaaactgccgcactgaaaaattacattcaattaaaggtaaaatgcaaaaggttgcgttgacagttttccgcgttcaaaaatatagaccactgatactcaagatgtacggtaattgaatgcctccataattatttgacatcattatgacagtaaataaaaagagagataaaaagaaaaattaataatgtatagaaaaagtcggaaaagtttgattgtgtcattgagaaaaataattttacaatttaaacgatctgcttttgagaaatagatacagagcaagaaaagcatttcacaaccaaaacaaacaaacacaattatatatacttccaatccatgatccaaatcagtttattaagatcgaagcattcgagttaaatatgcctttctttgattatttgtcattatttttttgttttcgtaaaaaaaatagcactccaaaaatatgaaagcggtgtaccaagctatcatacttctcggtttgtttaagcttttgagctcaatagaattaacgacaataaataacacaatatgtgtagactgttcgaaggacaaacaggttaaatgcataattgaagatacaggatttgaatgttttaacgagcactcgatgaaggtaatcaacggaaagtcattaaaaccgaagcctccaagtaccgaaaatttggatgtatgcataccaaaagacttgaagattctttgcattgatggtatgccaatattttgttgcataagtttttttgagtacaccatttcaaatgcattttctgtaccaatttagagagcaactttctgaaagtcatcgtttggtcgccaaaacttggatgtcaaatagtccacagagagtacccaaatagggatacgtgtttcactgccagtcttatctgtccgtgtgttgagacccaaaagggatccggaaaagcgaaggtcacctatagtttgctacttatagtaaccttgtacttaataaacttgtgcaacctaagataactaaaataaattaatcaacaatacaattttgaatgaatttgactcaagtctcgatataaagatcgtagcaatctttttttttttctattcatttgttttataaattatggcccaactttcatttgctataacttaacttccaaaactttaacaatctaacccacgtgatgagtttattcctgacaaccatttccataacttcatctgcaccattaatttggccaacgtaaacgacccaagttttgcccgaaaaacatttcaaatcatctgaccatgattgaaaagtcactgtcctgaatttgctcatcgttgaatttttcgacgcagtcgctaaacgaaatccattggcattgcaaatgcctttggcccaagtgtcgtgccatttaaatgagcttgtcaagtcggatttcagcacattaatcaccacgcacatccagaagatacatatatatatctctttatatatatatatagatgtgtaagaagtttatagtgggcggggccgagactccggttaatggccaaaaggatggggcgtggctgctattagcacgatggcggaggctaaacaaattactttgcggacccaatgacagctagaaacaatttttggccacttcgccagcgacaatcatcgtctttagcgactttatgggttaggggcatgggggaaatggggtcgtactcatcctccactcacctgtcgtattcccggttgtcctcgtcgcagcgattatcctgcagctcccgccaacttttcccgtggcgacaggtggtgaccaggaccatgtcgcgtccgttgtgcaaatgaaagagcgagttgcgcgtctccgatccaatgccatgcacgtatctgcaaaaatcaagggacaccaggttattagtgctcaaagtttaaaggaatttaaagctattcggcaaagttttaaaatttataccaaaaaacatctagctttatgtaacttattggaaaatatatattagtttaagagcagtatttaagagtagtactagtttctgaaaatatatttttcaaatacaaacaagaagattaacaagaagattgttttcccctacttatacctgtagttgcctacaaatctttggtcctcactattgaaagcatgctttatggccgacaataacagagattgcctccatatttcccgatccccagacgaatcacctaagcttcgattttattcgagcatttgagaagttgtggccttacaacccaatcgccatcgcaatcgggaaatgcttacacaaacacaaaagcgaatgtggcagtggcagttggattaaactgctccgattgttcttcagttggcataaacagcggcgtcaaaatcaattgcaataaaccaaccgcatggcgggcagtatgggatgattccgtttagatacggactgaaatctgagctggccgtcagcagagcagcaattgaaacaaaagatgaacattgcgacagcgacactaacaataaaaggctcacgcacacacacaaggaagcaaacaaacaggagagcacccacacaaacacactcggcaacggacagtaaacgttttcgagtgtatggctaagcaaaatggcagcatcagctgtgcacttggaaaaataatgacacaccactcatgatttttcacactgaatgttataataattttagtttattttaacatttcgcatgtttcatccactaaaataaatttaattacatattacgctacagaattcgtcttctgaaagatggttttccaatttctgtttaaaatctttaaaagctgtgcaacaggaggggaatagaatggaattatatagtttctcagtaatgggatcacactttttttaagtgctctaaggaagctttcgcatcagcagtcgagcagaaaaggagaagcttctgggcacaaaaaaataaaacaagaactccaatagaatccagtgagcaggataaggttgtgtggttgtgcggttgtgtgtgtgtacgtgtgtatgtgcaatttccttctgcttggcttgcagttgagcaaatttcatacacaatgagccacgtcggtggcttcacttcacctctgcaccaccgaatcaccgaaccatccagccaaacaaaaaaactaaaccaagccaaaccaaaaccaaactcggccaacacagcagattgggcagcgctgatttccgttgtccgactaccgggagtatccttgctccttgtggaagcgggcaaaggaacgcctggctctcttcctgttttccaaggacgaaggaagggtggcaaggggaaaagcggcagctaagccataagttatttgatttaatcagcgtgtcgctgccgctggcgaatatatctgaggttacggctccagaatcgaaatgaaacaaaatgtgtgcgtatcagtgggcaaggaaaaccactagctaccaaaataaatgtgaggaaaaaaattaggtcacttcgtttggtatagatttatttgcttaaagcgtattgatcaaatgccatttggtttaatgtaaataactccgctgcagcattacaaactgtatttaaagcgagcaaattaaaatcaatcgtttatttagccagcagtttgaaatgtttacacagacaaacttctaactactactactaaattttgttagttgtgcactaaaatattaaaaagtatttaaaatgatgcataattcagtcagttacaattggctattcacagaaaaagaatacaaaaatcttttaaaattccatcaattcatttggaaatcaaattgaaaaccaatttgcagccatgggaaaacgctaatgatacgaataaatagatacaacaatttatttgtcaatttatttccataagaaatttgattgaatatgacagccgttgcagcagcaacaacaacccacaatcaatggccatgcaagtgaattgaagccacagaaaaaaaatttgtttaataaaatgccaagggatgagtattttatggggcatcagggattctgcagatactgcctttctgtcgtgtaaattaatttaggacgctggcagatgtacaaaacgcagaaacagaggcagagagagagagagatgtcggccacattaatataaattaagtacatggcccggcaatagaggctgaaaaaatgctttcagcgcccattaagaaccggctatggtctgttctaatctaatttatgccctaaatggcccactggccctctgtatccggaaatctggaggtgaaaaaggtccatctgagcatttggcggcagcattactttgatcctgttgaaaaattggaacaccttaaatcacaaattctgttaaattttcggtttaaaagacattactattacttcaagctgaaagtaaaaaaaagaaaccgccctctttcatgtgtttaaaaaacgaattaagaaacctttgaagaggacataaatgttaaatttagcatatggcttaaacggcaattactcccgacactgctgaaaaatatgaaagtataattcacataccatattgacttatggtttaactttaatctgccgccctttatacgcagcaattgataaaacgtttttcaccggggaaaaaacgccccattcataggaaaagaatgccctgaaatgggtcaattaaatattgattgggccgggactgcaggccacaaccgaaaaaacgggaagccattcgggcaaaggaaccaaaagccatttggagggctgtcatcgccagtgcggctccaatgacaataaagtgcaataaccagacgaagggaccattgaaccggtcggagtcctagtggagtcccgctcctgaccactaatccaaacataatctaaaataattgagtatgcccaggacgcgaagcttttttcgcccccggtccgtccgacggtccgatggtccgtccactctgaataatttatgcgcgcattaaataagcttaaaatgtgtgcgggccctgcttttttcttttagtgtgcgaacagaatgtgggtatatgtatatatatctggaatatctagtatctgctgggtccgcgggcattgtctgccgcacttcggcttacatgggttaatgcctgcgaacgggagatccttgtacgttgccaaggggctatggcttatgacataagttaatgttttccacccaaccattctggacccctgcgagttgtcgccttcgcggccaaatcgcccggggttatgcagcatttgctccagccgaagcttatctatgcaacttcaaagcttttgtgatggcccagtcacattcacatgagctcacaatccatggatggtgggctaagaaaacgtggcgtatgcgcaatatctccagcttcttcttttgtgtttcgatcataaaatggtgtcgcaaaactgcaacgagagcagactttcacaggaaaaagtaaaaaaaaaaaagcaaaaaaaaggataaaatataaaaacggaacaacagaaacgctactggccttaaatcagtgcaggcaagcaaaggaagagcaggacatcagggatactgctgagactccagaattatgcgagaaatgggcgaaaggttgaaggggcttcgagcggcgaacgacaggtaaatgcatttttactccggcgaaataaacgtaaatataattttaagtgcaacagcagcagcatcaatatcaacaaattggtttacacgagagaaacaaaaaccgaaaacggccaggacatgaaaatcaatttatttttaagactttaagatgaatacaagtttaacagtagaactttgtatccttcagataaatgtacatttcttaaataccaaactattcttaaaacatttttaaatgcgttttccatctcttgcttacttcggtgaactgcaacaacgtcactttcgttacgtcatttgtaaatcattgccccttttgcctcttttgtccactattggatgcctaatgtaggcgaccatcgatccgtatcaatcacggtccgtttctacggcctgtttccaggactcgtcaaagttattgcaccaaacaatgcttttgttatccttctggctacgctaggacccaaaatgcgaatggtatcaacgttttagatacaagtcgaaggggcgagatggaaaaatctgtggcatcgaggcgaaattcgagctcatacaatttgcagttagctctcgccttatgcttcgccaaactgatacaggatacaggcagtaccatctatgtagcactcccttcgcaaactcatattcccgtcaggcaatcgactgcactgagaaaaatctatccgccgcttattaaaagttcttaaaaaataagtaacaaaattaattttatatatatttaaattgatttgacccaacagcgcaagttcacaacttaacttttaagttcctgcgctaagtaagattttagttaattgaaaatttaaaaagaatttcgcggtgtaagcgtgcgtgttggttcattgttgttgtggcatgtttggttttattgtgtttatatttggcttagggcatcaatttgcttttatgcaaggacgaccacaacgacaaggagttcaggattccggctgtaagctagcattatcagtgaagtcaggctaggcagcaatagcacaaatatgtctatatgcatgtatgtgtgcatgtggagcatgtacaatgttcttggattgaaggcaaggggcatattgcattagctggtagtgcaacaacgttgatgttgcatcgattacataatccatttacacaaatggcattttaaatacattattgactgactgaagcgtggagcgcgttttgaacaaggcttcagtgcgaccaacattgcgtatgcgtattgtgccaaccaaaccaaagagttaagcaaattcaattgatgtgcatgggcggtaatatatgcgtattaacgtctcccccctcactcgacctatttaacagatgtttaattagtgcacaaatgcaattgttgctgcctgataagtccgcaaagggcaagccaatacggcttaaaacggcttactcacatttattgaaggccgataatataataacgagccgtgttagataacacattgtttaattgaacattgtagacgtctttgttggagcaaagtcttaatcgatttaacgatatacacgactcgccgttgattgaagtgctgccaacgcttaaatcaacgaattaaaatcacatattcatttcaaaacttaatagaccacttaatttatttcaagtgtgtgtaattataatggtctgttgtaccttaaaataaataaataaataattaattgatctgaacaaattttttactttacatttagccatgtttgccaaatttaagcataagaaaaacaattttcagaattacatattaaaatttaaaatcaaaatacttgacctatgtttctacgaatgatacttaatatggatgtcaaaataattttcgtataaccacttaaattcgacaaaacagatattttttaaacatttttgcagttgacacacaactcttgataatgaggcatttgactttgaagtggcgccatctggcgcagagatatattttcgagtggagtactttgatcaaacagaaaaatatctcaacaatcatcaacagcattaccatggccatcattataatgttgatgggcaaaagagtgcacacacgccacaaagtcatttaccgaaccgaatcgtttggcacgtttcggcccacagatggcgcattgatgatgattatacatatatcgcatgaggacgctgatgaggatgcaatatattgtgagccaatgcctggcatcgataaatttaagtgcaggcatcaaagcagagctgaaaacgctcattaataagtattaagtaataattaaacagttgcaatggtgcctggtgcaaatcgaagcttttgatgaattttaagaaaaatttaaaacttattcaaagcgttcacgccacccggtaggcaggtgcaaaatgcaggcgaaatcaagcagcaagaaaatgcacacggaaaccgaaaagcgaacagaaatgcagagtagatgccaaggggatagtgcagaaatatatacatggatgtacgtatgtataaacgtataaaaacaaggcaaaataaaggaaggaaaaccgagcagccagacaaaaccacaggcactaaagataccgaaaagtaatggaactaattgctcaacgaaaggcggccagcctatcagtcaaaagcccattgttgcccacgaaagtgaaaatgaaaatgccaatgccaagctcaaagccaactagctgcaataataattggagcaactgcaacttgcaaccagcaaccaaccagctagttgcaacaaccaagtggcaactactatgtagtatataaaagcaagtgctttgcgcgcaggcgccgacagttgaaattcgccagcagccacgaaacaacgagcacttaactcgaaaatctgcattcaacaattgctgaaatattcaaatcgtgcggtgagaaaatcgaaacctattgaccaaaatgaggaagcattgcgtaagtaagccagaaatggatttccgaggaagtgttatacatcagctaattgtcactgtcacccgttttgcatccggctggattttgggtaacttcaactctcgtagatcaattgcatttggatgtttttgctgctggagctgattttgatcagagccgaacagcaggcagaggatcacaggtgggtttattccctcaaaggatttctcaataaaaaagaaagcaaaattcgtatcccgttgttaataattggcgaagttcgaaattgaaacataaaagtgatcgtttcctaagctattatttgaacataacaaaatgaaacttttaatcagtgctttagtgccataccccacttaaaagtctcttaagtaaaaacttatcctttctcacacataaaatgtctgttgtaaaatgccaataaattgaatcgaatgatattcgccacttttgctttcgcttttcccgcagaattcagcgacgttttatgtggcaagagatgaataactccgtaatgggtggcgtgttgggacgaatgttcaacggagcccgggcaatgaagtcgatgctcacggatctcatgccgagcacggcgggacatggccaaaaaatcaacatggatttactgccgacagaaatgacgcgagtgaagtacattatacgcaatccacaaactaacaagccaatgaagatcatcaagatgcggccgtcgccgaagaaggtgatcaaactgaggagacccatacccaagcccactatcactgagtcctcggtgatgatctcccacggaatccacaaagatcatcgcatgagacagttggaaaaggagcaagaactcatagctgaaggcaaggctccgatgaccagcgatgaggcaataatggaaaagtactttaagaagcgtccacgaggcggttcctccaatgaggtcatctctggcaagattatggagtaccagagctggaagcccgtctacaaagcaggagaaacgccatcatctttcgtgactttaagaccacaacccctgacccatttgcacacggatatatccagtggagatcatgagatgttgccaaagcccgagaaactggtgagctacgagtatgaacgggatgaagatgacgtggcggagaacgaagtggccaagcaaacgggtcatcgttacgaggtcaccgagcatacgggagaagctagtggcgaggtggaaacggtcgagacagtggcctccatggagagcggttttgtgcccagtcagggaatgactttcaggtcaccaccaccagcacagcatgcgccgaggcccagacaacgaacgccgtccagtaccacaactaccagcacaaccacaacagaggcacccaactatcccgcctcgttcctaaagaaataccgtgaacgagaggccaccaccacgcgcagaccacggaaacaccacaacaaggaggtctatctgatccgcgagggcgaggacagctcggagggcagcaccacaccgccaacctttgcgatgagcagtttgagggctcgcctccaggatcagcagcgccatcagaaacatcagcacaagcagcagctggaggaggaggagctggaggccgccctcgtggatgccatgcatggcgagaagtggccagcggaggtggcccacagcagtttccagctggccagtccgattggacccagtgcggtggcattcgagcaacctctggccaaggcgccaaggggccaatacaagcgccagacgcgcgacaatatccggcaacgtggatcaatcaagtttgccgacaaacccaactacgatgaagcctgaggaagcgggcaaagtcaccagttagcaaccaaagagccaaaggctgcagttgagctacatgaattttaaataaattcagtagttttttgtgcaacatacggtgacatgtgtacgaagaaacttatccctctacaatgaatgacccttttggctttaatttaatttatgtcgaagcgaacattttattttatttagtacaaatatgtacaagtcaaaattgtaacaagttctatttaaaacacaatttgttacaagtttacaaaataaactaggaaaactttatttaaaattaaaccttgtcgttgttattcgaatatcttctaaaaagattaaaaaaaaaactcgcatgttaagattgatttcatctgtttggacttatctattaaccacacttgaactttgtttaattgacttatctaagatttaagtttatagctattcgcgaagtaaaagtaagctaaactaacaatttcccagtggattgcatttcattcgcgggacggagtcaatgcacccatgacacgcaataatatgcagcatgccgcaacggacataaaactctggaaatattttgacttttaattaatgccagttagcgattttcccttggatgtttgtgtgtgttatcgcattccgcttagcagcttgcatttgacaactaatttaaaaagtttacatggccgacagccttgggctctgaaatcgagagcattgcggcgaagtgggttaaacctgctataaattccagaacaaaagccataagacacactgtgcgacagaggcgggtatagagcaaagaaaagagatagccagatgcgaacaaagaaaagcgcatttccactttgagtgcggtttttaatcaactaaagcaacgccaacaacaaactgcaactgaattaaaaaaactcagaatgcccagtaaaaccagaggaaaggggagaagggaaacgggaatggagggcaaagggaaaacgcgataaactttaaatgaaacgacatgtcggcttaactggcgagggaaaacgcagggaaatgccggaaaactggggagcctacagattggaattgccgatagccaactatgcaatgaaaatgagataaggaaattctagattaccaacgcggccagcgaaaaatgaactgggcacaaagttagttaagataaggatctgaattttaaagaacccgataattttgccattacctttgcatgtttagatacaaattatattgtatagaaaaaacaaagaacaataggtgaaaatgaagcgtgccacaaaatatatctctcagaagccattaaaattattttcttcaaacaaccagcccagctaacaaaagtttccatttttatttagcactttttctttgcgaaaaacttcctaaaactttggcttatcaagaaattagatgctttatgtgatttcaatacttgcagaagactttttaacaaaataaaaatttgtctctaccataaacattatgacaaatccataagaaactttaatttgccagcgaaaatcgcaatcaagatgagctcacctggagcccagaaaagcaggtgatccactaacaaaagccaaattgttggtttgttgtgggccacgcccctctggcaaagtctcacctacgcccacgtaaaaagcaaacgaaagtttgcaagttgaatttgccttttttcaaggacattattggggacatggctgggctgacttccttttgtgcatatttggaagggcgggtgctttaagtcagggttcatgtcgacctatacacctgtccgctggcaggaaacgtgtcctttgccacgccctctaatcccgccatgaaggctgtcccactgtagagtgcaccaaatacaaattagaatttaaatgaacaatgcaactggagcggaagtttctgcgattcaaaggggatttctatctaactctgtgaacattcgaggaagtaagctgaacaccaagatataaaaactatatatttatacatatgtttaaatttagctaatgagtctccatcagtcgcttatcgtcttgttgcaatcatataaaatattacaagtaatgcaaatacaaattataaaccatttaatatattatttgatttcaaataacaatattaggagaggaattttataaatattttagaatatacttatttagcaaggactcttggaagtggccacaatgtcatgcagttcggcacgtaatttcttccatcttttcccctctttttatacacacctttgctctttttcccgccccatttgcaacgtagtcctgttaaaactgaaaatcgaaggaagaaaaagtttcgagatttttgcactgaaggcgatgtcaaactgggtcgcttcaactcatcggcgaaatgtcaaacggattaatggaatttctcaacgaaaagcgcagccaatggtaaaatgcaagaacggaaattgaaaatgatcattaacttaaaaaacacttatacgcgatggaagatgtcaaagggattaatggaatttcacctggaagttttataggaaaataaagttaaaataagactgaataaaatatgaaaaatttcgattcttggtggtttacttctttaatgtaaaatacttgtatctttacatttattttcgttttgaatttaaaagtatgatataattttattgttaagtaccctagaattattaaaagattcagacttaacgaactaacgaagttgaattgtctaagatctgaagttgaatataaaatagaaagaacagtgaaaattgtggcatttgaaaatgcagcttgcaatcattgattgattcctttttccatttataaattaaattaaataaaatgtaataaatacctgaaaccgatttccaaacctaaagctgcacaacatgcccattgtttcctatttgaaactgatgcgatggcaaatacaaagcgaatcgattacgcaaggcgactacgaagcgagagtccttttggccattccttgcaaaatggaattgtgcggggattcttttacagcgcagccaaccaagtcaattaaatattgaaagaacgtttaaattgtagcccggttaaccggcgaaacggttaaacatgagctggctgccctcgcaacgcattcattaatttgcctggcaccttttggcgacctactgctgtcaaagttgaatttattaaacgaaattcttttaattaaaatcgtgacaggtgaaaaatggttggtttggtgtgggcgattggctggctgagtgcggctcacatcaaactgaatcgtgtcgaaattatatcaattatgaatttggacaattcaacaggagccaatttgatagtgtcctcgatgcgagcattgaactcgcaatcaacgaagccagcattcgtatatagcacaagctgattcatttgccgtagaaaacattgctgtttgctttccccagaatggtcccccaaatacacagcaagaaataagggggctggttgctgggtggcaaataaatggaaaagctgacggcaaacaacgatagctctctgccatcgtttagcgtcaggtttcgaagtgcgaaatgttcccagctcgctaaaaaattaaatattcaaatatagttgttgccacagctcacaggaagaaccttaaactggcggcaaagcaaaaggggatggagtggggagaggggggggtctgcaaaggattcgcgggatgtaagaggacccgtttagcttggaaaccagagctctcgaactaaagagggacacgagcagttgcgcacatccatatgcatatggtggaggcgacaaaagtgtttccagctgatggccagctgaaagattggaggactgactcaatatattcctaaataacaaataaaactctatatattatattattcataatcacaatatctcttaagttaagtaagcttaaatgttttcatgaaagaactctcgttttcgatccgcgttaatgagttcgtgttcattaaagtaaaacgttaaagacaactttgtcggctggcaatcatgtggaactacagcttcagtttcaggctggtcttccagctgcagttcagtgcagcagttgcacggtcctggagctcgagtttatggctgaaactagcgcagttaaaagcccagcgggcgagtgccaccagaatgaagatgtgtgggtgttgccaagtttattcgggctggtgtatatgtacgtgtgagtgtgtctgtgtgtgtgtgtgtgttggccgttgaagtgtaatcaacagcacggcggcaattacggcagacacttgtgtgggtgagagtagtcctggctgacaacccctagccacccttcgtttccttcccttcgatgtaggcgcaaaagttggcgagtggataacgcggcacaatttgccaaactgcactgagcggatttagcgcaaactactaaaatgccgagaaggaacatgtggataaagcacttacatcagtgcattcgcccctgccatctgggattttcattccggaacgcagaaactgagcacgttagaggcgcacattatatattttaatgcatattacatttcacgttacgaattaaatacgtagcacgatggaataaaacagccagcagcgccagtttagccctcgcggaaatggacccatcaggtggaaatattgagggtggagtccatgaactaacggctaactttcaatattgctattggtcggggagttcgacgggtaattggcgcatttaatccacgatggagctcagccattagcaaaaccaatacatgtttcgtttgtttcgaacttttagtgtcttaagtgtgcatttgggttttgagttgaggcaagaaacaattataatatcaaagctgaataagcagagcacagctctagtttagtcaacactcaactttcctgcacaacttattcatgggagatactgtacattctaatcaatacgatgtttgctccttttgtttccggattaaaagttcattttttcataattccaaaatatttcctacttaaagcgcacgaacaatttatcaagtcttttacatttttctcagaatttagccattgcatagtcgattcaccttttccgctcattcccctgcattgattttaatagcctgcaagtgcggaaaaaggagtgagtcctgccataccgattggctggctgctcatatcaataaccaaacacaaacagaaagttttctctacgatgcagggagagccattcaatttttattaaataacttcatgcatggcaagtgctcggctgcgaacggattcggttttctagtcgatgcgtggatgaggatgtggataggaactgggatgtgggatgtgggtctactcctgtcgctgctcgatggctctgtcaatagcacagtcgaagcatctggacggctgaagtggttctgggggggggggggggggggaacgtgtggcagggggatttttattgatacgccccgatgtccaggctccaaatcgcatattatcgcgtcctgtgagtgtgtatttgtggaagagtatgggttttgggcgtatcctgccatgtcctgcgcctgcactgatcattaatctttgcaagctgccaacgtgttcgcctttttcggacctcaattgcccggcgagtgtgagtgtgtgcattaaatggcggatgaagtccattagaaaactattgaagcacattttgtcgattgcagccagcaactagcagtcaagcagagccaaactccatatcctggccatgtggcaggatgtggcagctgccgcaattgaatgctatcgtcgattctaaaacctcccctttcagccccttggagtcttaaagcgaatgcagccagagttcgattttcaattaaccgacgaaagagctgcaatttgttggtctaatcgaagaatttttgtatcgtaagagaaactaccagcaaatccgagtatatgggttatattatctctatgttccataaaagatgaagcttttcaagagttttagaccttaataggaaaaactgatttatagtatgtaggattccaaagaataaatttgaattttttgagctaacttagttagtaagctagaaaatctgaatcaaacaaacaaaagggcaagtaaataaattatagaagaatccgatgctcaaccgcaaataaagttctttgagtattaagaaaaaaataaataaaagcaatttaatatgaaagaaacaaaaaaaaagggggaaaacatacataaacaatttgcgctttagcccttttttccctggcttattttccatttttgcccttttatggtatttgctgcccgctttttgttggtattttgcttaattatccacatgaaaagtccttcacaaattccatggggccagcgcgaaaagatggagcgcagaaaaagcgtgaaatgaaattacattaacagtggtctatagaagttgaaaatatgttagaaatgcgagcggaccagaagtgaacgccaagtgccaaaatgaagctaactttgatgagatttcgccaagagcctgatgcctttggatgcctcttcgtggtcgaaaggaaaatagcgtgaattctaggggctgattttggtatctgaaagttgtcattacaaaagttgggtatgtcagctaaattacatttcagtaatattaaaatatcaatttgttttgttgctatattatcctcttaggtactctatttgaaagtttgaattacattttttttaatattacagctgctgttgaatacagtgaagtgtatttatttacaaactacttgcacgcaattaattttggtcgttaacagcagacgccaaacgaatgtctggtttttcacttcagtgttcaaatgcaaacgttggccacaaagatccggaaaaaggttcgtataacccaaatatattctttttacttatttagaaatacttcttcagcttttctctattgacaagagtatttatttttattttggttcagctctttttgggtttctcttttatgcagttcatttgcaaacatacagccaaagaatggctaaataaataaatgggaatgaacgaaaaaatttaattaaatcaaatgcacacacacacatataaacgtgtatgtgtgggtagttggctttttaatttgattatatgtttacgtttcagaattttttttgattatacattttgctttaggcagatggtgtttgttgtttcagaaggcaaaagacaaatgttaggggaataagtaaaaataaagtaagagtgaaagctaaaggcgagttcctcgactattagatacccgttgcttaactagtgttaccacgagggagatatagatacaatatacccttgcagtaattatgtaaatcagttctaactttcacccgatatattagcaatcagataaataaatctccagataaataaaaccctagttaaataaaaccgttacgtaaccccagataatctaacacatgaacgaccggaaagaaagctacgcaaaaattaaaaaaaaatcctgatcaggattaaactaacacttaatctatctgttaccaatttttcaaggaataccaaatgcccatttaccattctactttacgagtaacggttataaatatgcagggtaacatgcagagtgtaaattcaattaaaaaacgcttttcaaatattcattacggcagggggcggtgggtggtgggtggtagcagcgagaagttggttaattagcgcctggaagtatgctgcggttttttgttccaattttacatctctgaggagaaaaaggcaacttgtacgcctgcttgcatatgtaataataataatcaagtcacaaaaacgggacatgcacgccactgggcgcactggggaatactccgaggcgaattgctatttaaaatattaaaatttacaaatacaagtgaaagaaatattaaataaatttttaaatacacctgcatagaacgtatctaataataagcttacaatgtacatcttcaagtgaccctaaatcagtagaattttggttttaatgaagtaatcaaacttttgtgcactttttttcgctgtgcatagaccccattcaaccctcaatagaaggctttttgtgaaaatgttcaagctccaaaaaagcgctcaaaaagcgtggaaatttgattgttgttgccggctgcggctgctgtggcatgatgaagtgtcatgaaatttaatcaatttatttgaaacgtgagcggattccacgacacttttgcctgtgtgtgtgccctatgttcttattgttgttgggcaataaataacagcagcgtcgtctgtcggttgctcaactaaaaattgtaacagagcaaaagtgccaaagtaaataacaaacaatgaaaatgcaataacaacagggccaaaaatgaaaggaaaggcgccgggtggaagggcagtgcggagtaatatcgcaaataaagtttcattgtttagccagcgggaataaccgcacggcacacacagatactcacgaatacatcaaaaccctcccagcacacacacacacatgaatacacttcctgggggccaacaaaaaaaattaaagtgaggaaaagggaaaatgaaagggtagtaaaagtctgcagcgaactttgaatgagcttgcatggaaggacattactaagctggattttttgcggattttccgggcaacaacattgtaaaatttcgcacttttgtagtggtcactgttaattttaagaaaaaggagaaaattagctaaacatttatttatgtaaatcaaatagtaagaaattgaagaacattcttatctaaaaatgtaaaaaaaaaataaaggaatttctttaaaaacaaattattctaaattcaaatacaataaaagcgatttttggctaataccaattgctctttttaaacgttttttttttggtggataggatagccaaatggtaaatggtacgcttttcagggtgaggcatacggaaaagccaacacctctcgccccattttagctgggtccttttggaaaatcctttgcctactcctccgccaaggcacgtacgcagaccaaaagaacctcccgccctgaaaagcatccatttgtcaggaccccgtccagggcttatacatagaaactttctggcccacttcggtgaacgttttgtgccattattgttggcataactccgcaacgcagagcgttttgcgaaggccaaaaccaggagggcatggagaacgtttataaatttattgtttttccacgacgcatgtactcaagtgttgctgcgtgtttttggcaacaaatttgttcaacaaccatggcgcgaagtgagggaaattaggggaggcaaaagcccattcaactcgttgcggtgacgcattttatcataattacattaacaccaccgccaccccggcctgccttcttttatatatctcgctcataaatttaaaacagatcccccaaagtaggcaaacccgtagaatctttaaagccaaactccaagccgtaactttggcgtgctgcgaaataatggtgcaaataaacataaataaatgcactgcagcaggagctgtgcgtgttcttgtatttgttattgttgttggttgcaaactgcacacatgagaaaagtaagagtatcggatggcccaactgacaaatgctaaagatacattttaccaaaagttataataaatagaaattattttaagttcgttttcaaaattaaataaaagaacccctatcaagaatatgtataaaaggcaaaatgatatattaaaataaatatttatttaaaacaataaattatgaggagcttcagaaaatccttatggttttatgatagttttctgtgccgtttcaggtaatgtttctggcattttggctcacgaaatccatttcgcgccatatgggcatttagcacaatccgaaccgcaaaaccaggagcccgagactcgagtcaagccaagtgaaagggccaacacacacactcactcacacacacacactcacacacacacatacagagtttcgcacacataggcataattaaaaacatttttgcagccaccaaagagaaagcagagaaagagaagagatgaccaaccgaggggccttcacatatttaggccaaagtttctgcaatcctggcccaaaacacatgccacatgctctcaacacacaaccacattccacttcattatgactcattgcgaaatgagattaaaatgaaatgttttttatttcttaaatgccgcgccaaccgtacgtagaattatattcgcaaaatgaaatgccaaatatgtggaaatgcagcgggggtgaattgtttagtggcttcagtggtttcccgatctctgatgcactgcatcctcattttggggggccactcaattgggtgaaattgaataataatttgatacgagtgcccagaatcttactctttattcctttgcgaaattcttttcgaataagcgctcaaagtttgaaaaccaaagatttttgtgggagaaacttttgtgggttatgtgtgggtatgttaattgagtttaagttggcactctttttatggtaaaaaaaacattttgtcatgcccaagtcttgctcccagtagctgagtggagggtatccgataatcgagtatagcttttccacttttgtttttttttatatgatattgctcgctatttatcgccaaatcattttgttaagctaatttgacgcagctcgcttcgcagccgaaaatattgagcataaaacttatttatggtcatcatgctgccttcactgttttattgacatttatttggcacacaaacacgcacacttggctgaccctgggcccgagtacaaaggaaatctgcataagtcagtgaagaaaattccaaaatcgaaaaaagaaggaaatgagacgaaaaatgccaactaatgtcacttagtggatgtcggagggtgctgtcggcggacagctgaatttcgagacaatttaggaactgctttttaaaatggctcgcggctgtcgcaaatccgaaatgagatgcacgcggaattccagtgcgataacctcggcgtgctgggttcattgataatgagtttctcaaggaatagcggccagtgggttgcgtcgatcggatgggtcagacgagattgtagtccggtggtggcgggcggatagtatttcacacgttctgggttctgggtggataacatcagccctcttttggccgtttcggcacgtgccgtcaataaagctgaaaatcgcataaactgtttgagccgcttacacgtcataagtagcgagtacttgggcgaattctgggggcctcttccatcttccgcacgataaagttgcccggtaacccgaaccatcttcccccgcacaaccactcgtctggttattggcatctttagggccagagaactgaaattccgtgccataatcaattcaattcgtcggcatagatttagagcagaggcatcgagcaacttggaggaatattgaaggcatataaccaggaatgtgctttatgactgaacttctcttagctattaacaaatattttatatccaacttaaacataaatattattggttatgttgagttagataccttcggtggcaatagaattaaattttgtctctgatttgaataatttatttaacgtaatgaataattatgcttaacatattaaagaaatttaaaccgaaaattgtgcgcaatataattaatggaaaattataattgaatcatcctgagtgatggaaatgaattgatatatacaaaattataatttatcttttaaatgagcagattgaattatacgaaaaccataattggaatgcaactgaatcggaaacaatggcaacgaacagcaattccagttcgttattatttcgacacatatttcgaatttctttcttacaacattctcaggtgcaagtttcttgctagtttcgtgattttgattagattttgtagtaaccggaaatttccccaaggccacaggcaatcgaagagtagatcgaatttgtggaaaattaattaagtttaaagctcgcacccagttgaaagctaatttaaatccacagcaaaggcagagtaaatcgaatcgcaatgaaatagtaccgaatgcgagccacaacgaattgatttgagcgatttgcggattgggtgttggtgtgggtgtgctgtttcgctggaaaagttgcaacaaaaaatgtttgccagtaaaatgcaattgcaatttggcatgaccaactacgcatgctgcgcaacagcatccaacagccaaccgacatctaaatccacatccagggccaaatccccaaccgaatgaaactcaaagccaactaaaccagcaaaaaccagaagccaacatcccttagagcaatagatggacatgtgctgcgaattccaaatgtcagaagccctgtacgtacatatatatatttagtatctatatgtacatacatatatgaccaaaaaaatcgtacagatgttagcttcgagtcaatcgaaaaggctgtttttgaaattaacaaagttccaaaaaagtaataataaataattgcccaaatgcgaagtgagttggaagcgccttggtttcttcgctaattggagggaaaccaaattatgagcacaacttgccgtgcctctcaaggtgaattgcttgccggcagggtgaagttttccctctaattgcggaaagtcactcataaaaagacccatcaagtttcagttaagcggcaagcaattgtcacaaaaacccagccagccaagttatagataccgaatgagtatgttacccccgcaggtagtacgtatatacatacatatgtacacatatcttaccatatatgccgagcatatgaaattcgcacaccatcaacggcgatatgaaaggttaataaaaccaagctaagaacgtgcgaaacgaaggcgttggcacctggcaaaacgtttcacatgctcatttttctcgggtttggggaaaaactttggttttttggggaagcatgctagctgattttattctctggggattcccccagaaactgacgccaaattccaatgccaatatgggggagccatcgaattgtgaggcactgagctcattaaacgttaagtaagtcaaatgaatgttgcccacttattgtttttataaagataagtaatttacatttacatggggacaagcgtcgagattcctcgaaaaaaggaaaaagacttcattagtgatgaataaagttaaaaagtaatattttataatcttcgcttaattaaagagttatccaaaacctcctcttcacgttgaattagctgtcaagaccttggcagactttttcgatttgtcaggataatcatggccaatgattgataatgaccgagttagttatctttccttattgatgatctcattggtaccagtctgagttgtgattatattcccgaatctcagacaatatctcgccgataaaagccagaaaccgaaaccccaaagaagaatgtcaaacgcagactcccaaccgcagattaactctgaccccagatggggcacagtttccccctctctgccacatcccactttgcttatattccacgcccctttcacttataatttttccccactttccccacaattcacacacacacacgaagtacgacgagcgtgagcgtcctgcaattaaacgggaaaaggaaaacttttccaacattttcccagggaagcgaagccgcaataggatgtccatgcaactgggtatgtaaatgtgggcgatgggtggtgggcggtaggtggtgggaggggagtgggagtgggattgggagtggttttgtggtggtgggtaggcaggcggccttgggatatgtggatagtgtcgtatggcttctttccgtctgctcagctcgacaatattgatgcacaatgaaccaagtatgtattcacttggttttaattaaatatgttttaagaatatgagttaaggttttaaaattattaaaaaattatttatgcatagtaaaattaaatatattacaatataatttgcaaattaaacaaaatataaaatcatttctttcagtgcactggctggtgtttggacgcataattgtaaagtggccttgtacgtgtcgtcccttttgcttttaattgtatgtgtaaagtgaagtgtgggtggggatggcggtgtttaacccacccacttgccccctttcatcattcccatccaaggagtgcgtagttgtgtatgtgttgttaacaactttaacatcactttggcgtacccttctcgaaagtatttatacgactttgtttgctgatttcgctgctgctgctgttcgccttcaaactgataaagttaactcggtacaaaaaacattatacatataaattatatatgcaaaaaattctttattattctgtatacgctcattttcaatcactttttcagccatttatatgatgttttcaaagtgttttataatttctaacgcggttattgcatatcaatcaataagaactctgaatcagcaaatctatttcatgatttttaaggagttttaagctaattttaaattcaacttactggaatatgttcccttaactaaaactacagtcattccctaacatacttgtaaaacattaattgccggagtgttaattgctgttgaccagcacttaacttaattaacaattgtcctacaggaatttccatagatatattttgaagttgttctccgctatcgaagccatgtgggggtgaaaatcaattttaaattagggcacaatgagctcatgtcgccacgtggatatcaggtgatatagaggagatccaaccgtaaacagctagccacccaccgcccacctacactcacctcacgtataggacaaaggtcaggtgtacagggtcttccaatactgaacagcaaaaaaaaattccatttacactttaataaataagtataatgataagtaataggtaaactaagtaagcaaattttattaatactatttatagtttacatgaaatacacaggtattttttcgcatgatatttcctatatgaaaaccaaaaccactaaccatgcaatattctcagtaaaattgatattttgctcctgtgtcccgatgaatcgagtttcatgtcaaaggaagcgacatcccagtccatgttgtatcctttgccgttgtgggcgcccgaagtgagtaaacaagaataaagcggcgacaaacaaaagactggcaacagcagaaaaacagaaaacaggatccaggacaccaagggcccacgaggcccaaaacgagaagcaactagcaacttggaatatggaaggacatgacgaatgacgcgttgctagacaatttttcaatttgaatggccccccacaacagaaacaaaaaaaaaaaaagaaatgggggcctgaaactcgaatagtgaaacgtttcggatttcgattgggttttcgcatttgctcctctggcttcagcctgtgtttttttgggacggcctaaaggattggcaacgatagatgcaacctgcaatttgccgcctgactaacccagacgacgggttcaaatgggagttgtttcgattggtgtggaatttaagactcgagcgaatttttccgcccagggcagcacaatgaattttcgaaaattggccatatactggaagctaccttttttgatttaatactgcatcattttgcatacagtttaagtgattaaatccctaaatgtaagcttgacaaatgtttggatttcccggattttcactggttttcttacatttttcataactaccttgcaagagaatcttttatattcgcttataatttccctttgaggatttaaaaattgcttttaagcaaatgactttttacaccgaataattctaagcgctttacagttccaggataataaaaagattatttacctgaccgcactgattttaaatatgaaaagttattcaccaatacacttgtacttggatttatgtatttcattgattttcattggaaataataaatttgtatacatttacatttagttattgatacatcgctataaacgaaagtaaacgtataaaatgaagttttcttgtgagaatgcttttgtattcaaacttgcaattatacctattgaatgaatataaaatgttttctttcttagtttcccacaagttgtgcttatgaataataatttttttttgtaaaaatctatttattaatcattctaagcatctaataacgttgaatagaaagaaagaaaaacaaaaagttcagcaaacccgtttgtttactgatattactttattactaaagaacagcgtttcttgtatatatggataactttctaaggcaaatagtttctatgcatttttaaactattagttccaaactatgacctatgacctgtttgttccaattgatcaaaccccatgagaacttgaagcacgtaagattcatattcacttaccgctttcctttgaaggccagcagatacttcttgttggcggggaaattgttggactgcacggttcctgtggcgccggccctcagcgggaattgtttgtggaagagcgggatgctgacgtcgaaaccgtgtcgcagttggagcactcccatgctggccttggccaaaatggcctcacccgcatcgaaacccaatgagttctccgcgtaatccggccaagtgcccgagtacagattgaagataatgtggttcctgccattgttccaatacggcaatcttgccaatctggatggcacattccgaacataatcctcggatagggaatctcgatccagggtatcgataccgagcacaaagagacaggcggccgtgggatcactggtataatatctcgattcctggatggcagtgagtatcttttgatagttggccgaggtgggcggggcagcgcccagtgagttaagtggttccggtggatagatatagaccaaaaagcgatcataacagcgggtaaaatcgaaacaggtctccatgcggcagtcgggtttgcgggtaaccaggtgcttggagctatccaaactcttcgattgattgctctgcagcagttggagttcctgcatatcgtgggcgcccaggaagctgggcaactgctcgtggggttgaactccaccatccttggccgattcgtgctgggctctacggggtctcaatggtgagactttcaggcgatagccaccgaaataggcgtaggccaaaaaagcgcaggaaacgaagaccaaaatataacgctttttggcctgcattttgtggttttagtgtatccaaagccttaagatccgcaataattttgatttatattattattatttacttttatttattttccggggatgctgtatgggtgtgcgtgtgtttgtgtatgtgggagagcgtgcgtgcgtgtgtgtgatggtgtgtgtgcggcagagagagagagagtgaggcgggggttccgacaacaacaataacaacacgaatttacactagttgtcgcgcattttcgattttggttattttgttttatttggccactggattcactcttcaactaatagataacatggccagaatttgttgttatttgttacacatacattgcggcggcaaacacatgtacattccgctttattcgttcataatcttttatgatttctcatttcctggcgcgtttaatttggtgaggggggcggcagggttcgatcctcgcttttcacgaggaaatgcattgcgcacacacatttagctcacttattcacttcatttccattaagtttacacatttgttttgcgctcttaaacaacagaaacattaaacaaacacacacaaaacatttttagctgctaaaaatcagacggcggtcgcgacttaagcaacactgccaccgcggtgttgtgcagcaccaaaagagcgcgaatagagcgggggcgacagggttgccagctgtgccacagagcgttagtgtttgaattgaaaacaatactattaattctgtttttattcacaattattgcgatatggtcttttcactgctcatatattctattaattatttacttggaatttactaagtcttttatatatccattgtgtgccaattttctcgcgccgaggcgtctttgataacagctgaactgcaaaatatcctcgaaaaaggcgcgtcttaacgttttgatagctcggcgtgtactggccaacttatcacgctaccaaggacttcgctggaattcgcagactgattggaaaacttgcacatgcgctgtttggcgcgctcctgtttgtatttctccaacaggtggcaacgccgcgacaacagctgttgagttcaaatttaaaataattcttcaatgataaatctctaattcgggtggcgttttgtgtgggagtgattaccgtgggttggaatcttaatccccccgggcgtaatatgttttgcgaaatgcaattaccactacaataactgctgcaaacaacttaccgctgtggtgcatcataataataattgtttggcttgaaattaattacactttcggtgaccccaaacatcacgttttgcccattgtagatttgccaaatgttacccaggggtatttcatgtatgcctatattaattattcgccaaactaattacacctgcaattatgtgttaacataaaaaatgattacatgtcttttgatatatctattctatgtacctttaaaacataacactttttgctcagccgcactaaaagttaaaaaatataactatatgtattaatgatattactaaataatttacacataatttttagaacatttaacaagcatttttattagttttaattcgaatttaagtatttcaattcatcgctgtttgtatctgtgcaggaaaaaagaaaagaaca

SEQ ID NO: 21434 - DNA, 3817 bp, DROSOPHILA
cggtggcagtgttgcttaagtcgcgaccgccgtctgatttttagcagctaaaaagagcgcaaaacaaatgtgtaaacttaatggaaatgaagtgaataagtgagctaaatgtgtgtgcgcaatgcatttcctcgtgaaaagcgaggatcgaaccctgccgcccccctcaccaaattaaacgcgccaggaaatgagaaatcataaaagattatgaacgaataaagcggaatgtacatgtgtttgccgccgcaatgtatgtgtaacaaataacaacaaattctggccatgttatctattagttgaagagtgaatccagtggccaaataaaacaaaataaccaaaatcgaaaatgcgcgacaactagtgtaaattcgtgttgttattgttgttgtcggaacccccgcctcacggatcttaaggctttggatacactaaaaccacaaaatgcaggccaaaaagcgttatattttggtcttcgtttcctgcgcttttttggcctacgcctatttcggtggctatcgcctgaaagtctcaccattgagaccccgtagagcccagcacgaatcggccaaggatggtggagttcaaccccacgagcagttgcccagcttcctgggcgcccacgatatgcaggaactccaactgctgcagagcaatcaatcgaagagtttggatagctccaagcacctggttacccgcaaacccgactgccgcatggagacctgtttcgattttacccgctgttatgatcgctttttggtctatatctatccaccggaaccacttaactcactgggcgctgccccgcccacctcggccaactatcaaaagatactcactgccatccaggaatcgagatattataccagtgatcccacggccgcctgtctctttgtgctcggtatcgataccctggatcgagattccctatccgaggattatgttcggaatgtgccatccagattggcaagattgccgtattggaacaatggcaggaaccacattatcttcaatctgtactcgggcacttggccggattacgcggagaactcattgggtttcgatgcgggtgaggccattttggccaaggccagcatgggagtgctccaactgcgacacggtttcgacgtcagcatcccgctcttccacaaacaattcccgctgagggccggcgccacaggaaccgtgcagtccaacaatttccccgccaacaagaagtatctgctggccttcaaaggaaagcgatacgtgcatggcattggatcggagacgcgcaactcgctctttcatttgcacaacggacgcgacatggtcctggtcaccacctgtcgccacgggaaaagttggcgggagctgcaggataatcgctgcgacgaggacaaccgggaatacgacagatacgactacgagaccttactgcaaaattccactttctgcttggtgccgcgcggacgtcgtttgggttcctttagattcctcgaagccttgcaggctggttgcattcccgtactattgtccaatgcctgggtgttgccgtttgaatcgaaaatcgattggaagcaggccgccatttgggccgatgagcggctcctgctgcaggtacccgacatcgtgcgctccataccggcggaacgcatcttcgccctccgccagcagacgcaggtcctgtgggaacgctacttcggatccattgagaaaatcgtcttcacaacattcgagatcatacgcgaacgtttgccggattatccggtgcgaagcagcctggtttggaacagctcgccgggcgccctgctcacgttgcccacctttgccgacagctcaaggtacatgccgtttctgctcaactcgatgggtgcggagccgcgtcacaactacacggcggttatctatgtgcagattggtgccgccctgggaccgaatgcagcgctctacaagctagtcaggaccatcacgaagagccagttcgtggagcggatccttgtcctttgggcagccgatcggccgttgccgttgaagaaacgctggccccccaccagccacatacccttgcacgtgatttccctggggggcagcacgaggagtcagggagctggacccacaagccagacgactgagggacgacctagcatatcacaacgattcctgccctacgatgagattcagacggatgccgttctgtcgctggatgaagatgccatactcaatacggatgaactggactttgcctacacggtgtggcgggattttcccgagcgcatcgttggctatccggcgagagctcacttctgggatgattccaagaatgcctggggttatacgtccaagtggacaaactactattcgattgtgctaactggggcggcattctaccaccgctactacaactacttgtacaccaattggctgtcgttgctgctacttaagactgtacagcagtcctccaactgcgaggacatcctaatgaacctgctggtctcgcacgtgaccagaaagccgccgatcaaggtgacgcagcgcaagggctacaaggatcgagagacgggtcgttcgccctggaacgatcccgaccactttatccagcgccagagctgcctgaatacctttgcggccgtgtttggctatatgccgctgatacgttccaatttgcgcatggatcccatgctgtatcgtgatccagtttccaatttgcgcaagaaataccgccagatcgagttggtcggcagctagcgatatgtgcatcctggcaatagctacaagcgttaatagtactgaatacatatacaccacacacccacagctacaccaataccaataccaacactaccatcaacaccaataaccatacgaatatgaacacagaaaaaacacacacacacatatgtttagatgaaatgctgttttttgacgctggccaagcgatgcaagaactatgttaattattattagtagcgaaaagatgaaacttagttaggagccaaagggcgcttgtaaatgtatgtatgtgtacatcgatgtaaacatacggcatcctttgcaattatatatgcaatgtgtatatatatatagtccttaaatacgattatgtgaattagcctagttaactgcaagcgaagcaaacgattttgccatcttttttgctaatttcaaattagctgcgcttagcaaattttctatatgcatacatacaatatgtaaattgatatatgtctaggaacataagtagccgatttttgtactgtgtgagttgagttttgtatgtgtaaatgtttgtatgtccttgttgtaactctccgtgtatagttagtgatttatcaatgtgaatgtgtatgcgcaaggcacagtcgtctcaatttcagttttaaattccaacttgaggctcctcgaattccgtataaaaaacacatcgactgtatcttttgattatccgtggctattatggaacagcagcagtaattgccactgaaaaggaatacgaactcttttcgggccattcagaaataaatgcacaaatccgccgaggagaagcaattaactaatgctaagtttatggtttaagtagctttccattttcaattcgttatgtgcaattttttatttggacacctcagttttttaattcttatcgtggccatttactgaagtacgtaaatcaattatcaatatgcaatcaacttttaaccacatgcgcatatcaaaagaagaggcttctctgaagcgaagcgtttttagtttaagcaaccacaattctatacatatactagagctaaagtatatttctataactattttttacaacaaatatacacgattgcagatg

SEQ ID NO: 21435 - protein, 760 aa, DROSOPHILA
MQAKKRYILVFVSCAFLAYAYFGGYRLKVSPLRPRRAQHESAKDGGVQPHEQLPSFLGAHDMQELQLLQSNQSKSLDSSKHLVTRKPDCRMETCFDFTRCYDRFLVYIYPPEPLNSLGAAPPTSANYQKILTAIQESRYYTSDPTAACLFVLGIDTLDRDSLSEDYVRNVPSRLARLPYWNNGRNHIIFNLYSGTWPDYAENSLGFDAGEAILAKASMGVLQLRHGFDVSIPLFHKQFPLRAGATGTVQSNNFPANKKYLLAFKGKRYVHGIGSETRNSLFHLHNGRDMVLVTTCRHGKSWRELQDNRCDEDNREYDRYDYETLLQNSTFCLVPRGRRLGSFRFLEALQAGCIPVLLSNAWVLPFESKIDWKQAAIWADERLLLQVPDIVRSIPAERIFALRQQTQVLWERYFGSIEKIVFTTFEIIRERLPDYPVRSSLVWNSSPGALLTLPTFADSSRYMPFLLNSMGAEPRHNYTAVIYVQIGAALGPNAALYKLVRTITKSQFVERILVLWAADRPLPLKKRWPPTSHIPLHVISLGGSTRSQGAGPTSQTTEGRPSISQRFLPYDEIQTDAVLSLDEDAILNTDELDFAYTVWRDFPERIVGYPARAHFWDDSKNAWGYTSKWTNYYSIVLTGAAFYHRYYNYLYTNWLSLLLLKTVQQSSNCEDILMNLLVSHVTRKPPIKVTQRKGYKDRETGRSPWNDPDHFIQRQSCLNTFAAVFGYMPLIRSNLRMDPMLYRDPVSNLRKKYRQIELVGS

SEQ ID NO: 21436 - DNA, 6571 bp, DROSOPHILA
cttagtttaatgtgctacatttacgcatgcaaattagttgttaaatgtgcttttaaaatttaatcgatatggctgggtgccacctacttacatctcgggcacgcacgcagccatgtgatccgtacttcctgtttaccattactttgttttccagctcactttcacttggtccctatacgatccgcttcagcatccgctctagttctgacgcgattcgattgagtcattcaggatctaatgcgaattgctgggttctaaaactgaacgagatcttcgactgttgttacacctagaaaaatggaacgtatcataaacgtaaggtgcttttattgtctaaaacattcttaataattttaacctacttctttaaaataattctagtggttaaaaacatttccctaaaacaacttacagagtaagaatgtcatatattttcattattttgctctgtgcacacacggcgtatgcttaacatttggcatggactagcttcgctttgtttggatttgttttggttttttctgtatgacctgttgaggcttttcaaatgactcccgttcgactgactgaatacttttggggtattctaccaccattccgattgacgcgcacgcgctaatggttaaccccgctttttagccaagctacaagagcaacaaaaacatggccaatgcgacgttctagcctgttgccgcacttgaacttggtcgaccaagttgagtcgagtcaggccccgcgattctcgacccactcagctggctggctagctggttagctggctggtgagaggaaaccccacggcatcggcatcttggctttaacccagctacagctgggcaactacgtcacagtcgcgtcatgcgaaaaccagtcatcgtcgtttggtgaagcaaacaatcgtcggcaatcggccgaaacgttcgttaacttggccgtcggaatcggaatctgggggtatttaagcggcggcaactcgacatgaagcatgcattgattcgctatcattcgccctaaagacttgtgcccagcctcaagtagtttgctgactctgtttgttgtaatacaatttagctgacaaggataatacacatcaccacatcagtttcgagttcgcgaaaggatccagctaaagttcaaccgatcaaccatctatatatcccgccgtgaattcgagagtcgagagttcttgtccagctcaattctagacgcaaacagttcagtaccaggagcgattttcttgaaaaacaaaaccacccagccagatcgccaataagcagtgaaagtgtcaacacatttcgagtgcttattgcaaatcaaacaagaaaagcgtaaccaagcacataagcaaatagtattctaagtgtttttgccaacactttgcgtaaatttttgttgttcaccccaaacgaaaacaacccaaacacacaaaaaaaaatgatggccgttgcagcagcccaaaagaaccgcgagatgttcgccatcaagaaatcctacagtattgaggtgagtcgaaaatccagcaaaacatacaatttccaaatcgaattgtaaaaaaaaagaagcaaatgagtgactagatttggtctacgtgactatctaaaggttttgtgttttcaaaaaaaaaccagttaaccggccagtagtcgagcccatttttgtgatcccgcatttctttttcgccaattcaatttgaccaaactcaatcctcggttggccattaagtcacacctctaagaacaggcggcccaaatcgaaaggcccaaatcgccaacggacacaacgggttgtgtgttaagttattatttaacaaataagtgaaagtggctgcctttgggccccatgcacttagcctggccgaaacagtcgcgcctcattgttgttgactcgtctctgtttatgtttatgctgcgtccgagcaaaacaaaaaatatgaaatcaatataaatgattcaatgagttggtcatctttcatcagccaaagcggtggcccaaaaaaaaaaactgaagaaaacaaacaaacaaaaaaaaaaaaaaacgagctgacagtgaaaactgcaagtgatggaaacctttttccccccatcaagaaaaagaaagaaaaaaaacctttaacgatcgccagttgcatttttttcccgccagaatcgcatggggattttcgatttctcagtcacatatcatttatcttcgcacctgcccgcttcgaagcggcgacatcgcattaaattaccattcgtggctttgaatcacaatcaatacagttccatgaatagccagctttattcaaagaaaaagatctgaagacggcgctttcacacaccattttatataatattttcaaaattgcgcaatactctgctcaaagtcaccacccaagcgtggagccgaagaaagccaccctggcttgaaggtcaaggcaatcgtctaatttccgctccacatcctgccagtgtcactaacacggacttcaatcttttcgctttcgtttccagaatggctatccatcccgccgtcgcagcctggtggatgatgcccgtttcgagaccctggtggtcaagcagaccaaacaaaccgtcctcgaggaggcccgcagcaaggcaaatggtaagtggatagggtccaacaagtgggtcactaaaatagctccaaagagggtttctatttgggatcaaaagggaaattttgcagctagggctttacttgttgattaaaaacttaaaaagttgcaatttttatttcattttattcgttttgacatagatttgcgtttttttcttattcattttaaccctttatttattatttgccttcgtttttatttttatgattttaaagacgattccctggaagattgcattgtgcaggctcaggagcacattccctccgagcaagatgtggagctccaggacgagcatgccaatctggagaacctgcccttggaggaatatgttccaggttaatatccatttccatttcaattcccatgccagttactcctctttctgagcctattatctttgatttgattttgattatgattttcatgggctttattattatttttatttcattcgcttttagttgaggaggatgttgagtttgagagcgttgaacaggagcagtcggagtcgcagtcgcaggagccagaaggcaaccaacagccgaccaagaacggtgagcagggggttctagaatccagcagccaaccataagtagtacttaacttctgagaggggcttttgaaaagcgtgcgacattgatttaagtgcttaatatgataaagtgccagggcagaggaaaagcactcagccacacggacaattgtgagtgggcgcgctcgctcgctctctctctctctctctctctctctgtggaaatgtcgcatttccctttttcatttgttacgctcgacttaatacaagtacgaaatgcgtttgcctggcaaccgtctcactgccactgccacgtagctcgcttatcgtttacgtgaccctaagccttggaagattgcatccttaaccatcacattatccccgcttttttttggcccttttgcagattacggtctcaccgaggacgagattttgttggccaatgccgcctccgaatcctcggatgccgaggctgccatgcagagtgccgctttggtggtccgcctcaaggagggcatctcctccttgggtcgcatcctcaaggccatcgaaaccttccacggcaccgtccagcatgtggagtcccgtcagtcgcgcgtggagggcgtggaccacgatgtcctcatcaagttggacatgacccgtggcaatctgctgcagctgatccgctccctcaggcagtcgggctccttcagcagcatgaatctgatggccgacaataacttgaatgtcaaggctccgtggttccccaagcacgcctccgaattggataactgcaaccatctgatgaccaagtacgagcccgatttggacatgaaccaccccggattcgccgacaaggtataccgccagcgtcgcaaggaaattgccgagatcgcattcgcctacaagtacggagacccgatcccattcatcgactactccgatgtggaggtcaagacctggcgctcggtgttcaagaccgttcaggatctggctcccaagcacgcctgtgccgagtaccgggccgccttccagaagctccaggatgagcagatcttcgtggagacccgtctgccccagttgcaggagatgtccgactttctgcgcaagaacaccggattctctctccgtcctgccgccggtcttttgactgcccgggacttccttgcctccttggccttccgcatcttccagagcacccagtatgtgcgccacgttaactcaccataccacacccccgagccgtaagtatctatcatcatattttactagggggttaaaatcacttcaaaaaggggagaaaaaggctctttgtcctagcctaattgcatttgcctgcctgcctgccgcctgcctctgtgtgtgtgtgggtggttgggtttccttttccgcttttcccaagcaacttttgtcgcctggaacacaggcaaattggctacaggaactgcggcaggctgcccagctcatttaaccagactaattgccttatgccagcacattttccacacttttaacaagcattattctatgccattacagcgactccattcacgagctgctgggtcacatgcccctgctggccgatcccagcttcgcccagttctcgcaggagattggactggcctcgctgggtgcctccgacgaagaaatcgagaagctgtccacggtgagttgattttctaattgagttgcaatgtaacgaccttagactcaagtgcagctatgacgcagctagttttttttcgcaaccaagatcattgtttagtcactgtcaaagtcgaagaggaaaagtgaacttcaatgccagaataatttttttctttttattcatatagtttacagatacaatttaatgcatttcaaaacacttaattgtgattttaaataagtttttaagttcagaaaaccttgatcttataagtcatacaacttcctgcattatctgcctttgcttttattttccttcctatttactcattggttccttaccatttcatttctacaggtatactggttcactgttgagttcggtctctgcaaggaacatggtcagatcaaggcctacggtgctggactcctgagctcctacggtgagctgctccatgccatcagcgacaagtgcgagcaccgcgccttcgagcccgcatccaccgccgtgcagccctaccaggatcaggagtaccagcccatctactatgtggccgagagcttcgaggatgccaaggacaagttccgtcgctgggtgagcaccatgtcgcgtccattcgaggtgcgtttcaacccgcacaccgagcgcgtcgaggtgctggactccgtcgacaagctggagactctggtgcaccagatgaacacggagattttgcatctgaccaacgccatctccaagttgcgacgcccgttctaagtggatgggggggagatatatgtatgatatatagaagcacccaaaaacatcgcccaaaaaaacaccagccacccccaccacccaaacatacacatacaggtgcaacggtctcatttatacaaattaattttaaattgacataccgcacaatccctcgtacacgtaatccttaaaccaaaattaaggcatcgcgcattattttttattttttgtttattgttttttgtttaatttttatttaattgtcatcgaaaagttgtaattgtcgaatcgcgcacatggtaaaaaacacaaaaatcaagcatatttatttgttgatcacccgatacaccacccaacctgcatatttatcaccgcaactattattggaccaaaaaatctttagacgtttaagtgatgtgaaaacaaagccaagccaagccaagcaaagcaaagcgaattaagtgaagtgaaaagctgggaaagcaaagttcagatacatccgcacttagtaggcaaagtaccacacaaaaaccgattgtatactcagacaaaaattgtttttgtattattattatcttcattttgcctctcacaatatttacctagactatatagacacgcgatatagtattcccggtataggaagcttcatttagagagagtatttctaaacaaaaatgatatagatacaacaatcgagcaaggaacaaatggaaaacaaacaaaaaaaaaaacggaaaagataaaaaatgaaatggaaaacaaaacagaattttcttacattgtacaataactgtaaacgacaatattactattgtgtactattattattattatctattattatacttatgactattacgtattgtattgtaggtatgtagagtttaaacattattattttatttaagttttgtgtattaataaaattaaaaatgcaattgaaaaataattactctttggttttttcatttgattatcttctttggcaattcgaaactctaaagtctgaatctgtttagggaacattttatgacatcaaaatggaata

SEQ ID NO: 21437 - DNA, 2207 bp, DROSOPHILA
atcattcgccctaaagacttgtgcccagcctcaagtagtttgctgactctgtttgttgtaatacaatttagctgacaaggataatacacatcaccacatcagtttcgagttcgcgaaaggatccagctaaagttcaaccgatcaaccatctatatatcccgccgtgaattcgagagtcgagagttcttgtccagctcaattctagacgcaaacagttcagtaccaggagcgattttcttgaaaaacaaaaccacccagccagatcgccaataagcagtgaaagtgtcaacacatttcgagtgcttattgcaaatcaaacaagaaaagcgtaaccaagcacataagcaaatagtattctaagtgtttttgccaacactttgcgtaaatttttgttgttcaccccaaacgaaaacaacccaaacacacaaaaaaaaatgatggccgttgcagcagcccaaaagaaccgcgagatgttcgccatcaagaaatcctacagtattgagaatggctatccatcccgccgtcgcagcctggtggatgatgcccgtttcgagaccctggtggtcaagcagaccaaacaaaccgtcctcgaggaggcccgcagcaaggcaaatgacgattccctggaagattgcattgtgcaggctcaggagcacattccctccgagcaagatgtggagctccaggacgagcatgccaatctggagaacctgcccttggaggaatatgttccagttgaggaggatgttgagtttgagagcgttgaacaggagcagtcggagtcgcagtcgcaggagccagaaggcaaccaacagccgaccaagaacgattacggtctcaccgaggacgagattttgttggccaatgccgcctccgaatcctcggatgccgaggctgccatgcagagtgccgctttggtggtccgcctcaaggagggcatctcctccttgggtcgcatcctcaaggccatcgaaaccttccacggcaccgtccagcatgtggagtcccgtcagtcgcgcgtggagggcgtggaccacgatgtcctcatcaagttggacatgacccgtggcaatctgctgcagctgatccgctccctcaggcagtcgggctccttcagcagcatgaatctgatggccgacaataacttgaatgtcaaggctccgtggttccccaagcacgcctccgaattggataactgcaaccatctgatgaccaagtacgagcccgatttggacatgaaccaccccggattcgccgacaaggtataccgccagcgtcgcaaggaaattgccgagatcgcattcgcctacaagtacggagacccgatcccattcatcgactactccgatgtggaggtcaagacctggcgctcggtgttcaagaccgttcaggatctggctcccaagcacgcctgtgccgagtaccgggccgccttccagaagctccaggatgagcagatcttcgtggagacccgtctgccccagttgcaggagatgtccgactttctgcgcaagaacaccggattctctctccgtcctgccgccggtcttttgactgcccgggacttccttgcctccttggccttccgcatcttccagagcacccagtatgtgcgccacgttaactcaccataccacacccccgagcccgactccattcacgagctgctgggtcacatgcccctgctggccgatcccagcttcgcccagttctcgcaggagattggactggcctcgctgggtgcctccgacgaagaaatcgagaagctgtccacggtatactggttcactgttgagttcggtctctgcaaggaacatggtcagatcaaggcctacggtgctggactcctgagctcctacggtgagctgctccatgccatcagcgacaagtgcgagcaccgcgccttcgagcccgcatccaccgccgtgcagccctaccaggatcaggagtaccagcccatctactatgtggccgagagcttcgaggatgccaaggacaagttccgtcgctgggtgagcaccatgtcgcgtccattcgaggtgcgtttcaacccgcacaccgagcgcgtcgaggtgctggactccgtcgacaagctggagactctggtgcaccagatgaacacggagattttgcatctgaccaacgccatctccaagttgcgacgcccgttctaagtggatgggggggagatatatgtatgatatata

SEQ ID NO: 21438 - protein, 579 aa, DROSOPHILA
MMAVAAAQKNREMFAIKKSYSIENGYPSRRRSLVDDARFETLVVKQTKQTVLEEARSKANDDSLEDCIVQAQEHIPSEQDVELQDEHANLENLPLEEYVPVEEDVEFESVEQEQSESQSQEPEGNQQPTKNDYGLTEDEILLANAASESSDAEAAMQSAALVVRLKEGISSLGRILKAIETFHGTVQHVESRQSRVEGVDHDVLIKLDMTRGNLLQLIRSLRQSGSFSSMNLMADNNLNVKAPWFPKHASELDNCNHLMTKYEPDLDMNHPGFADKVYRQRRKEIAEIAFAYKYGDPIPFIDYSDVEVKTWRSVFKTVQDLAPKHACAEYRAAFQKLQDEQIFVETRLPQLQEMSDFLRKNTGFSLRPAAGLLTARDFLASLAFRIFQSTQYVRHVNSPYHTPEPDSIHELLGHMPLLADPSFAQFSQEIGLASLGASDEEIEKLSTVYWFTVEFGLCKEHGQIKAYGAGLLSSYGELLHAISDKCEHRAFEPASTAVQPYQDQEYQPIYYVAESFEDAKDKFRRWVSTMSRPFEVRFNPHTERVEVLDSVDKLETLVHQMNTEILHLTNAISKLRRPF

SEQ ID NO: 21439 - DNA, 6901 bp, DROSOPHILA
tccaccaaccaccaaccaccaccacccaccaggaatgttatgtactggtgctactcccagtcgtatttcataattttggacaagtcactgggccataattgacccgccgctgatcgataagctcgagtgacacattgcgcattcgaactgtgggccaaatggcacggaattgatgatatgtgggcgggcgttcattgtggtcgcttttcatgtgtcgcaatctctattaagggaactacattatgcggccaacgaaaatcgaacaaatcataatgaaaatgtgtggccaacgggtggaagaatgtaatgatgccgaagggaaatgttcgttaggcaatgttcaaacatatgcatagatgggttatattccaacgttttcaaatcttacaaactattttctaaagtttactccatttctttttctagtaaaatttctaattctgtagcacttagcgcgttcattaaccttgggcaactcaatgaagatcttattgaagattggaatgcatcgctgggattccgcctaaaggtacagtgcagcttctttaaaaagaacactgtaagtttaatgctagaacttaacaaaaacatgtgtttcttacaaatttctttcattttatattaaaacacgattttcaagatttttaaagattttccagagaagtaaaacaaaatgtaaagaactcgtttttgggaccagttggtgtgtttgttagttgttcgatttctatttagagttccagcggcacaaacagctgtacataggaaagcacaacaactcttacatatgcgaatgggaaagcgaatatggtggaaggcgaaacaacaataatactaaagccaaaaggtgagagcggaaaaaatagagagagcagcgccgcattcgtgttgtatttggttttttatgaccgccgccgccgacgacgactaattttgtcgatgatagccgttcgtttcgagtcaaagtttcagtcaatttttagtcgtcaaagcaggcggacgtccaagcaaaaaaaattcagaatcaaaaatattgacagtgacttgagaggattacgtacttaacttagcaactcgcacctcgcaaaaagaaaagaaaacacattgcaaaaatgtcagcacgccgcgtcacattgaacacacgcgtttcgcgcgcctccacctccacgccggtgggcggggcatccacctcgtcaagggtgggcgccacctcacccacctcgcccacgcgcaccagccggcagcaggagaaggaggaactgcagcatttgaacgatcgcctggcctgctacatcgatcgcatgcgcaacctggagaacgagaacagccggctcacccaggaactgaatctcgcccaggataccgtcaacagggagacctctaatctgaaggcggtctatgagaaggagctggccgccgctcgcaagctgctcgatgagaccgccaaagagaaggccaagcttgagatcgatatcaagcgtctgtgggaggagaacgacgacttgaagcccaggtaaagctccaagacggcgggttcaggtttgggctcggaattggtaacagcgtattatcagccagtgatgtcatatgtacatatgtacccatgccgggccactggagcgcgagacacaggcagaaaatgggggcaactttgggagccttgtcaagaaaatgtggaatcaataatgcacagcacgaaaagcagcgaaatttcttcgatttgtaaagtaaaagtacagtcagtcgagatttctagaaatgcactactttttatcaaattgtttttttttttttacttttttgttgtattttgtattgaaataagcgaattttatatttatttcttaggtacagttgacctagaagttcaattccagctatgtagttatgtagcgaaaacaataacaaattgttttatttataaaggcaatatatttaattttcatatttcatgctattcgtaagaagaaaagagttttagtaagatacaaacttcagtttccatggttgttttttttttatatgtagggagtgacagagacagacagagaacggggcagactgagagcgagcgaggccgatgatgtcatgccaaaagcacattttgaaagccaagcacatgggaaactctctcgactctttcgctgttgtttattttttgcatttacacttccagaattctctaggcatttttatgcaaatgtttagttctcagctaatgtgtgagtagtaaaccaaaagaaacccaatgaaaatcaaaaaggaagaatcgaaataccgccgtaaatctcaatgaaggttacaagactatgatgtcatatggcactcagttacagatccatttgtaataccagtttctggtgggaagtcaacaaaagttgggttgcttagcttttccacttgcgagatttccgtttcgcgtcgtttgcgttatcatatttatttttggtatttactgcgcgatgaggcccaaagctttttcaattcataatagccacaatttgttgtttgtgcgttttgcaatgcgttaacgaagttaagagtttggctaaaaggcgggtgcctaaatgttgggtaaacttgatttttcggctacttaaggtgtggcttatacgttgagcaacggaccggaataaccaaggaaattgtttatgatgattacgattagatacgataagattgcagcagaattatggaacttgtgataaaagatttatcttttgttgagtgtccatattgcttaaattattttcatttgtgaatgctggctgtgcttaattattttaaatttttttttgaagaatttagaaagccaaatatattttcatatttattctttggtgacaatagcatacatatgtacaagcgaattaggtcagcggaaggaattggggaggaaaaatggaactttaacacgctcacacaaaacgcacaaaaaagggggaaatttatgaaaatctagaacgcaaacaaaacaaccttgaatctattttgtttttatatttccccatttttacacaacttttcttgattagctacgaaaactgtttacattttctcgttgcaacagcaaaaaccgaaagaaaatcgataaaacagaatagaagattttcaatccatgaaaataaactttcaaaaatggtcaacacaatcgccgtaaaaggcgccaaactatatatataattttaattacgttttcattgaacgcatgacatgcaaagtcaattatttcatagttgaaattattggatttgttatagagaataatttaaaacgtgccgaccacgcgagtcgccgattgacaaccaaaattgatatccgaaaatatgcagggattatttgtggaattttcgtagctattttttatagcgagtttgtttttgcctaaatagaatttcaaatacaaaaaataaaaggcgctcataaatcacagggggtggtggggtttcgcaggggggacggggtgaactggtcagaaatagccgggctactttatgctaatggcatgtgacgacttctcccaaggcaaacaaaaacctcgaaatgtttgagtatttgattcttctatggaggaggatcgatgaacgagtttccaagcgactatagcatttaaataaatgaaatgaataatacataagcgatataaagagagcggtttagctttcgcaaacaaatgtgagtcgcaatgtgactcagttataattatatagataagtgacgtcattcaatgagcacatgtagataaaagcaaaaaaaacaattgctcctatgaaccgcctaaatttcgataagggattactcaggcaaataggctgattaattattaaattaaaaagttctttgttataaaagattattaatttttaaaccaaatccattttaaatttaagactcgacaaaaagacgaaggaggctaccgtggcagagaacaatgcccgcctgtatgagaaccgctacaacgaggtgaatggcaagtacaaccaatcgttggccgatcgcaagaagttcgaggatcaggccaaggagctcgctctggagaacgaacgcctgcgccgccaactggatgatcttcgcaagcagctggaggcggagacgctggcccgcgtcgatctggagaaccagaaccagagcctgcgcgaggagctggccttcaaggatcaggtgcacacccaggagctcaccgagacccgatcccgtcgccagatcgagatcagcgagatcgatggccgactgtcgcgtcaatacgaggccaagctgcagcaatcgctccaggaactgcgtgatcagtacgagggtcaaatgcgcatcaatcgcgaggagatcgagctgctgtacgacaatgagatccagaacctcaaggctgctgccaatagggctgcccagggatccgctcttgccaccgaggaagtccgtctcatgcgcaccaagatcgatggcttgaacgccaagctacagaatctggaggacaccaatgctggcttgaatgtgagtactgcaattgccaaactaaattccccgtgtgattttaatgttgacattttctcatttaccataggctcgcattcgggagctggagaacctcttggacacggagcgccagcgccacaaccagtacatcgcctccttggaagccgaactacagcgtatgcgcgacgagatggctcaccagctgcaggagtaccagggtctgatggacatcaaggtgtcgttggatctcgaaattgccgcttacgacaaactgctgtgcggtgaggagcgtcgcctgaacatcgagtcgcccggacgcccgactaccgactccggtatctccagcaatggcagccacttgaccgccagtgccagttcccgatccggcagggtcacgcccagtggccgtcgctcggctacacctggcatctctggatccagcgccgtgaagcgtcgccgcaccgtgatcgatgagagcgaggatcgcactctgtccgagtactcggtgaatgccgccgccaagggagatctggagatcatcgaggcggacgttgagggacgcttcatcaagctgcacaacaagggaaccgaggagatcaatctgactggctggcagctaacccgcattgccggcgacgaggaactggccttcaagttctcgcgcggatcgaaggtactcggcggtgctagtgtaaccatttggtccgtcgatgctggtaccgcacatgatccacccaacaatctggtgatgaagaagaagtggccggtggccaactcgatgcgatcggtgctggccaatgccgacaaagaggtgagagtcttgtccatatacaacacatgcggcacttgcgacatctgccgccactgcagacacctcgaattcgtgctcgaccagtacgatatgccatagacctttgcatatttcgactataatttacgttatatcttttgcctttcaggatgttgccagctacgaccgtgtccgtgctaacgtttccagccacacctcgcggcatcgcagcagtggcacgcccagtacgggctttaccctcggttccggagctggctccactggcgtgaggagcctcttctccctgctcttctaggcgggagcttcaacttcgaatcggactggcttggcttggatcctgaggcccagccaaacaaaacccaactcaccgcagagactcacagactccgagctgcacattcaaaccacacacagatctgttctgcatatcaagcttattgtgaaactatgtacaacaatcaaaacttgttcaactcttaatgttaaatgtttaagtgaccttagtacatgtctttgactctatgcgtctcctatgtttaagtaagttttttcacgctctacaccctactctcactctctctctctgtaatttatgacgagaacatgcattttggtaaaaatacaaaaataaacaaacaaataaatgttacaagaaagttggctggaaaatcaattaatgagatttagccgtgcggtcgcctgcgttgatatcttttttgcgaggaagccaaatcggcttaggccagtggaaaacttcttgagatgctgtcgcggcattttgcactatctgggatccaggaccatgggccaggccataatggacaggtaagtgggggaaattaactacaagaagtcaggtggacaggtgcagctgggagcaaaactgtgggctaaaaccgaacgaggtcaacgaaaaagtttcgcaactttacaacttgaaaataaattaggttggatcactgggaaaggtcgagcaaaccgaagcaaaagtttttaatggagcaaatatacagcttcagggcagttgtagaaatatactatttaacaattctagggctgccattcaaactaataaacgactcgtttcggatacaaaaataatgcttagaaatacatatgtgcaataaaagccagttgtactagttcgtttctttctaatctccaactagaatacaggaaaaacctaggcgtcccactgtttaatctgcatcctttggcttactccaaaggaattagcattgccaggacgaagaagaagatcccttcacttggcgccgccttagccaaattgcgttatctattgcccaggcatttctcgcagtgcatgagcagccactaaggcaacttagcggcgcttgagtgagtgcacgattcaatggaatgaatgcgagagaaaggcggcggagaaaggtgaaagcggctgagacggctgcgaagactgagagggctcagaagactgagggggcgggcagacagttgacttcaaagtagttttccttggcaaagtttttttcctccttggcgcacgtttgcatgcgcataataggattagtcaaagtaataagttgtttttcttcctccacttttagctgctgatgctacctagattcctgctgctcacag

SEQ ID NO: 21440 - DNA, 2306 bp, DROSOPHILA
cgtccaagcaaaaaaaattcagaatcaaaaatattgacagtgacttgagaggattacgtacttaacttagcaactcgcacctcgcaaaaagaaaagaaaacacattgcaaaaatgtcagcacgccgcgtcacattgaacacacgcgtttcgcgcgcctccacctccacgccggtgggcggggcatccacctcgtcaagggtgggcgccacctcacccacctcgcccacgcgcaccagccggcagcaggagaaggaggaactgcagcatttgaacgatcgcctggcctgctacatcgatcgcatgcgcaacctggagaacgagaacagccggctcacccaggaactgaatctcgcccaggataccgtcaacagggagacctctaatctgaaggcggtctatgagaaggagctggccgccgctcgcaagctgctcgatgagaccgccaaagagaaggccaagcttgagatcgatatcaagcgtctgtgggaggagaacgacgacttgaagcccagactcgacaaaaagacgaaggaggctaccgtggcagagaacaatgcccgcctgtatgagaaccgctacaacgaggtgaatggcaagtacaaccaatcgttggccgatcgcaagaagttcgaggatcaggccaaggagctcgctctggagaacgaacgcctgcgccgccaactggatgatcttcgcaagcagctggaggcggagacgctggcccgcgtcgatctggagaaccagaaccagagcctgcgcgaggagctggccttcaaggatcaggtgcacacccaggagctcaccgagacccgatcccgtcgccagatcgagatcagcgagatcgatggccgactgtcgcgtcaatacgaggccaagctgcagcaatcgctccaggaactgcgtgatcagtacgagggtcaaatgcgcatcaatcgcgaggagatcgagctgctgtacgacaatgagatccagaacctcaaggctgctgccaatagggctgcccagggatccgctcttgccaccgaggaagtccgtctcatgcgcaccaagatcgatggcttgaacgccaagctacagaatctggaggacaccaatgctggcttgaatgctcgcattcgggagctggagaacctcttggacacggagcgccagcgccacaaccagtacatcgcctccttggaagccgaactacagcgtatgcgcgacgagatggctcaccagctgcaggagtaccagggtctgatggacatcaaggtgtcgttggatctcgaaattgccgcttacgacaaactgctgtgcggtgaggagcgtcgcctgaacatcgagtcgcccggacgcccgactaccgactccggtatctccagcaatggcagccacttgaccgccagtgccagttcccgatccggcagggtcacgcccagtggccgtcgctcggctacacctggcatctctggatccagcgccgtgaagcgtcgccgcaccgtgatcgatgagagcgaggatcgcactctgtccgagtactcggtgaatgccgccgccaagggagatctggagatcatcgaggcggacgttgagggacgcttcatcaagctgcacaacaagggaaccgaggagatcaatctgactggctggcagctaacccgcattgccggcgacgaggaactggccttcaagttctcgcgcggatcgaaggtactcggcggtgctagtgtaaccatttggtccgtcgatgctggtaccgcacatgatccacccaacaatctggtgatgaagaagaagtggccggtggccaactcgatgcgatcggtgctggccaatgccgacaaagaggatgttgccagctacgaccgtgtccgtgctaacgtttccagccacacctcgcggcatcgcagcagtggcacgcccagtacgggctttaccctcggttccggagctggctccactggcgtgaggagcctcttctccctgctcttctaggcgggagcttcaacttcgaatcggactggcttggcttggatcctgaggcccagccaaacaaaacccaactcaccgcagagactcacagactccgagctgcacattcaaaccacacacagatctgttctgcatatcaagcttattgtgaaactatgtacaacaatcaaaacttgttcaactcttaatgttaaatgtttaagtgaccttagtacatgtctttgactctatgcgtctcctatgtttaagtaagttttttcacgctctacaccctactctcactctctctctctgtaatttatgacgagaacatgcattttggtaaaaatac

SEQ ID NO: 21441 - protein, 621 aa, DROSOPHILA
MSARRVTLNTRVSRASTSTPVGGASTSSRVGATSPTSPTRTSRQQEKEELQHLNDRLACYIDRMRNLENENSRLTQELNLAQDTVNRETSNLKAVYEKELAAARKLLDETAKEKAKLEIDIKRLWEENDDLKPRLDKKTKEATVAENNARLYENRYNEVNGKYNQSLADRKKFEDQAKELALENERLRRQLDDLRKQLEAETLARVDLENQNQSLREELAFKDQVHTQELTETRSRRQIEISEIDGRLSRQYEAKLQQSLQELRDQYEGQMRINREEIELLYDNEIQNLKAAANRAAQGSALATEEVRLMRTKIDGLNAKLQNLEDTNAGLNARIRELENLLDTERQRHNQYIASLEAELQRMRDEMAHQLQEYQGLMDIKVSLDLEIAAYDKLLCGEERRLNIESPGRPTTDSGISSNGSHLTASASSRSGRVTPSGRRSATPGISGSSAVKRRRTVIDESEDRTLSEYSVNAAAKGDLEIIEADVEGRFIKLHNKGTEEINLTGWQLTRIAGDEELAFKFSRGSKVLGGASVTIWSVDAGTAHDPPNNLVMKKKWPVANSMRSVLANADKEDVASYDRVRANVSSHTSRHRSSGTPSTGFTLGSGAGSTGVRSLFSLLF

SEQ ID NO: 21442 - DNA, 4637 bp, DROSOPHILA
ctttccttttccttttcttccacagtcccattgtcaatgttgaggaacagagctcactttaagtatcatcttgcaaattgcaattcagacggcgaaagagtgggcttcttgctcgacacatgcgttttaaggttttatcaagcaatttacttgtcaagggggtttaacgcactgtctagtggataaatgcattaagcatacagaacgggtcaataaaatggcaaaaaatgatcttaaaatgtaataaaaaacaacatctttttaaaaattcctacttcccctttgtttttttagcttaatagcatctaaattaaaaatgtaatatccaagatataccaaaagttctattttattgactgcatctgtttccacgtatcataatctcaagcaaacagtttgctgatgattaaagctatgtgccaatgaatgacagttaatttaaatttatgtctagggcaggcacaatatatatttcattaccgttttgctgttgtcgatgtgttcaattaccccgttattttagttatgttgctgctgtgcaacagtgcgtatgtgcgttatgaatgttatgaatgtggcctattgcctgtcccgccgactgtcccgctgtctgtcccgctttgtgtcttgtttatttttgacacccaattgtgacacgtatatatttatatttatatttgtaatagggagcttttcgaacatgttgtgcttgcccaccgattaccatcgatggatggcattaaattgcttgattgttttttgatatgcccacaattgggcagagcatcatcatgtgttatattcgaccgggtgcattaatagttttccagcctccgatatcttattctttttgtggttacagctgttgttgtttacacatcggtttgtgcgtgtgtgtgacttttgtggttttggtggctctataaatttcaatgtctttatatattttgttgtcttctctttttgtctcggtaaatgtaacttggtttcttttttctatgctttttttcagaacccatagagcctaacatgagcaactgagtaccaacgaaactaagagaaaatcgacgaggaagaacgaaatccccgaaaggtggctttattactgagattttatatagatagtttgtagtaaccgaaatcgagaaaatgggtttcattgcggagcgaaagccgcgtgtcaacaagacgttgatctcgctcaagtttgttgtgttcttcgtaataaccggtgagtactgcagcacttttaaaattttagaatttaattactaacaaatatttattttatcctacaggtcttacagctttgcatgttttgcatgccaccaagccactgttgctgggtctaaacttctcggaataccggaccattactattttggcgccattcgtctccattttgggtcctttgatcgctggtccctgggcagatcgattggcagccaagaaccccaatacttttggaaagactctgcgagtgctaactgccgtcttcttgctgatctcggccttcatatatgcctttctgtttgccgtgccggaagttacccgaaggggagagatacgtgagccgttggtcagctttggctgcgatgaaactggaggattcttgttccaggagcgctgtggctcgaacgccacttgcagtcggtgggatcagaaggagggcaaaatcaacctgacgcgttgcacctacagttgccagaatcccaagctctatgagcccctctatgtggcttggttggctgaggtacccacggtggctccttcaaccgagcagagttcggagtttgattacgaagatgagggcagtactgcggtaaccgaaagtttgcgcaccaggagggacgtggagagctcggatccggcagatagtgctggtgtggaggccattagtggtgaggttcctcttcaccggtccatcaggcaggtcaaaaaaccccccaccaaggtgtacgtccagcctcctcatgtctgtctaaccgaaagaaaccagaacggcgaggatgtggtgaagcactgccacgcctacactgaggacaccactagtgtggtgatggatgccctcatgggctcagcgatcagtcaggaggagcactacgatgactacgaaggatggtgccagtacccacttggttagtagataatttaaaaatatttttgtaattgttgtttttattttgtatatttgtatttgtatatttttacagagggtttccagtgccacattcccgaggagcaggtgaattacatgaaggacttcaagcactacatgcagaatgacagcaactgcaagcccatgatcgaatgccaagtggtgaatccctaccatgaacagagtgtgctttcggacagcgagtgtaccaatgtgagtgtaacttttattcaaatagtatgcatatttgataatatttttatttatccttagaccaccggtagtgtccaagataccctcgtgggctatacgactattcgcctgattggagacattttccccatggctgcactgactcttttgaacacggcaatcgtgatcgcagttcgtgagacctccgagggaagaggagaggtgtgccgccagtatgtttggggcgccattggctatgtagtgctcttctcgccgctggatctgttcttcttccagaacgaacccaaccatgatgctgcccttgttgctcttattatatttatcgtaagctttgttttgggtgctgtggtgctgctgtgtgccacacaaatgccactgagcccgccggagtggtggtggcacacaaagaccggaatgctggtggttcctatgtctgccatccgtcgctatactcctgagattttggtgctcacactggtgtccattctttttggcaccttctggagcagcattcatagctacctttggtggactttcactgatgtcgatgccgtctgctattctggcttgatcctcatcctggtccttttcttcaatgtggacaagtttattgagtactgtgggcactcgaatatcttcatcggtggcttggccatctttgtcattaggtttacggctttgagtgatgcccaaacaaagtggttaactgtcatcatggagaccatcgagccggctgtaattggtctgatttggattactattatcctatatatgcgtcatgccatgccaaggaaattgactgcaactggacaggccattgctgttttggccttctttggattaggtaagtgttgggcaagataatatgtaatatgtatatgtaataatattatgtatcattcaggcaaaggctttggtgctctgattggattggctcgcgatgagagggatccgaaactggagttctggtcctgcacctaccaatggctggccattgtggcctgcgttgtggctttgatctattttggaatctataatctgatcctggctccacggtgcaccgccaagccacagcactctgaggagttgatttctggatccgcatcacagaactttggtaataccggaaacggaaacggtgctggcaacggaaccggaaacggaaatggcgctggagcgtcactaaatggaaacggaaacgggagctactcgcctttaagggtttaccacaacgagagggggaagaagggacagtttagatactaagataatgtgggaagtccagagattaatggatgttttactctttgcatggatcactaatgctccgcctctctcaaatcgagtgcgaatgatattcttagtttttaaatgtgtacaccacgcctcgtcctcctccacctaccgccccccgcccgcttgagggcaacactgctaatagtttgtaatgcgtatttttgctaagtgtatacaccaggaggatgaaaagcaaaggagtggagacgattaaaacaaaaaaatgaacttttttataaatcgcatgtagaacttattttatttgttatttaatgccaactaagcgagtttataattttaattaaatcgcaacgcggatgatgacaaaggcaaaaaatatcacccaaccaaatcatcaactgcccgtatttaattgcaaacaatagccatggatagagcaaaagcaataacgacttccccaaacagcacgtcgttctctttacaacgttacaaaaatgaaggcatcaatttttaatgaaacatttgcgtgattttactaagcataatatatgatgcactatgagcatataaatgtaacaataaaacagaaaatgtaattatacaaaaatataattaatggtaattaaatgtttccaaattaagcataataactgccgaagaggtttttgttatgggtttaaacgggaagtggaaatgtcatgcggaaaatataatgagggtaagtgaggaagtaatttggcacataatccacgttataatcacatgaagaaatctacctaagttccattttcaccgtctatgatgcagcgccatctacatttggctttttctgcggggtaagttgaagttttcttagacaacgacctttgcaagggaacttagccgtttgtaaaagctgaataagaattgctatggagcttttatgtggaagcttatcttttatcgaaagctattgtctttaaaacccactttttgtttaattatttttgttattttcaaccgcgatttg

SEQ ID NO: 21443 - DNA, 2375 bp, DROSOPHILA
gctttttttcagaacccatagagcctaacatgagcaactgagtaccaacgaaactaagagaaaatcgacgaggaagaacgaaatccccgaaaggtggctttattactgagattttatatagatagtttgtagtaaccgaaatcgagaaaatgggtttcattgcggagcgaaagccgcgtgtcaacaagacgttgatctcgctcaagtttgttgtgttcttcgtaataaccggtcttacagctttgcatgttttgcatgccaccaagccactgttgctgggtctaaacttctcggaataccggaccattactattttggcgccattcgtctccattttgggtcctttgatcgctggtccctgggcagatcgattggcagccaagaaccccaatacttttggaaagactctgcgagtgctaactgccgtcttcttgctgatctcggccttcatatatgcctttctgtttgccgtgccggaagttacccgaaggggagagatacgtgagccgttggtcagctttggctgcgatgaaactggaggattcttgttccaggagcgctgtggctcgaacgccacttgcagtcggtgggatcagaaggagggcaaaatcaacctgacgcgttgcacctacagttgccagaatcccaagctctatgagcccctctatgtggcttggttggctgaggtacccacggtggctccttcaaccgagcagagttcggagtttgattacgaagatgagggcagtactgcggtaaccgaaagtttgcgcaccaggagggacgtggagagctcggatccggcagatagtgctggtgtggaggccattagtggtgaggttcctcttcaccggtccatcaggcaggtcaaaaaaccccccaccaaggtgtacgtccagcctcctcatgtctgtctaaccgaaagaaaccagaacggcgaggatgtggtgaagcactgccacgcctacactgaggacaccactagtgtggtgatggatgccctcatgggctcagcgatcagtcaggaggagcactacgatgactacgaaggatggtgccagtacccacttgagggtttccagtgccacattcccgaggagcaggtgaattacatgaaggacttcaagcactacatgcagaatgacagcaactgcaagcccatgatcgaatgccaagtggtgaatccctaccatgaacagagtgtgctttcggacagcgagtgtaccaataccaccggtagtgtccaagataccctcgtgggctatacgactattcgcctgattggagacattttccccatggctgcactgactcttttgaacacggcaatcgtgatcgcagttcgtgagacctccgagggaagaggagaggtgtgccgccagtatgtttggggcgccattggctatgtagtgctcttctcgccgctggatctgttcttcttccagaacgaacccaaccatgatgctgcccttgttgctcttattatatttatcgtaagctttgttttgggtgctgtggtgctgctgtgtgccacacaaatgccactgagcccgccggagtggtggtggcacacaaagaccggaatgctggtggttcctatgtctgccatccgtcgctatactcctgagattttggtgctcacactggtgtccattctttttggcaccttctggagcagcattcatagctacctttggtggactttcactgatgtcgatgccgtctgctattctggcttgatcctcatcctggtccttttcttcaatgtggacaagtttattgagtactgtgggcactcgaatatcttcatcggtggcttggccatctttgtcattaggtttacggctttgagtgatgcccaaacaaagtggttaactgtcatcatggagaccatcgagccggctgtaattggtctgatttggattactattatcctatatatgcgtcatgccatgccaaggaaattgactgcaactggacaggccattgctgttttggccttctttggattaggcaaaggctttggtgctctgattggattggctcgcgatgagagggatccgaaactggagttctggtcctgcacctaccaatggctggccattgtggcctgcgttgtggctttgatctattttggaatctataatctgatcctggctccacggtgcaccgccaagccacagcactctgaggagttgatttctggatccgcatcacagaactttggtaataccggaaacggaaacggtgctggcaacggaaccggaaacggaaatggcgctggagcgtcactaaatggaaacggaaacgggagctactcgcctttaagggtttaccacaacgagagggggaagaagggacagtttagatactaa

SEQ ID NO: 21444 - protein, 741 aa, DROSOPHILA
MGFIAERKPRVNKTLISLKFVVFFVITGLTALHVLHATKPLLLGLNFSEYRTITILAPFVSILGPLIAGPWADRLAAKNPNTFGKTLRVLTAVFLLISAFIYAFLFAVPEVTRRGEIREPLVSFGCDETGGFLFQERCGSNATCSRWDQKEGKINLTRCTYSCQNPKLYEPLYVAWLAEVPTVAPSTEQSSEFDYEDEGSTAVTESLRTRRDVESSDPADSAGVEAISGEVPLHRSIRQVKKPPTKVYVQPPHVCLTERNQNGEDVVKHCHAYTEDTTSVVMDALMGSAISQEEHYDDYEGWCQYPLEGFQCHIPEEQVNYMKDFKHYMQNDSNCKPMIECQVVNPYHEQSVLSDSECTNTTGSVQDTLVGYTTIRLIGDIFPMAALTLLNTAIVIAVRETSEGRGEVCRQYVWGAIGYVVLFSPLDLFFFQNEPNHDAALVALIIFIVSFVLGAVVLLCATQMPLSPPEWWWHTKTGMLVVPMSAIRRYTPEILVLTLVSILFGTFWSSIHSYLWWTFTDVDAVCYSGLILILVLFFNVDKFIEYCGHSNIFIGGLAIFVIRFTALSDAQTKWLTVIMETIEPAVIGLIWITIILYMRHAMPRKLTATGQAIAVLAFFGLGKGFGALIGLARDERDPKLEFWSCTYQWLAIVACVVALIYFGIYNLILAPRCTAKPQHSEELISGSASQNFGNTGNGNGAGNGTGNGNGAGASLNGNGNGSYSPLRVYHNERGKKGQFRY

SEQ ID NO: 21445 - DNA, 2115 bp, DROSOPHILA
gtagtccgtgtggttgtacataaacagatccgtgatgatgcgagtgttgtggtagagggtttgatccctcgtcaccagcaccaggcacatcaggcagagaaagtacgggccgtagatgaagagatcgtgggcgatcatcttgtactgatcgttgagcttatagttcctgtagcgcgaggtcagcatcaggttggcgcgcttgttaatcaggcgctgcttgaggaagtccctgcgttcctccttctcatccatctcatccttgtcacatcgcggcggtatatagatccgcggtggccacagggcccggtcgatggacaggataacgaacttgatcgggtcaccgatgaggaactggaagatcagcactatcacaatgctcaccagcatcgtcttgaacttgacgtcctcgtgctggaaaccggcgaacacagcgatgcatatcatgcagcctattataatgcccaccgtgatcgcgaacatggcccaatgcgtttttttcactttcatttcgagctgtttttttcgcgtattttagatattttcgatattttccgctttttagccgattcactgcctttcaaatgctctcccagcaattcgagttcagaactacgagtggcgtgagctaaaaggccagctagacgcgaaacaaaattagaataacttttggaatgtaacatttttcaaatgtgtaacgtattttggtctgcataagggttaattcgaatttttcgagacacgacattcggttaggcggctcattctcgcgcacttcgcagccagcgccacatttgctagccaatgcgcgctggtcacactggcgaaagtaaaataaaaaaaaattagttttatttaatttcttgcgaacgagccacgaaaatgacgaacgcctagcgcgattgcccaaaacgacccactgaatcaaccgcaccgcaccgcagcgaaccgcatcgaaacgaacgaacggaggaggagcaggtggccgccagttagagcagccatgacgatgaccgcctcggataaatacacgtaccagcggaccgttctctgcctggcccgcgttctggcgggcatccagcccactccctgggataaggtacatgtccacctggccacccactccaccagccacagcgccagcccccctggcaatcgacttttcgcactgaccttgagcggcggccataaaacagacatgcgtgggcgctcagggggcggcggtaaggcacacttgacgcactgccagatccccgtcttgtccctctgcagcgccgtgtcgcaaaggtagctcatgatcggctccagactcggctcatccgcattctccacgcgcagcatctccagccagtaaacgcttaacaggtacgtgcactgcgcaaacgagagcttattgatcgccgtcgccacgttgtccgaggagtgctcgagaagcaccagaatctggctacgcagctcgttcaccgaatcgctcttaatggccagcgtatagttgagctcccgcatatccgatttgtgggctgtctgcgagatgagtagcggcgatttggccgctatctgctgcacaccctggtaccagtccgctggccaaaggcgggcgttggtgaagcccattacgacacagtaggcccagaagtccttgaatagcttgtgcagtcgctggcggggattcttgatcggcggcaggcggcgcaccagtaccgcaatcaccggtatcagcatgcccagattgccagcacgcgagctggccttctgggcgcccggtgtattgtcgtagctgcgctcgccatccaaaccgatctggacgaacagttccagcagcttgcccagcagctccagcatctcggcatccccttgaatgttggccgcaatattgcccaatgcattgaccaccgcatccgagacgtgatggaattgcttcctgtgctccggatccgaggtgtacgccaacgatgccgattgcacggtgacgcgcgagaacatcttcatgatctcatcgaagacatgcgtttcacactgcgagattatcatgcagccaagctgatccacaatcagagcgttctgctccgatggcaccttgcagaagcgctggataaagaactgcaggatattctgtgt

SEQ ID NO: 21446 - DNA, 6348 bp, DROSOPHILA
atgacgatgaccgcctcggataaatacacgtaccagcggaccgttctctgcctggcccgcgttctggcgggcatccagcccactccctgggataaggtacatgtccacctggccacccactccaccagccacagcgccagcccccctggcaatcgacttttcgcactgaccttgagcggcggccataaaacagacatgcgtgggcgctcagggggcggcggtaaggcagtgcagaccctgttccggtattgtccgcaggagaatgctgccggagtgttttgcctggacacgcgggcccaggatgccgtaattgcgctgggcatttattttctggagggcggctgccagcacgagggccagattgtgccctatctgctgcgtctggccaagtgtctgccgaaggcggtctggattgacgatgcccggagcaacaaagtggaacgcgttcgcattccgtcggcggaaaagttcagcttctgcttgaacaccctgctgtccgacatagcggccaagtgtccggattcgcgcgaggagatcatcctgaatcaggtggaaacgctgagcgcgctggccaacatagtcaagtcgagcagggacagcagctccgcaccgccgcccatcatcctgtgcaaggccacggtgccgctgctcttcggcttggcgcgatcgatgggtcgctatgccagcaacgatccaccgctgctgtgccgcatttttccgcccgagctgctgcccatccagaagggcggcggccgcgacggcaccggctcgagcagcagtgccagcggcacctgcggcggctccttcagcagcagcgaacgcctggcggccacgcatcacttccgacccatcataccgcgctccatgtccggcagtctggcgcaggcccagaacgcaagctacgacgatggaaggcagcggtgcgcgggcggcaagcccagcaagccatcgttgcacagctacttttcggtgccgtacgatccgcggacgcacttcttcacgcgctacggctccagtttcaaccaattcccgaacatgcgcgtctgcgaatcgcccacgaaaggcggcccacgaccactgtatcgtgtgcctccgtttcccatccagcatctacagaccatattcgcggtgtccaagaagctgctcaccaaagacaccctcgaacatctcgacgagcaggcaagcgatatattttcgctgcaccaaatcaagggctattgctacaagagcttctcggaaacgttgaacctggtcctggtgaccctgctcagggaactgctgcagcatcaggttgacctgcccacgccgttcaccaaggatgtgcaggagttcgtcaagcggctctttctcaacggccaaacggagctgcagaataaacagcaggatcaggaacgcgagcggcgcgaggagaacggcatcgcggtggtcaacaagtacaaggtcaatgtgatggccaatgcggcgtgtgtcgatctcctggtttgggccattcgcgacgaaacggaggcggacaagctgtgcggtcgactgtcgcagaaactgaacctggagctcagtcacaagatcgtgatggatcacatgccgctgctgatggtttgcctggagggactgggcaagctggcccacaaatttcccaacattgccggcacctcgatctcgtatctgcgcgacttccttgtggcgcccagtcccattctgggcaagcttcacgaccatgccatgcaatcgctggcccagcagaagaaggagaaggaactaacgcccttcaagatcgcggtccagcactcggactcgcggacggcggtcgtcatctacggggataatcaaaagccgcccggcagcggaaccggtcgcagtggtcatgccgcattcgagtcactgcgcgatgcggccattgagaatctatcgatcgccctgcgcgctgcccacaccctcgatcagttctgtgtgccagctctggtggccaacgtctccaatcgactcttacagccgaaagtctggcagatgataatctcgcagtgtgaaacgcatgtcttcgatgagatcatgaagatgttctcgcgcgtcaccgtgcaatcggcatcgttggcgtacacctcggatccggagcacaggaagcaattccatcacgtctcggatgcggtggtcaatgcattgggcaatattgcggccaacattcaaggggatgccgagatgctggagctgctgggcaagctgctggaactgttcgtccagatcggtttggatggcgagcgcagctacgacaatacaccgggcgcccagaaggccagctcgcgtgctggcaatctgggcatgctgataccggtgattgcggtactggtgcgccgcctgccgccgatcaagaatccccgccagcgactgcacaagctattcaaggacttctgggcctactgtgtcgtaatgggcttcaccaacgcccgcctttggccagcggactggtaccagggtgtgcagcagatagcggccaaatcgccgctactcatctcgcagacagcccacaaatcggatatgcgggagctcaactatacgctggccattaagagcgattcggtgaacgagctgcgtagccagattctggtgcttctcgagcactcctcggacaacgtggcgacggcgatcaataagctctcgtttgcgcagtgcacgtacctgttaagcgtttactggctggagatgctgcgcgtggagaatgcggatgagccgagtctggagccgatcatgagctacctttgcgacacggcgctgcagagggacaagacggggatctggcagtgcgtcaagtgcgttgccgaccaggtcttcgagaagttccgcaatgttctatacgcccacgatgagattcgcgaaaaggtgctggagtcgcaagccacgctgctgctggtctacttcaatcacatccacaaacccatccagatggtggccgatcagtacctctcctttctggtggatcgctttccccacttgctttggaatcgccgcgtgctgtggtgcatgctggacatcctccagctgctggcatactcactcagcctggatcccaacgaggagacgcccacgttgcgtgtagtctcgacgccctacacactgcagctgatggactcgctgccggcgcgagagctgcgcttgaaggacttcgccgatcgttgccagggcattgtgaatgaagccatgaaatgggcgccgcgatccacacgctcgcacctacaggagtatcccaatcagattcccacgcccgtgctggctcaccacagcggattggcgctggcattcgactcggtggtgagcagtagtgcccagcacacgggcaccatgagcaagcggccgagctgtgtcaactccgacacgcccagattcgtatcggttttgtgcctgagaagcaaatacgccggtgagatcagtggcttgctgtccgtacttagcgagaaggataaggccggcttggcggaccgactggtcagcgatgtgtgggaggcgtgtgccgagaagagcgacgcccgccatcgtggcgctctatggcgtgccaccgcctatctgatcatatgctcggagatcagcaggaaactgctgcatgcggtggccagttcgcagctggagctgttcaccgaatcggcgatggagaccgccgttgagtgctggcagtgggtgctgactgcgcgccaggatctggagctgtgcttcatccaggagatggtcagcgcctggcagacgacattcgagaagcgaatgggcttgtttgcgtgggaaacggaggtcacccatccactggccgcctacgaaggctgcaagctggtcagcaagcccatactgatcgcgccccatttgatttggctgcagctgctctccgaaatggtggacacagccaagtattgcaacagggacaaggtggagatgttctgcctcctgttgcaccgatgtcttcccgttctcaagagtagcaaacagaaccgtcaggtgtccaccgttggctgccgcttcaagctgctgcagtgcggtctgtcgctgctgcagggcaacaccattccgaagtcgctctccagaaatatcctccgcgagcggatatactccaacgcactggactacttttgcggaccaccaacgtgccccaatcagagcagggagcagctactggaggacataatgatattgctgaagttctggcagacgatgcgcagtgaaaagaagcatctggtgacgtcggaagtgggtgactatgacttgacaaatgcctccgttagctccacgcaaatgctggccgtgagaaataatccggaaacggcatccctgatcagcggcggtgggctagtcaacgattacacgcgctccatgagtgccagtggcaatgcggtgggcatgggcatgggtgtagcgggcggcggaagcagcagtggctggtacaacaccattccgcactccacatccacactgtcgaagcgatcgaatcgctccaagcggctgcagtatcagaaggattcctacgacaaggactacatgaagaagcgcaatctgatccttgagctgctggccgtcgagctcgagttcctcattacctggtacaatcccaatagtctgccggatcttatagtgccgggcgaggaacagatcacggaatggcgcaaccggccgtacaagtcgaccgtttggcgggactatgcgcgtctcgcctggtgctataacccggcactggctgtcttcctaccgcagcggatcaagaacgcggagatcattgatgaggaggtgtcgcggctggtctgctccgatcccatagcggtgtgccacattcccgaggcgctcaaatacctgtgcaccaccaagaacctgctgcaggagagcccggacctggtgtacatactctcgtggtcgccagtgacgcccatccaggccctggcctacttctcacggcagtatccatcgcatccgctaacagctcagtatgccgtaaagaccctctcctcgtatccggcggaatcggtgctgccgtacatcccgcaactggtccaagcccttcggcacgacaccatgggctatgtggtggagttcattaagaatatatcgcgacggtcgcagatagtggcacaccaattgatctggaacatgcagacgaacatgtacatggacgaggatcaacagcacaaggatcccaatctgtacgaggcactcgatcagctatcgcaaagtattatcgcatcgttctcgggcgctgccaagcggttctacgagcgggaattcgacttcttcggcaagataacggccgtatccggcgaaattcgctcgtttgccaagggcattgagcggaagaacgcatgcctggcggcgcttagcaggatcaaggtgcagggcggctgttatctgccctccaatccggaggccatggtcctcgatatcgactacagcagcggcacgccgatgcaaagtgcggccaaggcgccgtatttggcacgattccgtgtgtatcgttgcggcatcacggagctggagacgcgcgccatggaggtgtccaataatccgaactcccaggaggatgccaagatgacgctgggcgtggagtcgtggcaggcggccattttcaaggtgggcgacgatgtgcgccaggacatgctggcgctccaggtgatcaccatcttcaagaacatcttccagcaggtgggactcgatctgttcctgttcccctaccgcgttgtggccaccgctccaggctgcggcgtcatcgagtgcgtgccgaatgccaagtcgagggatcaactcggccgacagacggacagtggactctccgagtatttccagcatcagtacggcgacgagagctccaaggagttccaggcggcgcgcgccaactttgtcaagtccatggcagcctactcgttgatcggctatctgctccagattaaggatcgccacaatggtaacatcatgatcgacaaggatggccacatcatacacatagattttggctttatgttcgagtcgtcgccaggtggtaatatcggcttcgagccggacatgaagctgaccgacgaaatggtcatgatcatgggcggcaagatggactcgccggccttcaagtggttctgcgagctgtgcgtgcaggccttcctcgccgttcgtccgtatcaggatgcaattgtctcgctggtatccctgatgctggacactggactgccctgcttccgcggccagacgatcaatctgctgaagcagcgcttcgtggccaccaagaacaacaaggaggcggccgcccacatgctggctgtcatccgcaattcgtaccagaacttccgcacgcgtacctacgacatgatccagtactaccagaaccagataccctactaa

SEQ ID NO: 21447 - protein, 2113 aa, DROSOPHILA
MTASDKYTYQRTVLCLARVLAGIQPTPWDKVHVHLATHSTSHSASPPGNRLFALTLSGGHKTDMRGRSGGGGKAVQTLFRYCPQENAAGVFCLDTRAQDAVIALGIYFLEGGCQHEGQIVPYLLRLAKCLPKAVWIDDARSNKVERVRIPSAEKFSFCLNTLLSDIAAKCPDSREEIILNQVETLSALANIVKSSRDSSSAPPPIILCKATVPLLFGLARSMGRYASNDPPLLCRIFPPELLPIQKGGGRDGTGSSSSASGTCGGSFSSSERLAATHHFRPIIPRSMSGSLAQAQNASYDDGRQRCAGGKPSKPSLHSYFSVPYDPRTHFFTRYGSSFNQFPNMRVCESPTKGGPRPLYRVPPFPIQHLQTIFAVSKKLLTKDTLEHLDEQASDIFSLHQIKGYCYKSFSETLNLVLVTLLRELLQHQVDLPTPFTKDVQEFVKRLFLNGQTELQNKQQDQERERREENGIAVVNKYKVNVMANAACVDLLVWAIRDETEADKLCGRLSQKLNLELSHKIVMDHMPLLMVCLEGLGKLAHKFPNIAGTSISYLRDFLVAPSPILGKLHDHAMQSLAQQKKEKELTPFKIAVQHSDSRTAVVIYGDNQKPPGSGTGRSGHAAFESLRDAAIENLSIALRAAHTLDQFCVPALVANVSNRLLQPKVWQMIISQCETHVFDEIMKMFSRVTVQSASLAYTSDPEHRKQFHHVSDAVVNALGNIAANIQGDAEMLELLGKLLELFVQIGLDGERSYDNTPGAQKASSRAGNLGMLIPVIAVLVRRLPPIKNPRQRLHKLFKDFWAYCVVMGFTNARLWPADWYQGVQQIAAKSPLLISQTAHKSDMRELNYTLAIKSDSVNELRSQILVLLEHSSDNVATAINKLSFAQCTYLLSVYWLEMLRVENADEPSLEPIMSYLCDTALQRDKTGIWQCVKCVADQVFEKFRNVLYAHDEIREKVLESQATLLLVYFNHIHKPIQMVADQYLSFLVDRFPHLLWNRRVLWCMLDILQLLAYSLSLDPNEETPTLRVVSTPYTLQLMDSLPARELRLKDFADRCQGIVNEAMKWAPRSTRSHLQEYPNQIPTPVLAHHSGLALAFDSVVSSSAQHTGTMSKRPSCVNSDTPRFVSVLCLRSKYAGEISGLLSVLSEKDKAGLADRLVSDVWEACAEKSDARHRGALWRATAYLIICSEISRKLLHAVASSQLELFTESAMETAVECWQWVLTARQDLELCFIQEMVSAWQTTFEKRMGLFAWETEVTHPLAAYEGCKLVSKPILIAPHLIWLQLLSEMVDTAKYCNRDKVEMFCLLLHRCLPVLKSSKQNRQVSTVGCRFKLLQCGLSLLQGNTIPKSLSRNILRERIYSNALDYFCGPPTCPNQSREQLLEDIMILLKFWQTMRSEKKHLVTSEVGDYDLTNASVSSTQMLAVRNNPETASLISGGGLVNDYTRSMSASGNAVGMGMGVAGGGSSSGWYNTIPHSTSTLSKRSNRSKRLQYQKDSYDKDYMKKRNLILELLAVELEFLITWYNPNSLPDLIVPGEEQITEWRNRPYKSTVWRDYARLAWCYNPALAVFLPQRIKNAEIIDEEVSRLVCSDPIAVCHIPEALKYLCTTKNLLQESPDLVYILSWSPVTPIQALAYFSRQYPSHPLTAQYAVKTLSSYPAESVLPYIPQLVQALRHDTMGYVVEFIKNISRRSQIVAHQLIWNMQTNMYMDEDQQHKDPNLYEALDQLSQSIIASFSGAAKRFYEREFDFFGKITAVSGEIRSFAKGIERKNACLAALSRIKVQGGCYLPSNPEAMVLDIDYSSGTPMQSAAKAPYLARFRVYRCGITELETRAMEVSNNPNSQEDAKMTLGVESWQAAIFKVGDDVRQDMLALQVITIFKNIFQQVGLDLFLFPYRVVATAPGCGVIECVPNAKSRDQLGRQTDSGLSEYFQHQYGDESSKEFQAARANFVKSMAAYSLIGYLLQIKDRHNGNIMIDKDGHIIHIDFGFMFESSPGGNIGFEPDMKLTDEMVMIMGGKMDSPAFKWFCELCVQAFLAVRPYQDAIVSLVSLMLDTGLPCFRGQTINLLKQRFVATKNNKEAAAHMLAVIRNSYQNFRTRTYDMIQYYQNQIPY

SEQ ID NO: 21448 - DNA, 3312 bp, DROSOPHILA
ctagtgtcctcaatagatcctgccatttaactgtcaaattaaagtcggagcagtccttgctcaatttcgatatcgtcgttttgtctattattagcattctgggctgtcatgttatcgcaactgttgtgcaccaatgtcaattgcacaagtcaaaaactgcctcatagatgactttcgagatactttgccggcaattacgtagctgtttcattgttccaccatttcgaacaagcttcataatattttcacttttatggcaggcaacataaaagacgacagctttggcaatagcaacaacatcatcattatcaacaccatcaaagcccggaaaatttcaccttctgtgactccaccccccctcccaacgccgtgcctttcgtctccttttgtccccctcaattgtcgtaaaatcataggaaaaaagaaaggagccaacggaggcgaaaagtgtgagtgcgtaaatttctctctggactcggagtcgctcaagtgtccttccattctgtgtcataaaattaacgctttatatgaacgaaagcataaggcgctcgatttttatcaccaaggccaacaagatggccataaacgaatcaggaacatggaaacgcagaggaaaaaaataggcagctaagtatctacaaatgaaagtgtaattacaaaagatttatactgatttttaaataaacttatagctaaatctatatataaataaaaatgtatattttcccaattacaacccacttcgtactgttattttctggcagtgcataagcccatagcgaaccttatgagaacataaagagttaagagttgaattagaagcagaagaaactgggaccgaagtacgttgggtagtaagagaggtggtccaaagagtgcctaattatttacgtgcaatgaaagttatgaattggggaacaggtcaagtcggcgagggtaaaaatacccccgaacctccctatgcctttactgtctgtgtgaatggcttcagtctggtttcgtagccagccccttatacacattctcgtgttgtggctgtgaaatcgtttttcccaggtgatctgaaattttattagcatccattgttataaatttgaatcagtataaaagatcattcgccaaatacactcaaccatgctgacgacccagcagaccgaattcaagatgatggacaacggcaccgagacgctggccgattctccttcgagttccagcgaggatctgaaaacgctttcggatatggatattcgcaagcccgtaacggagattgttgatttgcgccttaagcatccgctagagaacacttggacactgtggtacttggagaatgatcgcagcaagaactgggaggacatgcagaacgagattactagctttgacatggtcgaggacttctggagtctctacaatcacattaagcagccatctgagattagagtgggcagcgattattctttgttcaagaagggcattcagtaagattggctagatttatatacatgattaccgatttcctattcattgcaggccaatgtgggaggatgatgcgaacaagttcggcggccgttgggtcatcaatatggggcgtggctccaaagcggagctcgacaagctttggttagatgtggtaagtagctattggagctttgtgtccatcgcctgtcatatcagttgcaactgcacaacctcttttctgcccactgacagctactcatactgattggcgaggcctttgaaaacaccgaggaagtctgcggcgccgttatcaacttgcgcgggaagagcaacaaaatttgtgagtattactgaaaaaaaaaagatgtgcatgtgcattaaaaaagctggttacaaatattatattttactaaaaacattacacatgttttgtttacttcgccaacctataaatattaagtggtatacacctaggttggctctgttttttttttttaaacatagtttacacattgtagttttgtagtgtactcagcttaagtagccagtggacaccaccatgacaactactaacccagcgcctttactccgcaagcgatttggaccgccaacgggcacaacgagctggccgtcatggagattggactcaagttacgcgacctgctcgtcctgccgccccaccaactgcagtaccagctgcacaaggacactatgtgcaagcagggatcggtgatcaaagcggtttattgcgtgtaagccgtctccgttttggatgccacccaccactccatccaccaaccacccacatttccatggccgcttatgcctctgaatgctgtttccagcgcgtgtatccgaaaaatataaaaaaaaaaatgtatcttgaaacagaactggttttatgaatttgaccatgttaaaaattgcaaagaaagatgtaaatacatagtgttgtgaatgcatatacgacgagccatcattaaattccccagtttttaagtcccaaggagctctttttatgccgctagttggaccctttatgctccacaaaatgttatgcaaacatatgccgcaccagagcgcaaataaaatggtttatatacacttgcagtttgtacttttggccgggccagctagaagtgcacagtgactgcaaaagataaacgtccacttggttcgcttggctggccgagcgaaaaacaaaagaccgaaaagggtcaacaatggccacggcggattgtccgttttagcgagtgccacagtacccggcgctgaatctctgggatctctggtatctggaactggcgtcgagggcttccaaaatggagacaattgaattttgatgaaaggccgaacgaaacgccgttgcctcgcgcagtattaaaattcatgctatgagcttcgagttcgagtttgaaaagagactcttaatttgcgtgtaaaaaatgttattttaataatttaaaaaaaaacctattaagtacgtttttaaagtatctttggtattctagtatctataaccattatcgaatgacaaagctgtaggttccctcacatgcggctggtaacgtttattcaaccctttgttcagcccctgtgacgtaacgttttagccaactcgggtcaccaggccattcaatcaacattgaaattccgatggcagcggcacgtgcagtagcaacttcattatgagccactttaagctgacaaaactcatctccatccgcatagcccgttgactgcattttatgggcccaggtggcggcggcttacatggggagctgttaaaccgaaaccgcatcaaaaccgcacacgtcccacatggcatccaggtgccttcacctcttgtttggccca

SEQ ID NO: 21449 - DNA, 925 bp, DROSOPHILA
gtagccagccccttatacacattctcgtgttgtggctgtgaaatcgtttttcccaggtgatctgaaattttattagcatccattgttataaatttgaatcagtataaaagatcattcgccaaatacactcaaccatgctgacgacccagcagaccgaattcaagatgatggacaacggcaccgagacgctggccgattctccttcgagttccagcgaggatctgaaaacgctttcggatatggatattcgcaagcccgtaacggagattgttgatttgcgccttaagcatccgctagagaacacttggacactgtggtacttggagaatgatcgcagcaagaactgggaggacatgcagaacgagattactagctttgacatggtcgaggacttctggagtctctacaatcacattaagcagccatctgagattagagtgggcagcgattattctttgttcaagaagggcattcagccaatgtgggaggatgatgcgaacaagttcggcggccgttgggtcatcaatatggggcgtggctccaaagcggagctcgacaagctttggttagatgtgctactcatactgattggcgaggcctttgaaaacaccgaggaagtctgcggcgccgttatcaacttgcgcgggaagagcaacaaaatttcgatttggaccgccaacgggcacaacgagctggccgtcatggagattggactcaagttacgcgacctgctcgtcctgccgccccaccaactgcagtaccagctgcacaaggacactatgtgcaagcagggatcggtgatcaaagcggtttattgcgtgtaagccgtctccgttttggatgccacccaccactccatccaccaaccacccacatttccatggccgcttatgcctctgaatgctgtttccagcgcgtgtatccg

SEQ ID NO: 21450 - protein, 229 aa, DROSOPHILA
MLTTQQTEFKMMDNGTETLADSPSSSSEDLKTLSDMDIRKPVTEIVDLRLKHPLENTWTLWYLENDRSKNWEDMQNEITSFDMVEDFWSLYNHIKQPSEIRVGSDYSLFKKGIQPMWEDDANKFGGRWVINMGRGSKAELDKLWLDVLLILIGEAFENTEEVCGAVINLRGKSNKISIWTANGHNELAVMEIGLKLRDLLVLPPHQLQYQLHKDTMCKQGSVIKAVYCV

SEQ ID NO: 21451 - DNA, 7457 bp, DROSOPHILA
aaaggaactgcagcaaactgataatgataacattaaactaattttaattataaatgcaattgtgcagcaggtacaaaataaagattaatttgtacagaagcgacgattaacttgtgaatgggcgttttattgaattggtcgtacatatcatttacttaagcttctataaatttcagtttaattaggattaactaagtttgtatgggaagcagaaccggtcatacacttactcaatggatctccacaggatacaaatgcattctttggaaaacgctcaagtagcactgggatttgcacttgccgacgctgaagtagaggcctccagggatgtacctgctccgctcgatgtctgtgtcgctcgagaggctttgtaggccagctctagggtctggttaatcgtatgcatgtccccctctatgctgcgtgcccagttctccacgtcgccgagatcctttagggcagtgctgaattggtcgatgagctgcagccattggtgggtctgcttggcgaaattggtggcgcccaagtgcagttgctttgcctctgcgtccagccgcttctggttcaggtaggcctgagccacgcccacatttagggtgtccaccagagactgagtgagctcattggacgcttctattgcctcctttcgacgcacctctgaaatttaagccttgtaatcgtttgtgccaaatacaaactacaattggccttgtaccctgttcctgttttcgcttcgcctgctccttgtgatgctccttaaccatggaagttaacatattcaagcttattgcaaacaaatccaaagaaaaaacaatttttgtccaaacacttgaaatcagctgatttgctaaagacgagccaagaccgatagataatttcgataagcagattgaccgttaaaatcgatacggttccacctctaatagccacacacgtgcgcggctgttgcgctcatctttttctcgagtttttatagaaatcgtggcttaaataaggcaaaatggggtctaaacgcgcgatggacgtgcacatgttcccttcggacctggaattcgccgtgttcacggaccaggagatccgcaaactgagcgtagtgaaggtgatcacgggcatcacgttcgatgcactgggacacgcgatacccggtggtctatacgacatccgaatgggctcctacggccggtgcatggatccctgtgggacgtgtcttaagttgcaggactgtccgggccatatgggccacatagagctaggcacgcccgtctacaatcccttcttcattaagtttgtgcagcgacttctctgcatattctgtttgcactgctacaagctgcagatgaagggtaactaacgacttacttttattatctaattatcagctaacagctgctctattgcagatcacgaatgtgagataattatgttacagctgcgcctaatcgacgctgggtacatcatcgaggcgcaggagttggaactcttcaagtcagaaattgtgtgccaaaacaccgaaaatctggtagccatcaaaaacggcgatatggtgcacccacacattgctgccatgtataaactgctggaaaaaaatgagaagaactccagcaactccactaagacgagctgttccctgcgcacagccattacgcattcggcactgcagcgactgggcaagaagtgcaggcactgtaacaagtctatgcgtttcgtgcgttatatgcatcgtaggctggtattctacgtgactttggcagatattaaagaacggtaagtaggccacttacacaacaccagataatttctaatataacttctcttgtcagcgttggcacgggcgcagaaaccggtggtcagaataaagtgatcttcgcagacgaatgtcgtcgttatctgcgccagatatacgcaaattaccctgaactattaaagctgctagtgcctgttttggggctaagcaacacggatttgactcagggcgatcgttcgccggtggatctgttcttcatggacacgcttccggtgacgccgccgcgcgctcgaccactgaacatggtcggtgacatgctaaagggaaatccccaaacggacatctacataaacatcattgaaaacaaccatgtattgaatgtggtactcaagtacatgaagggcggccaggaaaagctcacagaagaggctaaggccgcctatcagaccctaaagggtgaaacagctcatgagaaattgtatacggcttggttggctcttcaaatgtcggtggatgttctcctcgatgtgaatatgtcccgagaaatgaaatctggtgaaggtctgaagcaaatcattgaaaagaagagtggtctcattcgaagccatatgatgggcaaacgtgttaattacgccgctcgtactgtcattacgccggatcccaatataaatgtggatgagattggcatcccagatatttttgcgaagaaactgtcgtatcccgtgcccgtgaccgaatggaatgttacagagctgcgcaaaatggttatgaacggtccggacgtgcatcccggagcgaactatatacaggacaagaacggattcaccacatatataccggcggacaatgcctccaagcgtgagagtttggccaagctacttttgtcgaatcccaaggatggcattaagatcgttcatcggcatgttctcaatggcgacgtcctactgcttaaccgacagccctcgctgcataagccatcgattatgggtcacaaggctcgcattttgcatggtgagaagactttccgtctacactactcaaactgcaaggcatacaacgccgattttgatggcgatgaaatgaatgcccactatccgcagagtgaggtggcgagggcggaagcttacaacctagtgaatgtggccagcaactatttggtgcccaaggacggcacaccgttgggtggtctcattcaggatcacgtcatttcgggtgtaaagctgtcgattcgtggacgattctttaatcgtgaagactaccagcaattggtgtttcagggactatctcaacttaaaaaggatatcaagctgctgccaccgactattttaaagccagctgtgctttggtctggaaagcagatcttgtccaccattatcatcaacataattcccgagggatacgaaagaattaatctggattcatttgccaagattgctggaaaggtaattacgtttaaagtaaattatatacctttttttttatcaacttctgtgactttcagaattggaacgtgtcccgtccacgaccgcccatttgtggcacaaatccagaaggaaacgacctaagcgaaagccaagtgcaaatcagaaacggagaactgcttgttggtgttttggataaacaacagtatggggccaccacgtatggattgattcactgcatgtatgagctatacggcggcgatgtgtcaactttgctgcttaccgctttcacgaaagtatttacctttttcctgcaactggaaggttttactttgggtgtcaaggatattcttgttaccgacgtagcagatcgtaagagaaggaagattattcgcgagtgtcgcaatgtgggaaacagcgcagtagctgctgctctagaattggaagatgagccgccgcacgatgagctggttgagaaaatggaagcggcatatgtaaaggattcgaagttccgagtgcttttggatcgtaaatacaaatcactcttggatggctacacaaatgacattaataggtgagttcattcaaaaccgatcaacaggtcatattaacattttttctttttctagtacttgtctgcccagaggtcttattaccaagttcccatcaaacaatctgcaattgatggttctatctggtgccaagggatccatggtgaacaccatgcaaatctcctgtctgctcggacaaattgagttagaaggaaagcgaccgcctttgatgatatccggcaagtctctgccaagctttacatccttcgaaacctcgcccaagtctggaggttttatcgatggacgttttatgaccggcattcagccgcaggactttttcttccattgcatggctggtcgtgaagtatgtgtgaaataatttccgaaaattttctacgagtatttattatttacctttataaaattgtagggtctcattgatactgctgtgaaaacatcgcgttccggttatcttcaacgctgtcttattaaacatctggaggggctaagtgtccattatgatcttactgtacgcgatagtgacaatagtgtggttcagttcctatatggcgaggatggtttagacattctgaagtcaaagtttttcaacgataagttctgtgcagacttccttacacagaatgcaacggcaattctacgccctgctcaacttcaattgatgaaggatgaggaacagctagccaaggtccagcgccacgagaaacacatccgcagctgggagaagaaaaagccagctaagctacgtgccgccttcactcatttctccgaggagctccgcgaggaggtggaggtgaagcgacccaatgagattaatagcaaaacagggcgtcggcgctttgatgagggcctcctaaagttatggaaaaaggccgatgcagaggacaaggctttataccgcaagaagtacgcccgttgtccagatcccacggtagctgtatacaagcaggatctttactatggcagtgtgtcagaaagaacgaggaaactcattaccgattatgctaagaggaagccagcactgaaggagactatagccgatattatgcgagtaaagacaattaagtcactggcggcgccaggtgaaccagtgggtctgatagcagcccaatcgataggagaaccctcgactcagatgacattgaacactttccattttgcgggtcgtggtgagatgaacgtgactctgggtattcctcgactacgagaaattctcatgctggcctcatcaaacatcaaaacgccgtctatggatatacccataaagcctggtcagcagcatcaggcggaaaagctgcgcataaatctaaattcagtgacgttggcaaaccttttagaatgtgagtgcataaatgtaaattattatacgtatacaatgatgaaaattcccttatatagacgtccacgttagcactggtttgactctggacccggagcgatcttatgagtatgatatgcgcttccaattcctgcccagagaggtctataaggaggactatggtgtacgacccaaacatataatcaaatacatgcaccagaccttttttaaacaactgattcgcgccatcttgaaggtttcaaatgcttctaggacaacgaaaatgtaagccaactagcgctaggtccctgaatactttaagtaatacatcttctgtaatttcagagttgtaatagacgacaaaaaggacgctgataaagaagatgataacgatttggacaacggcgatgaagtgggccgttctaaggccaaggctaatgatgatgattcatcagacgataacgtaagttatgtctaacaaaacttggaattgtaaatacatatgtatatactgtttgtaaaggacgatgacgatgcaactggagtaaagcttaagcaacgcaaaacagatgagaaggactacgacgacccagacgacgtcgaggaactccatgatgctaatggtatgctacaaatcttgtatattcctagaggtgttaatactaacaactgattttcagacgatgacgacgaggcggaggatgaggacgacgaggaaaagggtcaggatggtaatgataatgatggcgatgataaagcggtagagaggttgctgagcaacgatatggtcaaagcatacacctacgacaaggagaaccatttgtggtgccaggtcaagttgaatctgagtgtgcggtaccagaagcccgatcttacctccataatccgggagttggcgggcaagagtgtggtccaccaagtgcagcacatcaagcgggccattatctacaaaggcaccgatgatgaccagctcctaaagaccgacggcattaatattggcgagatgttccagcacaacaagattcttgatctgaaccgcctttactccaatgacattcacgcgattgctaggacgtacggcatcgaagcagcgtctcaagtgatcgttaaggaagtgagcaatgtgttcaaggtctacggaattactgtggatcgccgccacctgtcgctaattgccgattacatgaccttcgacggcactttccaaccgttgtcacgcaagggcatggagcactcctcgtcgcccctgcagcagatgtccttcgagtccagcttgcagttcctcaagagcgccgctggattcggcagagcggatgagcttagctcgccgtcgagtcgtttgatggttggcctcccggtgcggaatggtactggtgcctttgagttgctgacgaaaatttgttaatttgtttaaatataaattgaaattttttaaataaacatacattaaacgtgtaaaatgttggtttatttaatcacggagaagtgtaaacatttaagttaaaagtacatatacaaaactacaatgaaaatttttggtttgctttcagaacttatcacaagtcaactggtattgccagttcctaacagccacactcggctcgaattggccggcaacagggtccaggagttcctcaacagttccaagtgtacctccaaatccggaaaccgttccagctcgtgttcctcctccatttctgacacctcctgcagttcctgttccgaatcctgctccaactcctgctcctccaatagggtgggtaatcttgaaatcgtacggttgcaactgcctgggacgtcttgtccgttgtttgttgaggacctgttctcgtcgctccccctcaagattaccgtctccacctccagattcaactgctccgcttccatcctgctcccgtttcgttgcacgaccacctttgcgccaggactcgacattagcaatgcccgaggtggatggcacctcgtccttccggcccccaaagatggtcgtccaacgaaaccacttatgtcataagctgtagcaatctgatgccgaggatgcactgcgtcttctcattgcattcggatctcttttgagtagataaacgcacagacacaggcaggcaaggagtaggcacaccaatcccaacatcgcatagaatccctggcggtagcgtgctgcatcggcactcgcttccaagagtcgtacccgctggcccagagctcctcctcccctcaagtcctcctctctttccagtggcattaacacctgccagaatccgtaaaccatttgcaagtgattggagtagcccgaatccagttgattgctggccgtgtaggaattggagggtgctgctcgataggtatcgtggcggttgctacgcgataagcttctatctagccctggagctcctgtctcccctcta

SEQ ID NO: 21452 - DNA, 4929 bp, DROSOPHILA
atggggtctaaacgcgcgatggacgtgcacatgttcccttcggacctggaattcgccgtgttcacggaccaggagatccgcaaactgagcgtagtgaaggtgatcacgggcatcacgttcgatgcactgggacacgcgatacccggtggtctatacgacatccgaatgggctcctacggccggtgcatggatccctgtgggacgtgtcttaagttgcaggactgtccgggccatatgggccacatagagctaggcacgcccgtctacaatcccttcttcattaagtttgtgcagcgacttctctgcatattctgtttgcactgctacaagctgcagatgaaggatcacgaatgtgagataattatgttacagctgcgcctaatcgacgctgggtacatcatcgaggcgcaggagttggaactcttcaagtcagaaattgtgtgccaaaacaccgaaaatctggtagccatcaaaaacggcgatatggtgcacccacacattgctgccatgtataaactgctggaaaaaaatgagaagaactccagcaactccactaagacgagctgttccctgcgcacagccattacgcattcggcactgcagcgactgggcaagaagtgcaggcactgtaacaagtctatgcgtttcgtgcgttatatgcatcgtaggctggtattctacgtgactttggcagatattaaagaacgcgttggcacgggcgcagaaaccggtggtcagaataaagtgatcttcgcagacgaatgtcgtcgttatctgcgccagatatacgcaaattaccctgaactattaaagctgctagtgcctgttttggggctaagcaacacggatttgactcagggcgatcgttcgccggtggatctgttcttcatggacacgcttccggtgacgccgccgcgcgctcgaccactgaacatggtcggtgacatgctaaagggaaatccccaaacggacatctacataaacatcattgaaaacaaccatgtattgaatgtggtactcaagtacatgaagggcggccaggaaaagctcacagaagaggctaaggccgcctatcagaccctaaagggtgaaacagctcatgagaaattgtatacggcttggttggctcttcaaatgtcggtggatgttctcctcgatgtgaatatgtcccgagaaatgaaatctggtgaaggtctgaagcaaatcattgaaaagaagagtggtctcattcgaagccatatgatgggcaaacgtgttaattacgccgctcgtactgtcattacgccggatcccaatataaatgtggatgagattggcatcccagatatttttgcgaagaaactgtcgtatcccgtgcccgtgaccgaatggaatgttacagagctgcgcaaaatggttatgaacggtccggacgtgcatcccggagcgaactatatacaggacaagaacggattcaccacatatataccggcggacaatgcctccaagcgtgagagtttggccaagctacttttgtcgaatcccaaggatggcattaagatcgttcatcggcatgttctcaatggcgacgtcctactgcttaaccgacagccctcgctgcataagccatcgattatgggtcacaaggctcgcattttgcatggtgagaagactttccgtctacactactcaaactgcaaggcatacaacgccgattttgatggcgatgaaatgaatgcccactatccgcagagtgaggtggcgagggcggaagcttacaacctagtgaatgtggccagcaactatttggtgcccaaggacggcacaccgttgggtggtctcattcaggatcacgtcatttcgggtgtaaagctgtcgattcgtggacgattctttaatcgtgaagactaccagcaattggtgtttcagggactatctcaacttaaaaaggatatcaagctgctgccaccgactattttaaagccagctgtgctttggtctggaaagcagatcttgtccaccattatcatcaacataattcccgagggatacgaaagaattaatctggattcatttgccaagattgctggaaagaattggaacgtgtcccgtccacgaccgcccatttgtggcacaaatccagaaggaaacgacctaagcgaaagccaagtgcaaatcagaaacggagaactgcttgttggtgttttggataaacaacagtatggggccaccacgtatggattgattcactgcatgtatgagctatacggcggcgatgtgtcaactttgctgcttaccgctttcacgaaagtatttacctttttcctgcaactggaaggttttactttgggtgtcaaggatattcttgttaccgacgtagcagatcgtaagagaaggaagattattcgcgagtgtcgcaatgtgggaaacagcgcagtagctgctgctctagaattggaagatgagccgccgcacgatgagctggttgagaaaatggaagcggcatatgtaaaggattcgaagttccgagtgcttttggatcgtaaatacaaatcactcttggatggctacacaaatgacattaatagtacttgtctgcccagaggtcttattaccaagttcccatcaaacaatctgcaattgatggttctatctggtgccaagggatccatggtgaacaccatgcaaatctcctgtctgctcggacaaattgagttagaaggaaagcgaccgcctttgatgatatccggcaagtctctgccaagctttacatccttcgaaacctcgcccaagtctggaggttttatcgatggacgttttatgaccggcattcagccgcaggactttttcttccattgcatggctggtcgtgaaggtctcattgatactgctgtgaaaacatcgcgttccggttatcttcaacgctgtcttattaaacatctggaggggctaagtgtccattatgatcttactgtacgcgatagtgacaatagtgtggttcagttcctatatggcgaggatggtttagacattctgaagtcaaagtttttcaacgataagttctgtgcagacttccttacacagaatgcaacggcaattctacgccctgctcaacttcaattgatgaaggatgaggaacagctagccaaggtccagcgccacgagaaacacatccgcagctgggagaagaaaaagccagctaagctacgtgccgccttcactcatttctccgaggagctccgcgaggaggtggaggtgaagcgacccaatgagattaatagcaaaacagggcgtcggcgctttgatgagggcctcctaaagttatggaaaaaggccgatgcagaggacaaggctttataccgcaagaagtacgcccgttgtccagatcccacggtagctgtatacaagcaggatctttactatggcagtgtgtcagaaagaacgaggaaactcattaccgattatgctaagaggaagccagcactgaaggagactatagccgatattatgcgagtaaagacaattaagtcactggcggcgccaggtgaaccagtgggtctgatagcagcccaatcgataggagaaccctcgactcagatgacattgaacactttccattttgcgggtcgtggtgagatgaacgtgactctgggtattcctcgactacgagaaattctcatgctggcctcatcaaacatcaaaacgccgtctatggatatacccataaagcctggtcagcagcatcaggcggaaaagctgcgcataaatctaaattcagtgacgttggcaaaccttttagaatacgtccacgttagcactggtttgactctggacccggagcgatcttatgagtatgatatgcgcttccaattcctgcccagagaggtctataaggaggactatggtgtacgacccaaacatataatcaaatacatgcaccagaccttttttaaacaactgattcgcgccatcttgaaggtttcaaatgcttctaggacaacgaaaatagttgtaatagacgacaaaaaggacgctgataaagaagatgataacgatttggacaacggcgatgaagtgggccgttctaaggccaaggctaatgatgatgattcatcagacgataacgacgatgacgatgcaactggagtaaagcttaagcaacgcaaaacagatgagaaggactacgacgacccagacgacgtcgaggaactccatgatgctaatgacgatgacgacgaggcggaggatgaggacgacgaggaaaagggtcaggatggtaatgataatgatggcgatgataaagcggtagagaggttgctgagcaacgatatggtcaaagcatacacctacgacaaggagaaccatttgtggtgccaggtcaagttgaatctgagtgtgcggtaccagaagcccgatcttacctccataatccgggagttggcgggcaagagtgtggtccaccaagtgcagcacatcaagcgggccattatctacaaaggcaccgatgatgaccagctcctaaagaccgacggcattaatattggcgagatgttccagcacaacaagattcttgatctgaaccgcctttactccaatgacattcacgcgattgctaggacgtacggcatcgaagcagcgtctcaagtgatcgttaaggaagtgagcaatgtgttcaaggtctacggaattactgtggatcgccgccacctgtcgctaattgccgattacatgaccttcgacggcactttccaaccgttgtcacgcaagggcatggagcactcctcgtcgcccctgcagcagatgtccttcgagtccagcttgcagttcctcaagagcgccgctggattcggcagagcggatgagcttagctcgccgtcgagtcgtttgatggttggcctcccggtgcggaatggtactggtgcctttgagttgctgacgaaaatttgttaa

SEQ ID NO: 21453 - protein, 1642 aa, DROSOPHILA
MGSKRAMDVHMFPSDLEFAVFTDQEIRKLSVVKVITGITFDALGHAIPGGLYDIRMGSYGRCMDPCGTCLKLQDCPGHMGHIELGTPVYNPFFIKFVQRLLCIFCLHCYKLQMKDHECEIIMLQLRLIDAGYIIEAQELELFKSEIVCQNTENLVAIKNGDMVHPHIAAMYKLLEKNEKNSSNSTKTSCSLRTAITHSALQRLGKKCRHCNKSMRFVRYMHRRLVFYVTLADIKERVGTGAETGGQNKVIFADECRRYLRQIYANYPELLKLLVPVLGLSNTDLTQGDRSPVDLFFMDTLPVTPPRARPLNMVGDMLKGNPQTDIYINIIENNHVLNVVLKYMKGGQEKLTEEAKAAYQTLKGETAHEKLYTAWLALQMSVDVLLDVNMSREMKSGEGLKQIIEKKSGLIRSHMMGKRVNYAARTVITPDPNINVDEIGIPDIFAKKLSYPVPVTEWNVTELRKMVMNGPDVHPGANYIQDKNGFTTYIPADNASKRESLAKLLLSNPKDGIKIVHRHVLNGDVLLLNRQPSLHKPSIMGHKARILHGEKTFRLHYSNCKAYNADFDGDEMNAHYPQSEVARAEAYNLVNVASNYLVPKDGTPLGGLIQDHVISGVKLSIRGRFFNREDYQQLVFQGLSQLKKDIKLLPPTILKPAVLWSGKQILSTIIINIIPEGYERINLDSFAKIAGKNWNVSRPRPPICGTNPEGNDLSESQVQIRNGELLVGVLDKQQYGATTYGLIHCMYELYGGDVSTLLLTAFTKVFTFFLQLEGFTLGVKDILVTDVADRKRRKIIRECRNVGNSAVAAALELEDEPPHDELVEKMEAAYVKDSKFRVLLDRKYKSLLDGYTNDINSTCLPRGLITKFPSNNLQLMVLSGAKGSMVNTMQISCLLGQIELEGKRPPLMISGKSLPSFTSFETSPKSGGFIDGRFMTGIQPQDFFFHCMAGREGLIDTAVKTSRSGYLQRCLIKHLEGLSVHYDLTVRDSDNSVVQFLYGEDGLDILKSKFFNDKFCADFLTQNATAILRPAQLQLMKDEEQLAKVQRHEKHIRSWEKKKPAKLRAAFTHFSEELREEVEVKRPNEINSKTGRRRFDEGLLKLWKKADAEDKALYRKKYARCPDPTVAVYKQDLYYGSVSERTRKLITDYAKRKPALKETIADIMRVKTIKSLAAPGEPVGLIAAQSIGEPSTQMTLNTFHFAGRGEMNVTLGIPRLREILMLASSNIKTPSMDIPIKPGQQHQAEKLRINLNSVTLANLLEYVHVSTGLTLDPERSYEYDMRFQFLPREVYKEDYGVRPKHIIKYMHQTFFKQLIRAILKVSNASRTTKIVVIDDKKDADKEDDNDLDNGDEVGRSKAKANDDDSSDDNDDDDATGVKLKQRKTDEKDYDDPDDVEELHDANDDDDEAEDEDDEEKGQDGNDNDGDDKAVERLLSNDMVKAYTYDKENHLWCQVKLNLSVRYQKPDLTSIIRELAGKSVVHQVQHIKRAIIYKGTDDDQLLKTDGINIGEMFQHNKILDLNRLYSNDIHAIARTYGIEAASQVIVKEVSNVFKVYGITVDRRHLSLIADYMTFDGTFQPLSRKGMEHSSSPLQQMSFESSLQFLKSAAGFGRADELSSPSSRLMVGLPVRNGTGAFELLTKIC

SEQ ID NO: 21454 - DNA, 3320 bp, DROSOPHILA
ggtggcctcaaactgggtctcgttagacagatagtggtagagagatagtccctccagaatgaccaccacactgtgcgacagactgagccacttctccacgctgcaccagcgatccggacggcaggggctcttctggccaatgagagcgcacatcaacaggttctggatgtcggttagaaagatgggcgtacgagcatcttgcggagtctccagggaggcgcgctgacccatctcacgcagtcgcaaggccggtacgttctccagctcccgtttgcgacgcctcaactctgccgacaactgattgtactgatcctcggatagcgagccaatctccagcggcaggctatctccaccagcatcgtaattgcggattttcttgttcaccggctcttcaggatctgatgttcctggggcagtctgtgaatccgcctccagctcgttgttttgacgacggtttcgcggcttgcgtttgctgcccaccacgatgaaaccgtcgtccccgtcctccgccttcgctgttgacttctcctccacttcgacctctgcatcgcgttttttggccaactctgcctcgtgcaatcgatcgcgatcgttgagctccatcaggttcgccagggccgccagcttctttttcttcttctcgttgcgctcgtgctgcttggtggacatatgttccttcatcctggagcgcttaccgttcaagctgcaggcgaaaatacgcaacttttattaaattaactcgattttcagtagatttcaatttgtcaacacgaagatttaacatgtgcaacgtgctagtgttaccagatggtaaaaacagtttttagccccaacagagctggcagtcccgctattttctcgtcaaatctgacttctttccagccgaaatcagtgcctgccaaaagctggctgctggaaattgcggtttgtacgtaaggttcccaggcgtgagtaagaaagagacaaccatagtatacatcaaccgttatgatgccgcgtgcttttggtacaagttaaatcgtcaaactttacaaccgccccaaaatttttgttttacgcccgaaattaaataaaataaatacgccatcatgtacgcagctgttaaaccgctctccaagtatctgcagttcaagtcggtgcacatctacgatgctattttcacgctgcactccaaagtcacagtggccctgcttttggcctgcacatttttgctttcctcgaaacaatatttcggcgatcccatccagtgttttggggacaaggatatggactacgtgcacgccttttgttggatctacggggcctatgtgagcgacaatgtgactgtgacgcccctaaggaatggagctgcacagtgccgaccaggtgagtttggaaatgcttcaaagattcccatgttcagcacggattcttcatttcagatgcggttagtaaggtagtgcccccggaaaatcgtaactacataacctactatcagtgggtcgtgctggtattgctgctcgagtcgtttgtgttttatatgccagcatttctctggaagatttgggagggcggtcggctgaagcatttgtgcgatgatttccacaagatggccgtttgcaaggacaagagcaggacccatttgcgcgtactagtcaactacttctccagcgattacaaagagacccacttccgctacttcgttagctacgtcttctgcgaaatactcaatttgagcatcagtgtgagtgaccaaaactagtaattcaataatctacgatattactaaaaattgtaattatttgcaaccccgcagattctaaacttccttctgttggacgtatttttcggaggtttttggggccgctaccgtaatgccttgctgtccctttacaatggcgactataaccagtggaacattataaccatggcagtcttccccaagtgtgccaagtgcgagatgtacaagggcggccccagcggttcttccaacatatacgactacctttgcctgctgcccctgaatatactgaacgagaaaatcttcgccttcctgtggatatggtttatactagtggctatgctcatttccctcaagtttctgtaccgcctggccaccgttttgtatcccggaatgcgtcttcagttgcttcgtgccagggcacgtttcatgcccaagaagcacttgcaggtggcattgcgcaattgcagttttggcgactggttcgtgctgatgcgcgtgggcaacaacatcagccccgagctattccgtaagttgctggaggagctgtacgaagctcagtccttgatcaaaataccgccaggagcggacaagatctaagatctcagcgatgacgccaagtttaatctcaatatactgaaataggtattatcatttgaatcatctagagtagaagactaagatgacacaaacaagaataacatacattaattttttcacatcgatatgtgcatattatcgaagatataacgaactattataatttttgtgctaagaataatgtgccattttcacttgttcagtaaattctcatatttcttaatcatcataaatattcttgaccatttgaatccttaattggcttgatatagatcgaaaactgaatttatctttaataaaagttgaaagtgtaaagaacataagctattttcatgcacagtttattgattgttaactggccactattgttattaatctttcatcaccatcatttacctacatatcacctacacaataattagtcgttcaaggtggtgtatgagtatgagtaactaatacctttttgaatgaaatgagtttatttgttacttacctttgcgacctggcaattctgcgcagtgcgattgtcgttctggtccacatcatgtttgttatctcgagataaaggttaatatgttaaggaactctatgcgcatgccgtgggaaggtccttgtgtttgtgtttgttttctggttcctccaatgactaatgactggctggatcttgagggcatatactttctttgcttgcgcatcaatttttgttaatgaagttctgtgggttcatgggaaaactggctaagacactcgattcctgcacgtttcatgcgctgctgctacttacattctgtctgatggtaaaattttgataaacaattttatttgattttctaagtagaatgcatgtgttttctgttttactaccgtttctttttgttttttatttatatttttcggtaaatagtgttcgtggtcaaagctttgatgtgtggaaaaatgtttttatttttatgcgctttacgaaatttgtaaaaaaaaaaagggaaagaactgatttgga

SEQ ID NO: 21455 - DNA, 1192 bp, DROSOPHILA
cttttggtacaagttaaatcgtcaaactttacaaccgccccaaaatttttgttttacgcccgaaattaaataaaataaatacgccatcatgtacgcagctgttaaaccgctctccaagtatctgcagttcaagtcggtgcacatctacgatgctattttcacgctgcactccaaagtcacagtggccctgcttttggcctgcacatttttgctttcctcgaaacaatatttcggcgatcccatccagtgttttggggacaaggatatggactacgtgcacgccttttgttggatctacggggcctatgtgagcgacaatgtgactgtgacgcccctaaggaatggagctgcacagtgccgaccagatgcggttagtaaggtagtgcccccggaaaatcgtaactacataacctactatcagtgggtcgtgctggtattgctgctcgagtcgtttgtgttttatatgccagcatttctctggaagatttgggagggcggtcggctgaagcatttgtgcgatgatttccacaagatggccgtttgcaaggacaagagcaggacccatttgcgcgtactagtcaactacttctccagcgattacaaagagacccacttccgctacttcgttagctacgtcttctgcgaaatactcaatttgagcatcagtattctaaacttccttctgttggacgtatttttcggaggtttttggggccgctaccgtaatgccttgctgtccctttacaatggcgactataaccagtggaacattataaccatggcagtcttccccaagtgtgccaagtgcgagatgtacaagggcggccccagcggttcttccaacatatacgactacctttgcctgctgcccctgaatatactgaacgagaaaatcttcgccttcctgtggatatggtttatactagtggctatgctcatttccctcaagtttctgtaccgcctggccaccgttttgtatcccggaatgcgtcttcagttgcttcgtgccagggcacgtttcatgcccaagaagcacttgcaggtggcattgcgcaattgcagttttggcgactggttcgtgctgatgcgcgtgggcaacaacatcagccccgagctattccgtaagttgctggaggagctgtacgaagctcagtccttgatcaaaataccgccaggagcggacaagatctaa

SEQ ID NO: 21456 - protein, 367 aa, DROSOPHILA
MYAAVKPLSKYLQFKSVHIYDAIFTLHSKVTVALLLACTFLLSSKQYFGDPIQCFGDKDMDYVHAFCWIYGAYVSDNVTVTPLRNGAAQCRPDAVSKVVPPENRNYITYYQWVVLVLLLESFVFYMPAFLWKIWEGGRLKHLCDDFHKMAVCKDKSRTHLRVLVNYFSSDYKETHFRYFVSYVFCEILNLSISILNFLLLDVFFGGFWGRYRNALLSLYNGDYNQWNIITMAVFPKCAKCEMYKGGPSGSSNIYDYLCLLPLNILNEKIFAFLWIWFILVAMLISLKFLYRLATVLYPGMRLQLLRARARFMPKKHLQVALRNCSFGDWFVLMRVGNNISPELFRKLLEELYEAQSLIKIPPGADKI

SEQ ID NO: 21457 - DNA, 11429 bp, DROSOPHILA
taaagaacataagctattttcatgcacagtttattgattgttaactggccactattgttattaatctttcatcaccatcatttacctacatatcacctacacaataattagtcgttcaaggtggtgtatgagtatgagtaactaatacctttttgaatgaaatgagtttatttgttacttacctttgcgacctggcaattctgcgcagtgcgattgtcgttctggtccacatcatgtttgttatctcgagataaaggttaatatgttaaggaactctatgcgcatgccgtgggaaggtccttgtgtttgtgtttgttttctggttcctccaatgactaatgactggctggatcttgagggcatatactttctttgcttgcgcatcaatttttgttaatgaagttctgtgggttcatgggaaaactggctaagacactcgattcctgcacgtttcatgcgctgctgctacttacattctgtctgatggtaaaattttgataaacaattttatttgattttctaagtagaatgcatgtgttttctgttttactaccgtttctttttgttttttatttatatttttcggtaaatagtgttcgtggtcaaagctttgatgtgtggaaaaatgtttttatttttatgcgctttacgaaatttgtaaaaaaaaaaagggaaagaactgatttggaaacttctgacacagggttgagaattaatgctgggcctgcttagcttacagttctggtttcataggtggtgggcggctggttcgttgctctgccattccaaaatccccttcaacttgcacttttcgtcggccatttcagctgacctccgcagttgccgggccgcttttcattaaccaaaaaaccataaacttcgaaacgtagcagaaaagtgcagcagtggccgctggatgtgggtcgtttgcccgctgatccactttccggaagcccttataagcggcgcattcaccaccgtcggattcagttgctctttaccggccggatcgcgcggaagtcgtcatcgtagtgattattaccgttctggattatcgtgcatatcaaattgctttgcgattgctttttgtggatttttgtttgagtgaatcgctgtaacctgaggctccttgtttcccggccaatttaacaaagtgcttaacatataattgaaagaaataatcagcgattttgtggcgtaaaagcttatgtgttaaaaatgtccagagcttaagtgaaaaatccagaagataaatcaatttatgaataatgaattacaacatggatggtatgtgttactttgaaatcttgaaaataacttccgtactcgttggcaaaaaaaaaaataggccaaaaacaattaatattttcacccacgtctgtgaacattttaagccagaaagtgaattccataaaatggtcgaaagttccattttattttgaacttggatcagcattattataaaaattattgcaaaagtgctgaacaggccagaaagtgctgaccacaataaataataaaaagtgtttaattatgtatgttgaaaataaaagtatgtagactgagtttttataaaaactgcgaacaagacaataaacatacaagtatgtaaacagtttaatacttaagcgattggcttacaaaaaatccataattgaacttggttaagaaatttcgttacactaatcttcttaaacggaattctttagagatggaggccaccaggctgcttcggcatccgcgacgttggtggagcattggattcggcaaacggatcgtggccatctcgattctggtcatcatcgtgttgctattttctctggtttaccacgggctagtggtggagaaaattggtaagttcgttaacgagttataataagagtaataataactaataaattacttaaagatcaagtgcagcagattgcagcgctgaatgccaggcaccaggtgcttttcaaccagccctttgaggaggatcagtctgccctgattgtgagtcctcaaactttgcacttcaaattgctcgacgaggatatgaacaaggatatggaggatagcaaaaacaggagaaggaagcatatgcggcaaatgctggttaagttccggttgaacaagaaacaccgcatgcggcgtgatttgcatgggttggatctgttggatcccgtccggatggaggccaatatgcagcacctgtacaccaagctgcgaagtaaaagggcaagagaagccctaagccagttggagcatgagtttgtgcgttgcaaaaagcatactccgcaggattgcatgtccgcctttctgcgcatgtacaaaatggcaaaggaggtgaccgagaaaatggagaagatgaaggccattatgcgggagcagcagccgaaattggaatcaagcagcatggagtcccatgaacagaagggtactttttcaccggccgacctgattcaggtgacaactgcagaggccacaacggttgcggtacatgccactgaaaagccagcgaggactaagattaagccttcaaggatcagctggatcatcgatgggcacgatcatgacgagagtccagtttatacagatggtgcccccaagaaggaaacaaccaaggcaccttggaacaccacacaattggtcgaaattacaaccacaaaaatagatgcaaccgctaccgaaagaacgactgtggagagcactacagagaaaataagctggattctggatcactttgacaagccccaagagattttacgtacaaccgagggaccagggcagcgaatcattagaaatgtaaccaccacatcggcatcctccgagccaatagttgacacggaaaacactaacagtgatcacgtgcccaccacggaaaacggattggtattcaatataactaccgatggaccagtggaaactacgaaatccaccgctcagcgaaaattgtcattcgattggatactggacggagaggaaaatgtagagccggaagtcaagtccaccaacactacgacaacaactgcggcgaccacgacgacaggagccacttcggaaaccatcattgtcaccacagagctgccgaaaataacttttgattggattattgacggaagggaagtggtagagccgcaggaaactactactgaagtcactgggaccacggaaagactgcgtaagatgccattcgattggattattgacggggaagaagttgtggagccgcaggagaatgtcaccaccacaaccattgcgacaactgtggcagtcagcacaaccgaaatcaacgagagaattcataattccactgcctatcccactaagccgaagccggtcaagtttgactggatcatcgatggaggagagtccagtggtgaggtaagcactagctccacaagccaaccaaagttgactactagggaggcgatcagcaatccagaatcaccacgatcctcacatccgctggacaaccctaccagcatcgaaaacatgctggaaagctttgagcaacacgaggagcagaaacccattctcagggtcttaaacgcaaatgaatcctcctcagaaaccgtgacggatggctacgaacgtcagttgtggctgaagaagtttgaggatcaggcaaggccaaatcaaaacgaactcatagatacttttggaaccgctctagatgctaaagccctagacaaaatgggacccaaaatcaatccacttaacggacacacttggaatggtgagattaatgctaatgcatgtttgctaagataatcagtaatataccatttaatttacagctgccgacgcccaaattcttagtctttgcgaacgagtggctctgcggatgcgcaacaaagttgccaccatgtcagacggtgagacgaaggagaagggtgaaaccttcacggcttcacccagtgtacagtttaccagtcgagctcctggcggatttccagtgtccggtgaaacaatgaaggcctcagcacagtttatgtttaaccccaacttcggaatgcccagcattcccgtttgcttctacatgacgcctgccaatttccgtatgcccatgtggtcgaatacgcccacatttatgggcatgcagggtgcgcactttggaggatcatcgaaccctggcgcaggcatattttttgtgcctcagcagtttggaccgagcggaaacttcttcggcggaagtggcggatccggagccggcggccagggtgccaatatcttctcgaagaacgcctcaccacagaaaccgacaaacggccagcagcaggtctactgcagctacatgcagaatcaatcgggtcagggagcaggacaatcgcagacatccagtcagcagcagcagggtggacagtcggcattctccaatgccaactttaagatgcgtcatgccaatcagacaaacaccgccaatcaacagggacaaatcatctatgccagctatgcaggattgccacaacaacccatccaggagcgatccagatgcccagagcccgatcagttttcctgcttcggtcaacaggagtgcattcctgccgcgagatggtgtgataatgtggtggattgttcggatggcagcgatgagtccgcctgcacctgtgcagatcgcgtggatgaagagcgtctgtgcgatggttacgaagattgccctatgggcgaggacgagctgggatgctttggctgcgaatcgttggcttactcctgctatgaaaatccacaggactttgccaaacgcaatcggtctacgatttctatgtgctacagtcgactggagcgttgcgacggattcatgaactgtttgaatggacgcgatgaggagcagtgcagcatgttggtcaccgatgtggcggatcatatggtggttaatgcattagcttagatgggtttttttttctaaaacgctatcaaatctttttcagtcccacggtgcatctgcttctgaaggctacctctaccacaattatcgcggggattggcatcctgtgtgcaacaatggtgaaaagtgggcggctttagcctgtcagatggatgaaaacagtcggatggatcactcagcttcgttgaatgtcagtttccaaaccctaactttacctggtccttttattgagccatccctgcatgctggagtccactttgctcaggcgtgccatggacgcaatagccacgattccctagtagatcatgtggcctatgtcaagtgccccccgatgcagtgcggcctgccctctaaatcatctatgctggaacactcgaagagagtaagaagagcagtatcggattcaaaggaaatcgttggcgatggccgaattgttggtggaagttatacaagtgcactccaatggccatttgtggtggctatctatagaaatggaaagttccattgcggtggaaccatttattctgatcgttgggtgagttaggagtttatacttcaattatatgtactgataagtttttttttaatagatcatcagcgctgcccactgtgtcataaactatggaaagtacttctatgaagttcgtgctggtcttctgcgtcgctctagctactcacccgccactcagatccagcccgtctcccatgtggttgtccaccaagcctacgaaagaagaagtatgcgcaacgatctctctctgcttcgcctgctgaatccgctgcagttcaatcgatgggtgaaacctatttgcttacccgacaagggaagaactacagtaggcgacgattggatctggggccccgtggaacacaccctatgcacggtggttggttggggagccatcagagagaagggtccaagcagtaagtacttaagccatatacaaataaactacttatacatatattaaccaaatttttggaggtgatcccatgcgccaggttatcgtaccaattcgtaagaaatgcactgatccagaagatcaggcttcagaagacatttgtgctggcgatccagatggaggtcgcgatgcctgccagggtgattcgggtgggcctctcttctgtcgcagcgtctctaacccagatgagttctatctggccggagtagtaagccatggcaatggctgtgctcgtcctcaggagtttggagtctacacgagggtcactctctacctggactggttggaaatggctactactccacgactgttgcccaaacttcagccgcttcaactgtgtccaggatttatctgcgtgtggggcggtaagcggtgtattgctaaacgacagcgctgcgatcgcaacgttgattgtttgggtggcgaggatgaggtgggatgcacctacaactttttaccagatatggtgggtggcgttcgacagaatattagcaccacaactgagagtgactatcatccagtgaaggagagcgaggaaaagagtaaaatgcgggaggttattcccattgacgatgaagatttaaaggctgaacaagacgaggaagatttattgaaaagcacaacatctttagggcaaactgaaacaacacagggcccaatggatttatctttcgctgaacaaattacttcaactacctcagatgatctatcaataacagatgaaaccacgagcacagattttacagtgagtgattcagccactagcccttccactcttttgccaacaacgacaaatccttcaacttggttgccatccacaaatattgaaacatcaacattttcatttactacaactgaatctgaagcttcaaccaaacaagaaacattaccaactactgttgcccaaactacgacaatcccaacttcaactgaagacctaaagaagctcacagatttggtcactgaatttatagagagtacgacttttgagaccacgatggaagtggagacgactactttatctctaacctcaacagacgctccaaaattagtaacaacagagggagtgaaggaaacaacaaccacagaagacacaaccacaattagcagcattgttactcttaccaccacgcccttggccacaatctctactaccattctaaccactgaaaagcatgtagctgtaaccacattagcaccaactactactacagagtccgccaagacgacaacaacgcatagtagcagcactcattctgaaaaggatcaaatacaaattcctaataaatttgtgtgcaaaaagtgggtagtctgtgtgtcattcgttgtgttctgttgtaatgcctattgtttccatttctcaggatgtctcaaattgtggatattatgatgcgttgtgataggaaagtggattgcgaggatggaactgatgaactggactgcacatgcaaagattatttgaagggatctctgaagggactcatttgcgatggcaaggcagattgcgaggacctcacggatgaacagaactgcggtaatgactgaccaaaatctttaaatgctttgtatttgaaacacatgttttttagtggaatgtcaatcaaacgaattccgttgcccgctgtctaaaacttgtttgccattaagcagtcgttgcgataataaagtggattgcaagttcaaggaagatgaaaaggattgctgtgagtagaaaagtattctattttaaaatgtagaattatataatttggcttgaatttactttttagttgctttgaccaatggccacgatgtgcactttgatgtgcatcagcagccaaagttcagcagtaccggaatcttctccagaaacggccatggcgtgtggcgggtagtctgtgctcatgagactggctatcacgagcaccaggccaaaacagcagatgcggtctgtgctctccttggtttcaatggagctcactacttcaatagctccgagtttgtgacccagcatgaaatgcaacccatcacaccggagttaaaaggaggcagaaaccgcatgtcagcacaaattcattctatggtcggtgacaatgtccaatttactgagaacgaggtcataataccagaactgggacacccatccgcttcaagaccagagaaggatcgtctgttgccccgcaagtgtgtcggcatctacgtggagtgcaatccgtactccaacaaaaccacacccctaaaaacattcagtgctgggcaagttgtcaaggaaaagccaattgaacaggttcctgtcctatcgcccaccatcgagacgcacaacactcccaatgtgcattttaagccgcaaattccggcgatggttgtaaataaaaaagatgaaattttggatcgtctggacaaactcatcaagagtaagaaaaacaaaaccatactggttaatgagcagctccatgaagccattgaggagctgcactggccctggctggcagatgtgtatatgaatggcgatctctggtgcatcggagtgctgattgacaagcattgggtaatggtccacgagagctgcctgtctggcattgacttggagactcactacgtcagcgttttgctgggcgggggcaaaacaaagcgatcggcccacaggagcaatcacgaacagattcggcgtgtggactgctttgagggagtgccaaagtccaatgtgttacttttgcatctggagcgccctgtgcggttcacccaccatgtgttgcctaccttcctgcctgacaggtgcgttaattaatttggttttaacatttcaagttcgtaactaattaatgttgctaatgttgcagttcccatcaaaatcaaagccatgcgaggcagtgcatcagtgtgcttcatgacgatgccacaggacgcatcaaaaccgtagccattacccgtatacacaatgctaccaattgcgattcctgctacaagctgcaggaaaagcaaccaccggctaatctgatgcgcctgttaaatgtgagtgccgaggatatggcttccatttcggaggaggtggaactcattaatggtgttgctcccacggagctaccggccattaccaaattcaccacctgcaaccaatttgggctgaaaaatgttagcgatgcacatcacaatcccagcgatcagggtgtattggtctgtcgggactcgcacacaggctggttcccaacggccttgtttaactacaacaattccgactgccaaagttttaaacagccatttggtattagaacgttagaactggtatacaaatcgctgcaggatatcataggtaaatcgtgtgtagcttaaaaactctgccaaagttaattaaaattccccaatagacaaaccgagctgcaaaatgctcctaccagccccggattgctccacccatcgttgcccgctgggtacctgtttgccgcaggctgcgatgtgcaacggccgctccgattgtcatgatggcagcgatgaggaggaaaccaaatgccgacagcaaaagcagcaatgtgcccctggcgagatgaagtgtcggaccagcttcaaatgcgtgccgaaaagcaagttttgtgaccacgtacctgactgcgaggacatgacggatgagccgaccatctgcagttgtttcacatatctgcagtacgtttgaggcaaggtaaattaaagttttgcacctcattaaacttgatgttttttttatagagccactgatccgtcaaagatatgcgatggcaagcgaaactgctgggacaagagcgacgagagttcagtactgtgtaactgcacagcggatcacttccagtgcagttcgtaagtggctaataaagacttaaatctagtcgcagttccattcaattatatatttaaaacagctcccccgaagattgcattcctcgtgattttgtgtgcgacaaagagaaggattgtcccaatggagaagatgagcggtattgctttggcatagagcacccattgcatctgcagaagaaggatttctggaccaatagtcagcacacgtaggcatttaacttgaatccttggaaagcaagcaattcataacttattttataggcaaccggaaatagctccacaatacggtcaagttatcgaacagacctatggcatctggcatacaaaatgcttcccgaaaagtaaacccccgcaagtggatgaagtgcgtgaaatatgcaaaaagttgggctacaatccatatagacagcctagttatcgattgattgacgacgaggagaacaaacccgtgcacacctacgagttggcggataggcaaggtcgaagtttcagcaatgagtcgctgatgggcaagtatcgcgactcaacaaaggcgttaatcatcagcaaattctcgcctcttcaactgaatgagcgccttacattgttcctcaagtccagcagaccaattgccgagctggttagatggaatgccaccgattccagcatgtgctacagactggagatcagatgtgcctaaaaacctaaaagatgacaacatttacttggtaagaggttctttcgtactctcgtgatagtccttttgtgcgttttagtagcaaataaatgcgagagctgtacacattttattaataacttggttttattttaatttcgtattattttttatcagttggcgctcgcatatggttgcatgacttttatttcgtttgatttttatttcaagctttggggatttgggtactttcgtaattttagtttaacaaacgagtttataaatgtaaaaaatcgcattggttgttatgccaaaattcaaacaatgtaattaattaatgcacttaattagtgttgggtttcctttaaattcgtttaaaagacataggtaatcgtatattaagattagttgtttatgaaagaaggtacttgagaattataagtaatggcacctattgagagcagttaagatatattttggaaataagttaagctctctggcgcatcgttggtaatataataataggtattagtataaatagtaggggctttaagatctttaacgtcagttaagggaatgtataagagtacctacataattaaatgtattcataagtctttggcgctgattaggattacgttttcgtgagaatttctaggaggtaattcattatgtataataagataaacgcaaacgttagttgggacttgggttaggcaaagtactttaaaagttattaggttttgtttgattaatgtcaaaatctctttgtacaataaataatttccattttataattttaaattgaatcacaaatgccattaaagtattataagtatgcataggtaaatgcttaggctagtgttaatcatttcgattggcgattagttagttagtgtgcgatttatatgaaccacgtgtgcgttttcatacccagtactccgattcaataaagtattaaaaaaccattacaaatcagcaaaaagtcggacattgatgtggaatacgagtttaccttacatactttctgcaatactgtaaaacctaccatattttaaaacactgctttaagtactgggtatctaatagtcggcgctctcgactatagcatttcttctatttgtatatagtgagc

SEQ ID NO: 21458 - DNA, 8230 bp, DROSOPHILA
ccggccggatcgcgcggaagtcgtcatcgtagtgattattaccgttctggattatcgtgcatatcaaattgctttgcgattgctttttgtggatttttgtttgagtgaatcgctgtaacctgaggctccttgtttcccggccaatttaacaaagtgcttaacatataattgaaagaaataatcagcgattttgtggcgtaaaagcttatgtgttaaaaatgtccagagcttaagtgaaaaatccagaagataaatcaatttatgaataatgaattacaacatggatgagatggaggccaccaggctgcttcggcatccgcgacgttggtggagcattggattcggcaaacggatcgtggccatctcgattctggtcatcatcgtgttgctattttctctggtttaccacgggctagtggtggagaaaattgatcaagtgcagcagattgcagcgctgaatgccaggcaccaggtgcttttcaaccagccctttgaggaggatcagtctgccctgattgtgagtcctcaaactttgcacttcaaattgctcgacgaggatatgaacaaggatatggaggatagcaaaaacaggagaaggaagcatatgcggcaaatgctggttaagttccggttgaacaagaaacaccgcatgcggcgtgatttgcatgggttggatctgttggatcccgtccggatggaggccaatatgcagcacctgtacaccaagctgcgaagtaaaagggcaagagaagccctaagccagttggagcatgagtttgtgcgttgcaaaaagcatactccgcaggattgcatgtccgcctttctgcgcatgtacaaaatggcaaaggaggtgaccgagaaaatggagaagatgaaggccattatgcgggagcagcagccgaaattggaatcaagcagcatggagtcccatgaacagaagggtactttttcaccggccgacctgattcaggtgacaactgcagaggccacaacggttgcggtacatgccactgaaaagccagcgaggactaagattaagccttcaaggatcagctggatcatcgatgggcacgatcatgacgagagtccagtttatacagatggtgcccccaagaaggaaacaaccaaggcaccttggaacaccacacaattggtcgaaattacaaccacaaaaatagatgcaaccgctaccgaaagaacgactgtggagagcactacagagaaaataagctggattctggatcactttgacaagccccaagagattttacgtacaaccgagggaccagggcagcgaatcattagaaatgtaaccaccacatcggcatcctccgagccaatagttgacacggaaaacactaacagtgatcacgtgcccaccacggaaaacggattggtattcaatataactaccgatggaccagtggaaactacgaaatccaccgctcagcgaaaattgtcattcgattggatactggacggagaggaaaatgtagagccggaagtcaagtccaccaacactacgacaacaactgcggcgaccacgacgacaggagccacttcggaaaccatcattgtcaccacagagctgccgaaaataacttttgattggattattgacggaagggaagtggtagagccgcaggaaactactactgaagtcactgggaccacggaaagactgcgtaagatgccattcgattggattattgacggggaagaagttgtggagccgcaggagaatgtcaccaccacaaccattgcgacaactgtggcagtcagcacaaccgaaatcaacgagagaattcataattccactgcctatcccactaagccgaagccggtcaagtttgactggatcatcgatggaggagagtccagtggtgaggtaagcactagctccacaagccaaccaaagttgactactagggaggcgatcagcaatccagaatcaccacgatcctcacatccgctggacaaccctaccagcatcgaaaacatgctggaaagctttgagcaacacgaggagcagaaacccattctcagggtcttaaacgcaaatgaatcctcctcagaaaccgtgacggatggctacgaacgtcagttgtggctgaagaagtttgaggatcaggcaaggccaaatcaaaacgaactcatagatacttttggaaccgctctagatgctaaagccctagacaaaatgggacccaaaatcaatccacttaacggacacacttggaatgctgccgacgcccaaattcttagtctttgcgaacgagtggctctgcggatgcgcaacaaagttgccaccatgtcagacggtgagacgaaggagaagggtgaaaccttcacggcttcacccagtgtacagtttaccagtcgagctcctggcggatttccagtgtccggtgaaacaatgaaggcctcagcacagtttatgtttaaccccaacttcggaatgcccagcattcccgtttgcttctacatgacgcctgccaatttccgtatgcccatgtggtcgaatacgcccacatttatgggcatgcagggtgcgcactttggaggatcatcgaaccctggcgcaggcatattttttgtgcctcagcagtttggaccgagcggaaacttcttcggcggaagtggcggatccggagccggcggccagggtgccaatatcttctcgaagaacgcctcaccacagaaaccgacaaacggccagcagcaggtctactgcagctacatgcagaatcaatcgggtcagggagcaggacaatcgcagacatccagtcagcagcagcagggtggacagtcggcattctccaatgccaactttaagatgcgtcatgccaatcagacaaacaccgccaatcaacagggacaaatcatctatgccagctatgcaggattgccacaacaacccatccaggagcgatccagatgcccagagcccgatcagttttcctgcttcggtcaacaggagtgcattcctgccgcgagatggtgtgataatgtggtggattgttcggatggcagcgatgagtccgcctgcacctgtgcagatcgcgtggatgaagagcgtctgtgcgatggttacgaagattgccctatgggcgaggacgagctgggatgctttggctgcgaatcgttggcttactcctgctatgaaaatccacaggactttgccaaacgcaatcggtctacgatttctatgtgctacagtcgactggagcgttgcgacggattcatgaactgtttgaatggacgcgatgaggagcagtgcagcatgttggtcaccgatgtggcggatcatatgtcccacggtgcatctgcttctgaaggctacctctaccacaattatcgcggggattggcatcctgtgtgcaacaatggtgaaaagtgggcggctttagcctgtcagatggatgaaaacagtcggatggatcactcagcttcgttgaatgtcagtttccaaaccctaactttacctggtccttttattgagccatccctgcatgctggagtccactttgctcaggcgtgccatggacgcaatagccacgattccctagtagatcatgtggcctatgtcaagtgccccccgatgcagtgcggcctgccctctaaatcatctatgctggaacactcgaagagagtaagaagagcagtatcggattcaaaggaaatcgttggcgatggccgaattgttggtggaagttatacaagtgcactccaatggccatttgtggtggctatctatagaaatggaaagttccattgcggtggaaccatttattctgatcgttggatcatcagcgctgcccactgtgtcataaactatggaaagtacttctatgaagttcgtgctggtcttctgcgtcgctctagctactcacccgccactcagatccagcccgtctcccatgtggttgtccaccaagcctacgaaagaagaagtatgcgcaacgatctctctctgcttcgcctgctgaatccgctgcagttcaatcgatgggtgaaacctatttgcttacccgacaagggaagaactacagtaggcgacgattggatctggggccccgtggaacacaccctatgcacggtggttggttggggagccatcagagagaagggtccaagcagtgatcccatgcgccaggttatcgtaccaattcgtaagaaatgcactgatccagaagatcaggcttcagaagacatttgtgctggcgatccagatggaggtcgcgatgcctgccagggtgattcgggtgggcctctcttctgtcgcagcgtctctaacccagatgagttctatctggccggagtagtaagccatggcaatggctgtgctcgtcctcaggagtttggagtctacacgagggtcactctctacctggactggttggaaatggctactactccacgactgttgcccaaacttcagccgcttcaactgtgtccaggatttatctgcgtgtggggcggtaagcggtgtattgctaaacgacagcgctgcgatcgcaacgttgattgtttgggtggcgaggatgaggtgggatgcacctacaactttttaccagatatggtgggtggcgttcgacagaatattagcaccacaactgagagtgactatcatccagtgaaggagagcgaggaaaagagtaaaatgcgggaggttattcccattgacgatgaagatttaaaggctgaacaagacgaggaagatttattgaaaagcacaacatctttagggcaaactgaaacaacacagggcccaatggatttatctttcgctgaacaaattacttcaactacctcagatgatctatcaataacagatgaaaccacgagcacagattttacagtgagtgattcagccactagcccttccactcttttgccaacaacgacaaatccttcaacttggttgccatccacaaatattgaaacatcaacattttcatttactacaactgaatctgaagcttcaaccaaacaagaaacattaccaactactgttgcccaaactacgacaatcccaacttcaactgaagacctaaagaagctcacagatttggtcactgaatttatagagagtacgacttttgagaccacgatggaagtggagacgactactttatctctaacctcaacagacgctccaaaattagtaacaacagagggagtgaaggaaacaacaaccacagaagacacaaccacaattagcagcattgttactcttaccaccacgcccttggccacaatctctactaccattctaaccactgaaaagcatgtagctgtaaccacattagcaccaactactactacagagtccgccaagacgacaacaacgcatagtagcagcactcattctgaaaaggatcaaatacaaattcctaataaatttgtgtgcaaaaagatgtctcaaattgtggatattatgatgcgttgtgataggaaagtggattgcgaggatggaactgatgaactggactgcacatgcaaagattatttgaagggatctctgaagggactcatttgcgatggcaaggcagattgcgaggacctcacggatgaacagaactgcgtggaatgtcaatcaaacgaattccgttgcccgctgtctaaaacttgtttgccattaagcagtcgttgcgataataaagtggattgcaagttcaaggaagatgaaaaggattgctttgctttgaccaatggccacgatgtgcactttgatgtgcatcagcagccaaagttcagcagtaccggaatcttctccagaaacggccatggcgtgtggcgggtagtctgtgctcatgagactggctatcacgagcaccaggccaaaacagcagatgcggtctgtgctctccttggtttcaatggagctcactacttcaatagctccgagtttgtgacccagcatgaaatgcaacccatcacaccggagttaaaaggaggcagaaaccgcatgtcagcacaaattcattctatggtcggtgacaatgtccaatttactgagaacgaggtcataataccagaactgggacacccatccgcttcaagaccagagaaggatcgtctgttgccccgcaagtgtgtcggcatctacgtggagtgcaatccgtactccaacaaaaccacacccctaaaaacattcagtgctgggcaagttgtcaaggaaaagccaattgaacaggttcctgtcctatcgcccaccatcgagacgcacaacactcccaatgtgcattttaagccgcaaattccggcgatggttgtaaataaaaaagatgaaattttggatcgtctggacaaactcatcaagagtaagaaaaacaaaaccatactggttaatgagcagctccatgaagccattgaggagctgcactggccctggctggcagatgtgtatatgaatggcgatctctggtgcatcggagtgctgattgacaagcattgggtaatggtccacgagagctgcctgtctggcattgacttggagactcactacgtcagcgttttgctgggcgggggcaaaacaaagcgatcggcccacaggagcaatcacgaacagattcggcgtgtggactgctttgagggagtgccaaagtccaatgtgttacttttgcatctggagcgccctgtgcggttcacccaccatgtgttgcctaccttcctgcctgacagttcccatcaaaatcaaagccatgcgaggcagtgcatcagtgtgcttcatgacgatgccacaggacgcatcaaaaccgtagccattacccgtatacacaatgctaccaattgcgattcctgctacaagctgcaggaaaagcaaccaccggctaatctgatgcgcctgttaaatgtgagtgccgaggatatggcttccatttcggaggaggtggaactcattaatggtgttgctcccacggagctaccggccattaccaaattcaccacctgcaaccaatttgggctgaaaaatgttagcgatgcacatcacaatcccagcgatcagggtgtattggtctgtcgggactcgcacacaggctggttcccaacggccttgtttaactacaacaattccgactgccaaagttttaaacagccatttggtattagaacgttagaactggtatacaaatcgctgcaggatatcatagacaaaccgagctgcaaaatgctcctaccagccccggattgctccacccatcgttgcccgctgggtacctgtttgccgcaggctgcgatgtgcaacggccgctccgattgtcatgatggcagcgatgaggaggaaaccaaatgccgacagcaaaagcagcaatgtgcccctggcgagatgaagtgtcggaccagcttcaaatgcgtgccgaaaagcaagttttgtgaccacgtacctgactgcgaggacatgacggatgagccgaccatctgcagttgtttcacatatctgcaagccactgatccgtcaaagatatgcgatggcaagcgaaactgctgggacaagagcgacgagagttcagtactgtgtaactgcacagcggatcacttccagtgcagttcctcccccgaagattgcattcctcgtgattttgtgtgcgacaaagagaaggattgtcccaatggagaagatgagcggtattgctttggcatagagcacccattgcatctgcagaagaaggatttctggaccaatagtcagcacacgcaaccggaaatagctccacaatacggtcaagttatcgaacagacctatggcatctggcatacaaaatgcttcccgaaaagtaaacccccgcaagtggatgaagtgcgtgaaatatgcaaaaagttgggctacaatccatatagacagcctagttatcgattgattgacgacgaggagaacaaacccgtgcacacctacgagttggcggataggcaaggtcgaagtttcagcaatgagtcgctgatgggcaagtatcgcgactcaacaaaggcgttaatcatcagcaaattctcgcctcttcaactgaatgagcgccttacattgttcctcaagtccagcagaccaattgccgagctggttagatggaatgccaccgattccagcatgtgctacagactggagatcagatgtgcctaaaaacctaaaagatgacaacatttacttggtaagaggttctttcgtactctcgtgatagtccttttgtgcgttttagtagcaaataaatgcgagagctgtacacattttatt

SEQ ID NO: 21459 - protein, 2616 aa, DROSOPHILA
MNYNMDEMEATRLLRHPRRWWSIGFGKRIVAISILVIIVLLFSLVYHGLVVEKIDQVQQIAALNARHQVLFNQPFEEDQSALIVSPQTLHFKLLDEDMNKDMEDSKNRRRKHMRQMLVKFRLNKKHRMRRDLHGLDLLDPVRMEANMQHLYTKLRSKRAREALSQLEHEFVRCKKHTPQDCMSAFLRMYKMAKEVTEKMEKMKAIMREQQPKLESSSMESHEQKGTFSPADLIQVTTAEATTVAVHATEKPARTKIKPSRISWIIDGHDHDESPVYTDGAPKKETTKAPWNTTQLVEITTTKIDATATERTTVESTTEKISWILDHFDKPQEILRTTEGPGQRIIRNVTTTSASSEPIVDTENTNSDHVPTTENGLVFNITTDGPVETTKSTAQRKLSFDWILDGEENVEPEVKSTNTTTTTAATTTTGATSETIIVTTELPKITFDWIIDGREVVEPQETTTEVTGTTERLRKMPFDWIIDGEEVVEPQENVTTTTIATTVAVSTTEINERIHNSTAYPTKPKPVKFDWIIDGGESSGEVSTSSTSQPKLTTREAISNPESPRSSHPLDNPTSIENMLESFEQHEEQKPILRVLNANESSSETVTDGYERQLWLKKFEDQARPNQNELIDTFGTALDAKALDKMGPKINPLNGHTWNAADAQILSLCERVALRMRNKVATMSDGETKEKGETFTASPSVQFTSRAPGGFPVSGETMKASAQFMFNPNFGMPSIPVCFYMTPANFRMPMWSNTPTFMGMQGAHFGGSSNPGAGIFFVPQQFGPSGNFFGGSGGSGAGGQGANIFSKNASPQKPTNGQQQVYCSYMQNQSGQGAGQSQTSSQQQQGGQSAFSNANFKMRHANQTNTANQQGQIIYASYAGLPQQPIQERSRCPEPDQFSCFGQQECIPAARWCDNVVDCSDGSDESACTCADRVDEERLCDGYEDCPMGEDELGCFGCESLAYSCYENPQDFAKRNRSTISMCYSRLERCDGFMNCLNGRDEEQCSMLVTDVADHMSHGASASEGYLYHNYRGDWHPVCNNGEKWAALACQMDENSRMDHSASLNVSFQTLTLPGPFIEPSLHAGVHFAQACHGRNSHDSLVDHVAYVKCPPMQCGLPSKSSMLEHSKRVRRAVSDSKEIVGDGRIVGGSYTSALQWPFVVAIYRNGKFHCGGTIYSDRWIISAAHCVINYGKYFYEVRAGLLRRSSYSPATQIQPVSHVVVHQAYERRSMRNDLSLLRLLNPLQFNRWVKPICLPDKGRTTVGDDWIWGPVEHTLCTVVGWGAIREKGPSSDPMRQVIVPIRKKCTDPEDQASEDICAGDPDGGRDACQGDSGGPLFCRSVSNPDEFYLAGVVSHGNGCARPQEFGVYTRVTLYLDWLEMATTPRLLPKLQPLQLCPGFICVWGGKRCIAKRQRCDRNVDCLGGEDEVGCTYNFLPDMVGGVRQNISTTTESDYHPVKESEEKSKMREVIPIDDEDLKAEQDEEDLLKSTTSLGQTETTQGPMDLSFAEQITSTTSDDLSITDETTSTDFTVSDSATSPSTLLPTTTNPSTWLPSTNIETSTFSFTTTESEASTKQETLPTTVAQTTTIPTSTEDLKKLTDLVTEFIESTTFETTMEVETTTLSLTSTDAPKLVTTEGVKETTTTEDTTTISSIVTLTTTPLATISTTILTTEKHVAVTTLAPTTTTESAKTTTTHSSSTHSEKDQIQIPNKFVCKKMSQIVDIMMRCDRKVDCEDGTDELDCTCKDYLKGSLKGLICDGKADCEDLTDEQNCVECQSNEFRCPLSKTCLPLSSRCDNKVDCKFKEDEKDCFALTNGHDVHFDVHQQPKFSSTGIFSRNGHGVWRVVCAHETGYHEHQAKTADAVCALLGFNGAHYFNSSEFVTQHEMQPITPELKGGRNRMSAQIHSMVGDNVQFTENEVIIPELGHPSASRPEKDRLLPRKCVGIYVECNPYSNKTTPLKTFSAGQVVKEKPIEQVPVLSPTIETHNTPNVHFKPQIPAMVVNKKDEILDRLDKLIKSKKNKTILVNEQLHEAIEELHWPWLADVYMNGDLWCIGVLIDKHWVMVHESCLSGIDLETHYVSVLLGGGKTKRSAHRSNHEQIRRVDCFEGVPKSNVLLLHLERPVRFTHHVLPTFLPDSSHQNQSHARQCISVLHDDATGRIKTVAITRIHNATNCDSCYKLQEKQPPANLMRLLNVSAEDMASISEEVELINGVAPTELPAITKFTTCNQFGLKNVSDAHHNPSDQGVLVCRDSHTGWFPTALFNYNNSDCQSFKQPFGIRTLELVYKSLQDIIDKPSCKMLLPAPDCSTHRCPLGTCLPQAAMCNGRSDCHDGSDEEETKCRQQKQQCAPGEMKCRTSFKCVPKSKFCDHVPDCEDMTDEPTICSCFTYLQATDPSKICDGKRNCWDKSDESSVLCNCTADHFQCSSSPEDCIPRDFVCDKEKDCPNGEDERYCFGIEHPLHLQKKDFWTNSQHTQPEIAPQYGQVIEQTYGIWHTKCFPKSKPPQVDEVREICKKLGYNPYRQPSYRLIDDEENKPVHTYELADRQGRSFSNESLMGKYRDSTKALIISKFSPLQLNERLTLFLKSSRPIAELVRWNATDSSMCYRLEIRCA

SEQ ID NO: 21460 - DNA, 2656 bp, DROSOPHILA
ctttgagaaactcagcgatgcccgcgcggctaaggacagctgctccggaatagaagtggatggtcgccgtattcgcgtcgatttctctataacccaacgggctcataccccaactccgggtgtgtatttgggtcgtcagccgcgtggaaaagctccacgctcattttcaccgcgtagaggacgccgtgtgtatcacgatcgctccgcttcgccctatgacaactatcgtgatcgctatgattaccgcaacgatcgctacgaccgtaatctccgcaggagccctagtcgcaaccgttacactcgcaacaggagctacagccgttcacgctctccgcaactacgtaaagtttattcctccgtctatttaatcaaacgtttatcctgtatattttccacgattaggtcgaacttcatcgcgctattaaagcgcctggggaggaggctacttcattaactcgtgctcctaagttcgcccaactggattgtgtcaaacgggctgtaaaggagcatacgactgaaatattgttttggtgaatcctatcccatctaatgcatttggttggcgaacagttcgcaactagattaattaattattcacccaaaacaccctttaatcataataattcggttactattattaatgctgtataaaaacataaattgtaaatatcaaatcaattaccaacattacatacagaggtccgcatggattgtgatatgtattttaaaggaactgcagcaaactgataatgataacattaaactaattttaattataaatgcaattgtgcagcaggtacaaaataaagattaatttgtacagaagcgacgattaacttgtgaatgggcgttttattgaattggtcgtacatatcatttacttaagcttctataaatttcagtttaattaggattaactaagtttgtatgggaagcagaaccggtcatacacttactcaatggatctccacaggatacaaatgcattctttggaaaacgctcaagtagcactgggatttgcacttgccgacgctgaagtagaggcctccagggatgtacctgctccgctcgatgtctgtgtcgctcgagaggctttgtaggccagctctagggtctggttaatcgtatgcatgtccccctctatgctgcgtgcccagttctccacgtcgccgagatcctttagggcagtgctgaattggtcgatgagctgcagccattggtgggtctgcttggcgaaattggtggcgcccaagtgcagttgctttgcctctgcgtccagccgcttctggttcaggtaggcctgagccacgcccacatttagggtgtccaccagagactgagtgagctcattggacgcttctattgcctcctttcgacgcacctctgaaatttaagccttgtaatcgtttgtgccaaatacaaactacaattggccttgtaccctgttcctgttttcgcttcgcctgctccttgtgatgctccttaaccatggaagttaacatattcaagcttattgcaaacaaatccaaagaaaaaacaatttttgtccaaacacttgaaatcagctgatttgctaaagacgagccaagaccgatagataatttcgataagcagattgaccgttaaaatcgatacggttccacctctaatagccacacacgtgcgcggctgttgcgctcatctttttctcgagtttttatagaaatcgtggcttaaataaggcaaaatggggtctaaacgcgcgatggacgtgcacatgttcccttcggacctggaattcgccgtgttcacggaccaggagatccgcaaactgagcgtagtgaaggtgatcacgggcatcacgttcgatgcactgggacacgcgatacccggtggtctatacgacatccgaatgggctcctacggccggtgcatggatccctgtgggacgtgtcttaagttgcaggactgtccgggccatatgggccacatagagctaggcacgcccgtctacaatcccttcttcattaagtttgtgcagcgacttctctgcatattctgtttgcactgctacaagctgcagatgaagggtaactaacgacttacttttattatctaattatcagctaacagctgctctattgcagatcacgaatgtgagataattatgttacagctgcgcctaatcgacgctgggtacatcatcgaggcgcaggagttggaactcttcaagtcagaaattgtgtgccaaaacaccgaaaatctggtagccatcaaaaacggcgatatggtgcacccacacattgctgccatgtataaactgctggaaaaaaatgagaagaactccagcaactccactaagacgagctgttccctgcgcacagccattacgcattcggcactgcagcgactgggcaagaagtgcaggcactgtaacaagtctatgcgtttcgtgcgttatatgcatcgtaggctggtattctacgtgactttggcagatattaaagaacggtaagtaggccacttacacaacaccagataatttctaatataacttctcttgtcagcgttggcacgggcgcagaaaccggtggtcagaataaagtgatcttcgcagacgaatgtcgtcgttatctgcgccagatatacgcaaattaccctgaactattaaagctgc

SEQ ID NO: 21461 - DNA, 472 bp, DROSOPHILA
gtggctattagaggtggaaccgtatcgattttaacggtcaatggttaaggagcatcacaaggagcaggcgaagcgaaaacaggaacaggaggtgcgtcgaaaggaggcaatagaagcgtccaatgagctcactcagtctctggtggacaccctaaatgtgggcgtggctcaggcctacctgaaccagaagcggctggacgcagaggcaaagcaactgcacttgggcgccaccaatttcgccaagcagacccaccaatggctgcagctcatcgaccaattcagcactgccctaaaggatctcggcgacgtggagaactgggcacgcagcatagagggggacatgcatacgattaaccagaccctagagctggcctacaaagcctctcgagcgacacagacatcgagcggagcaggtacatccctggaggcctctacttcagcgtcggcaagtgcaaatcccagtgctacttga

SEQ ID NO: 21462 - protein, 143 aa, DROSOPHILA
MVKEHHKEQAKRKQEQEVRRKEAIEASNELTQSLVDTLNVGVAQAYLNQKRLDAEAKQLHLGATNFAKQTHQWLQLIDQFSTALKDLGDVENWARSIEGDMHTINQTLELAYKASRATQTSSGAGTSLEASTSASASANPSAT

SEQ ID NO: 21463 - DNA, 4349 bp, DROSOPHILA
cttttgttgtgaaattggaaatcgtaaacaaaacgaaacaaactttatacaaatcagttgaaatcgtatttgttgggtatttaataagagtgcgtaggaagttaacacgcattcagaagtcagagaagcaagagtcacctcgttattaaaatatgacaacgaattcagtaactgataagaacacgggtaattaaaacggcaaattatttatttggaacatcaacgatgattaacaaccgattcgcagaaggagattacaacctggatgaggaaatcgacagccatttgagaaaattgttctgtctaaaaccaaaagctgaaacacccaaactcaatccctacatagtagaattctttggagttcttagcttgacagatctccgtgccccacaaagaaaactatgggtcatatatcacgccaagcagcctgatctggacaagaccgttgatgagatccacgagaagtatggcaagaagaatatgtttgatctgtaccgcacaccagttttcagtggagttgctctgcgggacagtgtgagaaagcacttctcgaacctaaagtggtttacgacgggaaatctcctggaagccccacctaaaagccacttcaacgacgagcgagtggtgaaaaccatcacggatctgcatcatctggaacaccagagactatataattatgtgatggtgaagaatatgtggtctatgcggtatcgctaaactaacctgtgatttaggattaaatttgtatatgactatctaaaagcaagaataataaattgtactattacaaaatccatataacataatggtttgctaaccaatcaaatagtattgttttcttgtagtacaaattttgtttattttcctatatttcgttgaataaagtacataataattatgctgatttaatttgttaaatatattcgataacattaaataaattccgcttgtgttttttttttctaaatggatgacaacgccgcataagggttaaagtgccaatcgataacgcacgtcctcacctatcgccacccctgttgaagcgtgcgtctttctaaacgcagacagaataaataaaacctgccaaaggctatcaattaattggtaaacactgattgggtgtgcaatatagcagggaatcaaaccctcaaaaatggtaagaacggcaatccaaatagtgtgcacccattcatcttcttttttcgccaccattgctccgataagcgaagtttcgataggtaagcaaaaagccaatggatcgggagccactcagtagcgggcgtctccattgcagcgccagatataaacacaagcgatcggcgtcatcatcgtcagcggggacaacttcatccggacacaaggaccgcaggtaaatgtgtacacacatatgtgagacgaccctaaacgatacctcttttgacatgaagcatcgagtagttttgactggcagtttggaaaaaaggttcaactgtcatagggccctttcatttggatttgccccctcagccgattcagctggtgctcttgccaagaaagttaaaaccaaaaatcattcaagccgatttcatttcattggaagaaaccaaccaaccaaccaaccaaccaacgaacatcactatgtaagaacccaccgaagcaatcattttcattctacgtccaactaccaaagaatttggccgaaagaggtcgaacccaaccgtagcatttgtcaagtcacacaaattttccaactgtcagttaccaaggcgtgcaagaaccacccgaaatccacacgaaatacaaaacttttcaagaccctcaagaacgaaccgcaagataatcttatttcattccattccacatcgaatcaaggtctgactacgattactgtggcagtcgccggcaccagcggtcctcctctcgccgacgctcccgttcgcgttcctcctcggagtcgccgccaccggagccgcgtcatcgctccggacgttcatcacgcgatcgcgaacgaatgcacaagtctcgcgtaagccattctgccgattaatgcctcctttcaatcctaaagatcttcggcgtttcaggaacatccacaagcaagccgctgcataggagtctttggactgaacacaaatacctcgcagcacaaggtacgcgagctgttcaacaagtacggacctatcgaacgcatccagatggtgattgacgcacaagtaagtcggttttcgataagcattgctaagatatttcctgcctgaatccttttgtgtagacaaatccgctgaagccctgcagttttgtcttaatttctggctagataaaatttgatagcgattgtgagtttttgtgtattccaaactaaaagctaaaggcttgctgtcacagtggcatattgttcgaaggaaatattgatctcccgaaatcaatatgtgttcagttgttaggaaagttcaagttcacaaacgtagattaacccttaataacttctgacatacagacacagcgttcccggggcttttgtttcatttactttgagaaactcagcgatgcccgcgcggctaaggacagctgctccggaatagaagtggatggtcgccgtattcgcgtcgatttctctataacccaacgggctcataccccaactccgggtgtgtatttgggtcgtcagccgcgtggaaaagctccacgctcattttcaccgcgtagaggacgccgtgtgtatcacgatcgctccgcttcgccctatgacaactatcgtgatcgctatgattaccgcaacgatcgctacgaccgtaatctccgcaggagccctagtcgcaaccgttacactcgcaacaggagctacagccgttcacgctctccgcaactacgtaaagtttattcctccgtctatttaatcaaacgtttatcctgtatattttccacgattaggtcgaacttcatcgcgctattaaagcgcctggggaggaggctacttcattaactcgtgctcctaagttcgcccaactggattgtgtcaaacgggctgtaaaggagcatacgactgaaatattgttttggtgaatcctatcccatctaatgcatttggttggcgaacagttcgcaactagattaattaattattcacccaaaacaccctttaatcataataattcggttactattattaatgctgtataaaaacataaattgtaaatatcaaatcaattaccaacattacatacagaggtccgcatggattgtgatatgtattttaaaggaactgcagcaaactgataatgataacattaaactaattttaattataaatgcaattgtgcagcaggtacaaaataaagattaatttgtacagaagcgacgattaacttgtgaatgggcgttttattgaattggtcgtacatatcatttacttaagcttctataaatttcagtttaattaggattaactaagtttgtatgggaagcagaaccggtcatacacttactcaatggatctccacaggatacaaatgcattctttggaaaacgctcaagtagcactgggatttgcacttgccgacgctgaagtagaggcctccagggatgtacctgctccgctcgatgtctgtgtcgctcgagaggctttgtaggccagctctagggtctggttaatcgtatgcatgtccccctctatgctgcgtgcccagttctccacgtcgccgagatcctttagggcagtgctgaattggtcgatgagctgcagccattggtgggtctgcttggcgaaattggtggcgcccaagtgcagttgctttgcctctgcgtccagccgcttctggttcaggtaggcctgagccacgcccacatttagggtgtccaccagagactgagtgagctcattggacgcttctattgcctcctttcgacgcacctctgaaatttaagccttgtaatcgtttgtgccaaatacaaactacaattggccttgtaccctgttcctgttttcgcttcgcctgctccttgtgatgctccttaaccatggaagttaacatattcaagcttattgcaaacaaatccaaagaaaaaacaatttttgtccaaacacttgaaatcagctgatttgctaaagacgagccaagaccgatagataatttcgataagcagattgaccgttaaaatcgatacggttccacctctaatagccacacacgtgcgcggctgttgcgctcatctttttctcgagtttttatagaaatcgtggcttaaataaggcaaaatggggtctaaacgcgcgatggacgtgcacatgttcccttcggacctggaattcgccgtgttcacggaccaggagatccgcaaactgagcgtagtgaaggtgatcacgggcatca

SEQ ID NO: 21464 - DNA, 1018 bp, DROSOPHILA
aatcgataacgcacgtcctcacctatcgccacccctgttgaagcgtgcgtctttctaaacgcagacagaataaataaaacctgccaaaggctatcaattaattggtaaacactgattgggtgtgcaatatagcagggaatcaaaccctcaaaaatgtttcgataggtaagcaaaaagccaatggatcgggagccactcagtagcgggcgtctccattgcagcgccagatataaacacaagcgatcggcgtcatcatcgtcagcggggacaacttcatccggacacaaggaccgcaggtctgactacgattactgtggcagtcgccggcaccagcggtcctcctctcgccgacgctcccgttcgcgttcctcctcggagtcgccgccaccggagccgcgtcatcgctccggacgttcatcacgcgatcgcgaacgaatgcacaagtctcgcgaacatccacaagcaagccgctgcataggagtctttggactgaacacaaatacctcgcagcacaaggtacgcgagctgttcaacaagtacggacctatcgaacgcatccagatggtgattgacgcacaagtcgaacttcatcgcgctattaaagcgcctggggaggaggctacttcattaactcgtgctcctaagttcgcccaactggattgtgtcaaacgggctgtaaaggagcatacgactgaaatattgttttggtgaatcctatcccatctaatgcatttggttggcgaacagttcgcaactagattaattaattattcacccaaaacaccctttaatcataataattcggttactattattaatgctgtataaaaacataaattgtaaatatcaaatcaattaccaacattacatacagaggtccgcatggattgtgatatgtattttaaaggaactgcagcaaactgataatgataacattaaactaattttaattataaatgcaattgtgcagcaggtacaaaataaagattaatttgtacagaagcgacgattaacttgt

SEQ ID NO: 21465 - protein, 176 aa, DROSOPHILA
MDREPLSSGRLHCSARYKHKRSASSSSAGTTSSGHKDRRSDYDYCGSRRHQRSSSRRRSRSRSSSESPPPEPRHRSGRSSRDRERMHKSREHPQASRCIGVFGLNTNTSQHKVRELFNKYGPIERIQMVIDAQVELHRAIKAPGEEATSLTRAPKFAQLDCVKRAVKEHTTEILFW

SEQ ID NO: 21466 - DNA, 2899 bp, DROSOPHILA
atatgtgcaataatcacttcttttacgatcgaacgccctttgaacaattcctggcaggtaccaggtaatatatttattatatgatggttaccgcaattataaaatgtctcatttgccagttccgatcgactggtgattgtaacagatcctccatttggctgtcgcactgaactgatttcgcacaccctgcgcagccttagaaaactgcataatcaaatcaaccgattgccatccactccactgtccatattctggatatatccctattattcagctaaccacatcaggcaggaaatgcctgagcttgaaatgtgtgaatacaggatcaattacactaatcaccttagatatacgaatgtgggcaagcagagtcggttttgtggatcacccgtgaggctgttcaccaacgtgccactgcgacttcttcaattgccccctgaagagggctataagtactgccaaaaatgcgattgttacactgccaaggagaacctgcactgcaaccgctgcgggaagtgcccctcggtgaatggccaaacgtacaagcactgcgagtcctgcgatgcctgtgtgaaacccaactatgtgcattgctccgactgtagaaggtgcacgcagaaggagggacacaactgctccttctatcagaccaaacaacactgctggatgtgcggccagaaaggccatatcgaaaccaagtgcccaaacttccgcaagagaaagacgaactataccaaaggctgccttttgtgcggcaaacgaaatcacagggaaaagcgatgctcgtaccgctcaaaatacttcagggaacagtgttttatgaacgaaacaacaattcagtgtctttaagatacatacaaatatatatgtacaaagataaatacaaattgcatttctttatatactgaggggcactttagactgtatgcatttatgcagtttataagaacaacactgacaaaaccttcactaccatccataaacaacagggcacacatttgtttaatacaaaatttatttgttcttaacacttttcgttgaatgtcttacaagttcttgaattgcaacggctgcgcgcggaatttctgatgcacatgaccacgataaattgtggaatgaattctcagcccgccggatgaacgaacggattgggggaaaacgattaaattttgaaaatatgcattacgtttaaacaggtttttaacttaagcttaggtataattaatttcatgtggaaacacaccaatgcctcaacaagcggaatggatctcttcttatctcgccgcaaaagaaatgatgacgtcgacattgttcacgctcgttgaggtgaaagtattttattggctacgaaatgcatggcttaagaacgattgtatttgccccaaatgtgcagcatgaagacggaagcgatgaagagcagcgacatgaccagcacgggtacgggaccactgcagcaaaagtctcattagcactgggcctttaatataaatatagccgagttattcacttacactttgataccgggcgagtcgtccgtgtagaaacgccacatgccaccagttccggctccgccgggtgcacggctccgggccgctgtggtgctggtggtggtcttgcgctgcttcagggtgctgccgcctccggatccggcgctacgtggcgccgacaatttgctgggggagcgcgatccgctgcccacggacgttgaactggctggagcgggctggcaaatgtgttttaattagttgccgcactcaattgccatctagtttaactcaccattttgggctatctgttcctctggaccgactgacctggaaaatatgaacgggcgaagtggaatctgaacgtgaatctgaatctgacgtgctcggcttcgtgtcgcttcgtcttttttcgttccacgtcactttggtggtggcaccgctgccgataggtcgtgacgctgaggtgacagctatcgtgcacttagacagctggagatgacaggctaaggcaactcaactatcggctgctttggctctaaaatgaactagtaaaaaaaaaacgaagaaataatatattcaagttatgaatttaatagataacaataatagataaaatattaattctacaaaatgaattgtttaaatcaatttgaatgaatcctattaatataattggctattattaaaactccgataataaatgctattattcttgatttcccttgatttaattatataatacatacttaataactatataattatatagaataaaaacttaatcacgcatttaatagatcatatagatatagaatatatagaaaatcaatgaaatcgattttgatagcgataatgtgcaaccttgcatgtaagttatttttagattttagctgggcaagcgcaattttcttggcgcgcaccaaacaatttgtaaataatatttttgcttaactggtattggttcgactgcgaatcactaaaaattattaagtgacttaagcaccgtgttttaaacattgttaatcggaacggccacaccgaagcgcgggctcactaaacgcttttgtcatttttgcacatctgtacaacgttcacgttaattgcagcggcatcatctttgctggatttcaaaggaatattttgcggtgaaaagaacgaaaaagtgcttgcatttgtgcgctaatgggtatatgaggtccttctgctaaaggaatgccaagtcatacaaacttttcgcgattcgccttaatggaaatagataagacgcggcgcagttgaaagattgcaaattgatccaccgatcgaccgacgcacatgaaaagtgaagtatggaggacattgaatatttagacgagtacaaagacttggtgctgccaggtgcgtgatttcagcttccaatgctataaatactt

SEQ ID NO: 21467 - DNA, 780 bp, DROSOPHILA
cgaaaaaagacgaagcgacacgaagccgagcacgtcagattcagattcacgttcagattccacttcgcccgttcatattttccaggtcagtcggtccagaggaacagatagcccaaaatgcccgctccagccagttcaacgtccgtgggcagcggatcgcgctcccccagcaaattgtcggcgccacgtagcgccggatccggaggcggcagcaccctgaagcagcgcaagaccaccaccagcaccacagcggcccggagccgtgcacccggcggagccggaactggtggcatgtggcgtttctacacggacgactcgcccggtatcaaagttggtcccgtacccgtgctggtcatgtcgctgctcttcatcgcttccgtcttcatgctgcacatttggggcaaatacaatcgttcttaagccatgcatttcgtagccaataaaatactttcacctcaacgagcgtgaacaatgtcgacgtcatcatttcttttgcggcgagataagaagagatccattccgcttgttgaggcattggtgtgtttccacatgaaattaattatacctaagcttaagttaaaaacctgtttaaacgtaatgcatattttcaaaatttaatcgttttcccccaatccgttcgttcatccggcgggctgagaattcattccacaatttatcgtggtcatgtgcatcagaaattccgcgcgcagccgttgcaattcaagaacttgtaagacattcaacgaaaagtgttaagaacaaataaattttgtattaaac

SEQ ID NO: 21468 - protein, 100 aa, DROSOPHILA
MPAPASSTSVGSGSRSPSKLSAPRSAGSGGGSTLKQRKTTTSTTAARSRAPGGAGTGGMWRFYTDDSPGIKVGPVPVLVMSLLFIASVFMLHIWGKYNRS

SEQ ID NO: 21469 - DNA, 3004 bp, DROSOPHILA
gctagccagcgccatgtgcaattgtcctgccatccttcccacaccttcccacaccttcacatcctgcacctccgctctataaaattccgatggtcgatggtctgggtaatgaattactagccacatgctttttgtccaccgcccgctgtctcgcaacaatgacattgcagtttttagccgccgccaacaatttcagggccgcagacgattcaggatcctctacaggatactgaacccaaaaacgaagcacccataggccccactgtacgcgtctgtctgcaaattatgcgactttaattgttatatggccatggccactcttttaaatacttggcattgaaatacggcccagacgcaacattttaattaagatggtttctggccgttaagtgcaatcagataaagagtttttaaaaatgaatatattcatttatattcattggctatccacaaattattattattaattaatttaaagcagatcttcgggtacttttttttgattttggcaaataagaaatgtattaaaatgaaaatcttatcgcccgtcctaatcttttactagtatttgcacttagacaaaagacctctaaatccccgtatttaaagcaattgcaaaagtgctgccaacaacaaatccggcgctcaaataaagatttttcacttaagcagctctcagttcgaggaaaattctccagcgcccgaatgaaaaatgagttagggccgccagcattcatcaggccaagtgccgaaatggggaaaattgtaatgggaaaactaagaaaagcgtcgagggcgagaataccgaagcggaaatgtgacacgttgtacttgaatgcttcgcctggaagagcgtttccggttgccgcaaaaattaatttcattaatgcacgaaacaggagctggagaagcgagccaaggagcagagtaagactacgccgggccattaagttggctcgcagtttattcagcgaacatcacaaacgcagcaattaatatcctattcaaactgcttcttcagtttggccagttggatgaggaattcatcacgaacggcccgcctctcgtcgagtttttccagtgacaccagctgctcacactgccgtgcaatctcggccagcgtttcccgatcctcctgggtattcggggtctctccataggtggcactcaccgcagagatttccccaccaaaacgctggaagtagtcagccacaccaccaggcgcattcagatgggctgtctccagggatcctagcagggcatatcgcaatcccaagccctggctgagaactcgatccacatcggccacgctgaggataccggagcccaccaggcgccacacctcgttcagaatggcatactgaatccgattggtggcgaagccctgaatctctctttttaaagttaccggacgttggcccaggctgagcattaggtcacgggttcgctccaccgcactcggggatgtccagggagctgggacaatctctaccaggggtataaaatacggcgggttcagtggatgagccactagcatctgtttaaatatgaagcacttaactaaatccagggtaagaattgaacttgacccacctgttgtctcttttgcagaccctcgctgtacagcgatggcataaaggtgctcgtggaactggccaccactgtctgctcctcgagcagctcatccaactgcgagtacagactcttcttcagatgcaaaacttcgggaacacactcctgtatgtgcaccgcctccctggtgagttcctctagtcgagtggtgaccccgatcagggcaaactgttccgaggcccgtatattgccacgcaacgcgctctgctcctccagccgatgcaaatccttgtccagctcctgcagcgcagtggccaactggctctccaggatgtcatacagttggacacgatagccagctgctgcaaagagcatcgcccacgccctgccgatcagtccactgcccacgatcccaatcttttggctgctcatttcgaactatcatcgggtagcgttccgaatatacgagtaagtggtccggatcagaacggaactgcagatttatcgccatcggttcaagttcagcccacaatcacatcagtcatgcggcattgtgccccactattgataataaattgtttatttatgaacgtacactgcgaaaaggaccgttaaccctttcaaatgtgcaaatttaaatttaattttcaaatcagaactatttgacatactaaaatctttgctttataaagatgtaaacaaaatttagaacggaaactactactacttgccacatgaggcaactgcaaaggagcaccagtaacattattttcatcgttctatgtgccactgaatttaaatgaatctgtatataatctttttataattgttgtgtggaatgatctaatcatttgaactttatcttgtttgaaatcataaagcatgagtgttcaataccagctaacatcaatgttaggacttgcagatacctggtactcttttagccagtttcaaatttaaattaaattattaggaaattaagaaagttgcattactttaactacagaatgtaaatggtaacagtctaaatgcttccatttccttattaattaattagacacaccaaagttttcatattaaagcaacagataattagtagcagtcgtttcttgagtccttaccctgaagcgcttttaggccagattcgaactgagattgtacaaaggaaaaccctttgaagtctccacaaatttaataattaatttcggctcacatttactcatattgtatcggttcaagtgcgctgtccaccaggcaccacgccaccccaacacctcttcaccctgccatttacagtctcattaaatttaattgcttatcaactttgaaggccctgtgaaatgctcggcagcccattaattgataatcccatattttgtgatttattaaagcttaagctttccctttcagcgataaggatgggcacatatat

SEQ ID NO: 21470 - DNA, 948 bp, DROSOPHILA
atgagcagccaaaagattgggatcgtgggcagtggactgatcggcagggcgtgggcgatgctctttgcagcagctggctatcgtgtccaactgtatgacatcctggagagccagttggccactgcgctgcaggagctggacaaggatttgcatcggctggaggagcagagcgcgttgcgtggcaatatacgggcctcggaacagtttgccctgatcggggtcaccactcgactagaggaactcaccagggaggcggtgcacatacaggagtgtgttcccgaagttttgcatctgaagaagagtctgtactcgcagttggatgagctgctcgaggagcagacagtggtggccagttccacgagcacctttatgccatcgctgtacagcgagggtctgcaaaagagacaacagatgctagtggctcatccactgaacccgccgtattttatacccctggtagagattgtcccagctccctggacatccccgagtgcggtggagcgaacccgtgacctaatgctcagcctgggccaacgtccggtaactttaaaaagagagattcagggcttcgccaccaatcggattcagtatgccattctgaacgaggtgtggcgcctggtgggctccggtatcctcagcgtggccgatgtggatcgagttctcagccagggcttgggattgcgatatgccctgctaggatccctggagacagcccatctgaatgcgcctggtggtgtggctgactacttccagcgttttggtggggaaatctctgcggtgagtgccacctatggagagaccccgaatacccaggaggatcgggaaacgctggccgagattgcacggcagtgtgagcagctggtgtcactggaaaaactcgacgagaggcgggccgttcgtgatgaattcctcatccaactggccaaactgaagaagcagtttgaatag

SEQ ID NO: 21471 - protein, 315 aa, DROSOPHILA
MSSQKIGIVGSGLIGRAWAMLFAAAGYRVQLYDILESQLATALQELDKDLHRLEEQSALRGNIRASEQFALIGVTTRLEELTREAVHIQECVPEVLHLKKSLYSQLDELLEEQTVVASSTSTFMPSLYSEGLQKRQQMLVAHPLNPPYFIPLVEIVPAPWTSPSAVERTRDLMLSLGQRPVTLKREIQGFATNRIQYAILNEVWRLVGSGILSVADVDRVLSQGLGLRYALLGSLETAHLNAPGGVADYFQRFGGEISAVSATYGETPNTQEDRETLAEIARQCEQLVSLEKLDERRAVRDEFLIQLAKLKKQFE

SEQ ID NO: 21472 - DNA, 5951 bp, DROSOPHILA
ccgcccattgtgctcattgagcaactggatatggtgcaaatctttcagcgcatagctcgtcgcccgtacacggaatccatattgatgctctacctgcaatccctgaacaagttcaacattgccgcccaggaggagctgagcaagatgatcatcagcgagctgatctccaatcgcagcttcgacaccttgcgacgcttggtcagctattcaatgctgctggaatccaagtcggtggcttgctttttgttgtcgcattcaaatgtggatacggcgatatcccaggtggccatcgatatgctgggcaggattgaagcacatgaggtggatataactataattagatatttttactaagatgtatgaactaacaatattttttagatcatcattgaagtaatgctgggtcaaggcaaagttattgatgccttaaggctggctaagaattcaatgggtctggaaaaagtgccagctcgcaagtttctggaggcggctcataagacaaaggatgatctaatattccacagcgtataccgctttttccaaatgagaaacctgaaactttatgaaaccctatcttttcccaagggtaagctaatttgtaatcttgaattgcggcatcactttttaaacctttgaatttcttatttaacagctgaacaatgcacggaattcatacagcattataataacacttttcctgctgataatcctaccagacagcctgtaagctaaaggaaaaatggcaatttgtgattaatataatttaaagtgtgctttagaaagtataaacatactgaagtataaacatacttttgtattgaattgtaaatatatccaattgaaatgatgatcattttatacgaaagtaaaggaatgactcaaacaagaaccataaaaatacggatttttcatgcaatttttttacttacacatacaatacacatagttgtacaataaatacatagaggaataaatggaatatacaaaaaggacgatgaaactatataaatcgcctgggcggtgccttcagttgcaaggcacccatttccaaggacgaggaaatgctgattagatttttatttggccgcggcaaaccaatactttgatctggaatggccgtaaagcaccgtggacattcttcaaactgagtctccgactcctccatgcactgctcgtgtatgccatgcccacatccgccaaatattagcacctggctgtgatcgtacagcctttggcgacacatggagcactttgtggtggtcacccaaagtccacgatgcgcatgctgatagcgcttgacgaacttcaggtgaagatcttgacacagggctccagcagatgctcgcaaagcctccgttttgtgcctcgaactgtccagcatacccattagaagatcctttatatcaccgaaactagttgacacattgtgggtattcataatcaattgaaccaaattatgcagatcgatatgctgtgaggcctcgtgcagcagagatttggtaatggactgaagctcctgatgcggcagaatatattgcaagagagcgaaccaacagcgttccagttcctgggctggtaacgtttccacagaccgagccaaaagagccgatatagtctgtgcctccttggctgcttcctcgccagcagcggacttaagcagttccatggacaactcaaaggctttcgcatagctctcttgcttttcatacagataaatcacagatcggttaaggtgatggctttcagctatggcaatggcattctccaagcgataacccgaattggatcgaaggaattcttcgacggtagacgacgactccattttgcaatataattccagtagtaactccatttgactggcttccagttcgcttttacgatcattgaggcacttgaggaacagatataacaagttctcctcccttctcaggttatctaaaagctcattaatcttttctggatagtgcagagacagcaagcgagtggtttccttggcattgatcgttagtagctcccttagattccttttcaactgccggaaaatgcttctctttggtgaagcaacatggcgttccatatatgcaaacatggtttcgtgcctggcttcgtttcggatgtaggaatccaggatggtatcgtatcgctcaagcttctccaataggtactccactacgcaatagcacttcgccttctctgctaagcgcagctgctcctcatcgctgctgatctcggccaggcagttggaggatagtagctcgtgccatgcattctctcgctcggagtgttggcgactgctctcgttagcaatttcctcctgcgccaagtggctcaaaactcgttccagaagctgtctatcccgcggcaggcattgcattgaaatctgctgagcaatgaagtttagcaagcaaccaatctccgcccactggaagataaagagttttttgttggatgactagcaattatggttaacaaaccttaccgttgcattctcgggcgacatgatttccagtagcagattgataatcctcttgcgatgcgagattcccagctcgttgctaaactctcgttcctgaaacgccagcgatataacgtttagggtttcccgagtatcgaacttgaggagagctctaagatagggatagggcagttcatcgccggcattctccttggaatgctgggaggtcaggcaacgcaggacatcgtgcttgacttgatgcaccagctccacgggaatttctccgctgggatattctcttccagccagacaactagaaacgtagaccagcaggcagttgcccaaatccgtctcatctggggtcaccaatggaaggagctccgtgagcgccgccgtatagtcattcaaagcttgggtgttgaggtagatttgagccctaaacagacgatgcttcttcacagccttaagcacctggttgagatccaggcacatccaatccagtttgaggataagctgttcaagtttggcaggggagtgttccagccagtaatccaccaaagcttgggatatcactggattaacactatgtatcgtttccttttctatatgctcggaaatgtgctgtaagaaaagttcagtgctgctgttgtgtaacttttcccacagctgtgtccacagaagatccagttcacccacggtgatcaagcagttaacaatggcgccgagacaatactctggtgcccgggcggaattggcgatatattccttaaaaagcatgatgatacgctccttggcttgagcacgtttcctcgggcgatccacagaggcaatgtagccatcaagtgccagttggcaggcttcctgccatcgatggtgttttacctagaaacgataaagttgaggctttgattttccatttaaatccacagttttgatcttaccaggaagcttattctctctgaccaagttctaactccaattatatgcagggacctggcgcctaaaacgtacaactgggttcctcttgaaaccactgagttataacaggcatttgagccggctaaagcgaaggcaggtgacacatttccgccagtggctagtcctttaaactgcgctgatccgtagaccagtcctgcgttggccatatccatacattctagttccttactggatcgcacatccacaagatgaagtatttccgccgtgtccaatgaggcaacacactttggtcccagccagtgagcggagaggagactcccctgcagctggacatgtcgaaggtataaaagcgttattcgtccgttcgagacaaacagttggtgaaagaataattgattcccgcggcccacgacaatcacggggtccacggagcgggaagtatctgccgcttgaatgagtactaaatgccaggcgaggagaggtaagcaatcaggaggtccctgaagcacgtggtatttgatgacccttaatcttggtcggacagtgacgataaaatacttggataacgttgccagagccacaatgcagtactgatccaattcatggcgtccttgggagtccattattagaggttccacggcgcagacctctccgcgagcgccggagaagaggcatctcgattggcagccacggatgcccagcttccgggtgaaactaagagaccacaccgatccgccggcatcggcacacaaggccagtgatgatctcgaggtccacttgacatgcagtacgccggtgtttggggttatgacgtcgaacagctcacggagaacatcacccgtatgagtgtccagcatggcaaccaatcccctagaaaaaccagccaaaagtcgcgttgaatccgcattgaaagccaaactggccaccgcaccctgaccatgcttgtcctgatgggcccacctaagggtttgggttacatcgaagttcaaaatgtgtccatgcgatgttccgatggctatgaatgcggccacggcacaggaactggctgctccggcattgacacgttccgccgctgaggaaagttgtgccgagatgccgtgtaggagggtgtacctcattatggatcctccaccacctctgccgtctgttctgatcgtggaatcctcaccaatcgagggcgtgggcgtggcatggggcaccggcattccaaactcggaggccacatccgaatccgcctcaaattcactgagcaccgcctccaaagtaggcagcacatcggtgggcggtattgcaaactcggcatcatcaagctataattggatgaatcaagataaagtgttatctaggccattccattttcgggtaatcccaactcacatcttcgaagtccagctgcagggattcggccagtaggctgtctgtggatcctcgctccgattccagcagagattgcagcgacggggccttaagctccgacatgctcccggttctttcaatcctgatccctcccccaaactaataattttaagtgattttgtttttatcaatgagtttctacgcccatcaaaggactgcccactcgtttgcataacagatgtctttcggttgcttatcggtttctgttatcgatgattttatataaaaacttaatttaattggacaaataacagaggtaaagataaattttaaattctgaggaaggcgtatatttgtttttgttcctttaagaagcaggaattttaaattattcatttagaaataagcttataactggaaacagtctacaacttaatgggagtataaaatttaatgttaagttcaacaaagttaaaaatttaatatcgaaaatttaaaaacttatcgagtgagaggaccaatcgactactcgacttagcaaacatcgaaatatcgcaggttggacctcacatcgccatctgttccatcgctagttcatctttgttttcatcgcgttcggttcagtgcagcggacgattttgctgctcgcgaggccagcagatattaattaaaatgcaataaagtgtgttccgagccatttgaataatcgcgtaaccaaaaacaatgcgcggcgcactagattattaatcggattcgcttatctgccagttgcagcagcccgtgattgcgggccaagagcaaaacgcgagtggaaatttcgattattgtattgtttgttgccatgcataagacacttgtgcaaaatgggcattagcagacactaacgaatagtactaaacaatggcgcagtgattgggacacgaaatataaataaaatatttgtttatttgagcgtgcggcgctttgccaaattaatcgctctctttctggcatttccactctcttctttacgcgcctttcattcagtcgcgcgtatgtgtgcgggtgtgcgtgcgtgtgtgtatgagccagtgacgtaaacaaatgcacaaaagcgaatgagtgcaagaatttgaaaaatgcgattgtcgattcacgtgccaaaaaaaagtaacaacaaacgggagcagcaggcagagaacaactcaggcagcaacaaatt

SEQ ID NO: 21473 - DNA, 3768 bp, DROSOPHILA
tagaaactcattgataaaaacaaaatcacttaaaattattagtttgggggagggatcaggattgaaagaaccgggagcatgtcggagcttaaggccccgtcgctgcaatctctgctggaatcggagcgaggatccacagacagcctactggccgaatccctgcagctggacttcgaagatcttgatgatgccgagtttgcaataccgcccaccgatgtgctgcctactttggaggcggtgctcagtgaatttgaggcggattcggatgtggcctccgagtttggaatgccggtgccccatgccacgcccacgccctcgattggtgaggattccacgatcagaacagacggcagaggtggtggaggatccataatgaggtacaccctcctacacggcatctcggcacaactttcctcagcggcggaacgtgtcaatgccggagcagccagttcctgtgccgtggccgcattcatagccatcggaacatcgcatggacacattttgaacttcgatgtaacccaaacccttaggtgggcccatcaggacaagcatggtcagggtgcggtggccagtttggctttcaatgcggattcaacgcgacttttggctggtttttctaggggattggttgccatgctggacactcatacgggtgatgttctccgtgagctgttcgacgtcataaccccaaacaccggcgtactgcatgtcaagtggacctcgagatcatcactggccttgtgtgccgatgccggcggatcggtgtggtctcttagtttcacccggaagctgggcatccgtggctgccaatcgagatgcctcttctccggcgctcgcggagaggtctgcgccgtggaacctctaataatggactcccaaggacgccatgaattggatcagtactgcattgtggctctggcaacgttatccaagtattttatcgtcactgtccgaccaagattaagggtcatcaaataccacgtgcttcagggacctcctgattgcttacctctcctcgcctggcatttagtactcattcaagcggcagatacttcccgctccgtggaccccgtgattgtcgtgggccgcgggaatcaattattctttcaccaactgtttgtctcgaacggacgaataacgcttttataccttcgacatgtccagctgcaggggagtctcctctccgctcactggctgggaccaaagtgtgttgcctcattggacacggcggaaatacttcatcttgtggatgtgcgatccagtaaggaactagaatgtatggatatggccaacgcaggactggtctacggatcagcgcagtttaaaggactagccactggcggaaatgtgtcacctgccttcgctttagccggctcaaatgcctgttataactcagtggtttcaagaggaacccagttgtacgttttaggcgccaggtccctgcatataattggagttagaacttggtcagagagaataagcttcctggtaaaacaccatcgatggcaggaagcctgccaactggcacttgatggctacattgcctctgtggatcgcccgaggaaacgtgctcaagccaaggagcgtatcatcatgctttttaaggaatatatcgccaattccgcccgggcaccagagtattgtctcggcgccattgttaactgcttgatcaccgtgggtgaactggatcttctgtggacacagctgtgggaaaagttacacaacagcagcactgaacttttcttacagcacatttccgagcatatagaaaaggaaacgatacatagtgttaatccagtgatatcccaagctttggtggattactggctggaacactcccctgccaaacttgaacagcttatcctcaaactggattggatgtgcctggatctcaaccaggtgcttaaggctgtgaagaagcatcgtctgtttagggctcaaatctacctcaacacccaagctttgaatgactatacggcggcgctcacggagctccttccattggtgaccccagatgagacggatttgggcaactgcctgctggtctacgtttctagttgtctggctggaagagaatatcccagcggagaaattcccgtggagctggtgcatcaagtcaagcacgatgtcctgcgttgcctgacctcccagcattccaaggagaatgccggcgatgaactgccctatccctatcttagagctctcctcaagttcgatactcgggaaaccctaaacgttatatcgctggcgtttcaggaacgagagtttagcaacgagctgggaatctcgcatcgcaagaggattatcaatctgctactggaaatcatgtcgcccgagaatgcaacgtgggcggagattggttgcttgctaaacttcattgctcagcagatttcaatgcaatgcctgccgcgggatagacagcttctggaacgagttttgagccacttggcgcaggaggaaattgctaacgagagcagtcgccaacactccgagcgagagaatgcatggcacgagctactatcctccaactgcctggccgagatcagcagcgatgaggagcagctgcgcttagcagagaaggcgaagtgctattgcgtagtggagtacctattggagaagcttgagcgatacgataccatcctggattcctacatccgaaacgaagccaggcacgaaaccatgtttgcatatatggaacgccatgttgcttcaccaaagagaagcattttccggcagttgaaaaggaatctaagggagctactaacgatcaatgccaaggaaaccactcgcttgctgtctctgcactatccagaaaagattaatgagcttttagataacctgagaagggaggagaacttgttatatctgttcctcaagtgcctcaatgatcgtaaaagcgaactggaagccagtcaaatggagttactactggaattatattgcaaaatggagtcgtcgtctaccgtcgaagaattccttcgatccaattcgggttatcgcttggagaatgccattgccatagctgaaagccatcaccttaaccgatctgtgatttatctgtatgaaaagcaagagagctatgcgaaagcctttgagttgtccatggaactgcttaagtccgctgctggcgaggaagcagccaaggaggcacagactatatcggctcttttggctcggtctgtggaaacgttaccagcccaggaactggaacgctgttggttcgctctcttgcaatatattctgccgcatcaggagcttcagtccattaccaaatctctgctgcacgaggcctcacagcatatcgatctgcataatttggttcaattgattatgaatacccacaatgtgtcaactagtttcggtgatataaaggatcttctaatgggtatgctggacagttcgaggcacaaaacggaggctttgcgagcatctgctggagccctgtgtcaagatcttcacctgaagttcgtcaagcgctatcagcatgcgcatcgtggactttgggtgaccaccacaaagtgctccatgtgtcgccaaaggctgtacgatcacagccaggtgctaatatttggcggatgtgggcatggcatacacgagcagtgcatggaggagtcggagactcagtttgaagaatgtccacggtgctttacggccattccagatcaaagtattggtttgccgcggccaaataaaaatctaatcagcatttcctcgtccttggaaatgggtgccttgcaactgaaggcaccgcccaggcgatttatatag

SEQ ID NO: 21474 - protein, 1229 aa, DROSOPHILA
MSELKAPSLQSLLESERGSTDSLLAESLQLDFEDLDDAEFAIPPTDVLPTLEAVLSEFEADSDVASEFGMPVPHATPTPSIGEDSTIRTDGRGGGGSIMRYTLLHGISAQLSSAAERVNAGAASSCAVAAFIAIGTSHGHILNFDVTQTLRWAHQDKHGQGAVASLAFNADSTRLLAGFSRGLVAMLDTHTGDVLRELFDVITPNTGVLHVKWTSRSSLALCADAGGSVWSLSFTRKLGIRGCQSRCLFSGARGEVCAVEPLIMDSQGRHELDQYCIVALATLSKYFIVTVRPRLRVIKYHVLQGPPDCLPLLAWHLVLIQAADTSRSVDPVIVVGRGNQLFFHQLFVSNGRITLLYLRHVQLQGSLLSAHWLGPKCVASLDTAEILHLVDVRSSKELECMDMANAGLVYGSAQFKGLATGGNVSPAFALAGSNACYNSVVSRGTQLYVLGARSLHIIGVRTWSERISFLVKHHRWQEACQLALDGYIASVDRPRKRAQAKERIIMLFKEYIANSARAPEYCLGAIVNCLITVGELDLLWTQLWEKLHNSSTELFLQHISEHIEKETIHSVNPVISQALVDYWLEHSPAKLEQLILKLDWMCLDLNQVLKAVKKHRLFRAQIYLNTQALNDYTAALTELLPLVTPDETDLGNCLLVYVSSCLAGREYPSGEIPVELVHQVKHDVLRCLTSQHSKENAGDELPYPYLRALLKFDTRETLNVISLAFQEREFSNELGISHRKRIINLLLEIMSPENATWAEIGCLLNFIAQQISMQCLPRDRQLLERVLSHLAQEEIANESSRQHSERENAWHELLSSNCLAEISSDEEQLRLAEKAKCYCVVEYLLEKLERYDTILDSYIRNEARHETMFAYMERHVASPKRSIFRQLKRNLRELLTINAKETTRLLSLHYPEKINELLDNLRREENLLYLFLKCLNDRKSELEASQMELLLELYCKMESSSTVEEFLRSNSGYRLENAIAIAESHHLNRSVIYLYEKQESYAKAFELSMELLKSAAGEEAAKEAQTISALLARSVETLPAQELERCWFALLQYILPHQELQSITKSLLHEASQHIDLHNLVQLIMNTHNVSTSFGDIKDLLMGMLDSSRHKTEALRASAGALCQDLHLKFVKRYQHAHRGLWVTTTKCSMCRQRLYDHSQVLIFGGCGHGIHEQCMEESETQFEECPRCFTAIPDQSIGLPRPNKNLISISSSLEMGALQLKAPPRRFI

SEQ ID NO: 21475 - DNA, 2867 bp, DROSOPHILA
aagtcgtttaattattgaacaagaagggctaaccgggcctttggttggctggcaatcaaatttggaatggcctggcataaaaattgtaagcagatttccattggcatgctgtcatttccatagccattgccattgccattacttacttacatcaaataaaaccagtttacagcccgacacataaagttctccaattgagggaaaatcggaaaaacacagaaatcaaagtaagcacctaagcggcttatgcaaaagacaatcgagccccatacccacttctagatcttcttcttcgcattttattcccattttacaatgccaataggcaaaaagtgttaaacaaaatttgcgtctggcgtttattgagtggaacgaacgcctcagttcgagctgaatggaaaatgtaaaaatctaaccagccactcgccgggtaaaagcaaaagtttaaattactttctagtaaaactttgatccgcaacaaaaaaaaaatgggctaaaagcagaatgccagcgagattaatgcttaaagcgtaaagggtaaaatgctgaattgttaaataactaatgcatggccaatgaacttgccgagcaaaagttttagcaatttatctgcgtgcccccttttgcgcctgctttagtttccttcaaaatattttatgttaaatacatgatatgaatttcgaaaaaaatccatgttctatggtgcaacatttttttgaaaattataattaataatctcaaaataatttactacattttttgtatagaactttttaaaaacgaaaagttctgaaataaatttttattcaaaatgaagaaccatttatacatagtgcagttggttctctttaaaaatatttactaataatacaaaattaaggtgtttcaaagtaataataaaaatgtatccaaaatttactaaataataaaatgatttttttttacaaatttacaattttttttccttacaaatttcgaatagaagtaagcctcccaggttagcaaaaatgttgcatatttaattaatcataattgtacagttcatgttttattcaaactatagtcaatactaaaaactaatattttaattataagtgggagcccgatcgatggacgctgcctccaatatcaccttcattatcttgtccttggcaaactcggaggcgtcggtgttcaactgtcgtagccggtcggccacaaagtctccgaagatctgggagctgtccttctgggtgcgcagagcattggccactgccttgttgaccatttcctcgtccataatgctgatggtggacatctcgccctcgccttcaacgtcgtcctctagcctttgctcgccgccgccggtcagggagcacgatgagaacatgacctgctctggttcgtaaagtgccaggttctcaatgatttcctcgtagtcgacggactgatccgatgcactgattttttccttttttaccggggaagtttttggctgcgacttcaccttgaccttgtagggagtggtgctggagctgctggcggatgacctgtttaaggggctgtcgtctgtggttttctggaaaggtgatagatccaaattaggcgggattgatgacaaactgtgcacacttacgatttgctgtttaaggtttaagtgcttcatatgcttcttggtcgacgcatgtgcacgcagatcgcttattttggtgtttacgcagcatttgcagaagcggcagtgcgcccggtaggagtcgtccggatcacgccgcagccacgcacgaaactcctccatttgcagccacacatcgcgcagtttctgcttgtaaattttcataattcgacaaaaaagcgcaatggaaattaattaaaacacgacgtacagcaacaatgtcaatgcaatagtgatgacaataacaatgagagtagtgacgcctgccgccagtgttgccagtttgctggcagcaaaaaagctgtttctagctgtacagaaaaaaagctgtcttacgcagggcgaagaaagctttaaaaaagctaaaacgccacagtgcgcctgtgtgcttttcgtgacgcttatagatagccaggttcaataatagcatgagtacgatatttatttacaattttattatatacaatataataattattaattgcattattaatttgatatatatattggtacattttttgttttgttttatttcactaatatattaggaatatttttagtgaacaggcgaatattaaatttatctaatggctcgaatttagctagatattaccaataaattagctgatctggccacattgtcatctctagatgaattcttgctatcgtgtgcagctacttactgatcatgacctatcgatagcacagtaatcagcttatcgataagccgcgatcaaatgtttttttgaataatttaattcaagtagtagtatagttaaaaaatcaaaataatcgaataatctttataatcttaattttatacaaaaatttaagaatacgggacaccggttttttgaaccatttttttttcattttgcattctttcaattcctaccaaatattgtgtgccttttttttattttattagggagaattcacccgccatgcgatgtcctttgtagtagggcttccgggcattggcaaaggactctcgagctggcagacaaacaaaactgaaccgcagacaacccactcaattggagttggctcctttaaaagttcattcgtttgtaaataatttttagccggcggcaaaatcgatacttcgcttaagatttttgcatatatagcgaccatcgcatagctctgaaaattttgtcaagctgcgcaaaactttcaacggcagccgacgagcaaagttatatgagcagcgtat

SEQ ID NO: 21476 - DNA, 810 bp, DROSOPHILA
ttgctgtacgtcgtgttttaattaatttccattgcgcttttttgtcgaattatgaaaatttacaagcagaaactgcgcgatgtgtggctgcaaatggaggagtttcgtgcgtggctgcggcgtgatccggacgactcctaccgggcgcactgccgcttctgcaaatgctgcgtaaacaccaaaataagcgatctgcgtgcacatgcgtcgaccaagaagcatatgaagcacttaaaccttaaacagcaaatcaaaaccacagacgacagccccttaaacaggtcatccgccagcagctccagcaccactccctacaaggtcaaggtgaagtcgcagccaaaaacttccccggtaaaaaaggaaaaaatcagtgcatcggatcagtccgtcgactacgaggaaatcattgagaacctggcactttacgaaccagagcaggtcatgttctcatcgtgctccctgaccggcggcggcgagcaaaggctagaggacgacgttgaaggcgagggcgagatgtccaccatcagcattatggacgaggaaatggtcaacaaggcagtggccaatgctctgcgcacccagaaggacagctcccagatcttcggagactttgtggccgaccggctacgacagttgaacaccgacgcctccgagtttgccaaggacaagataatgaaggtgatattggaggcagcgtccatcgatcgggctcccacttataattaaaatattagtttttagtattgactatagtttgaataaaacatgaactgtacaattatgattaattaaatatgcaacatttttgct

SEQ ID NO: 21477 - protein, 224 aa, DROSOPHILA
MKIYKQKLRDVWLQMEEFRAWLRRDPDDSYRAHCRFCKCCVNTKISDLRAHASTKKHMKHLNLKQQIKTTDDSPLNRSSASSSSTTPYKVKVKSQPKTSPVKKEKISASDQSVDYEEIIENLALYEPEQVMFSSCSLTGGGEQRLEDDVEGEGEMSTISIMDEEMVNKAVANALRTQKDSSQIFGDFVADRLRQLNTDASEFAKDKIMKVILEAASIDRAPTYN

SEQ ID NO: 21478 - DNA, 3874 bp, DROSOPHILA
aggtttatttgtatatatttatcacattctgtgcctgtcactaattttccataaatgccaaaacaataaaccagaatatatttttgcatactctttcgaacgaaagtgatcaatagtaattaaagataaatttgcaagcaatactgtagtcagtgtttatcagttatcagttttcccccatttcccagccgtttttagctgtttttccagattttccaactttggcatgtggcacacaattaagatgcaaattgtttttgcacaaaatcaaatttctctctccggcagacaacaacaggcatatcagtttgccacttgccgaactctttccgttttcccaactctttgcagttgttgttgctaagtgacaaatacaacaacaacagcaacaacaacaattggggaaaatgcttaaatgtcgttcaagtttgcgagttaagtgcactacgtatgcaatcgacacatgtgtgcaacaaaactcgttaacacttgaaaagtttcatgggcccgagggcaggtcggaaaattctgggctcactgcacttcccacacacacacacccatccgaactgaagggacgtgtcccacagatacatacgtctgtgtgtgtgtgtgcgagtatctgagtgcgagcaaagtaatgctgctgaaaaaacacttaagcaaaatgttgtatatattttgtaaccaagtgaggcgcagagttgagcttgcctccatttagttcgttagataaatctttgcgtgcctgtgtgtgtgtgtgtgtgtgttagccagcacgagtgtgtgtgtgttgccctttgggcatcttgtaatcgttggggctgagacccgattgacaagtagatgatgcctggaatgcaaatcctatgctccctcaaagaaactctcggcaaattgcttgaaagcatcacttgacgttggccaatgctacaagagtttccgacttcactacgtaataataggtagtaattaaatagttttgaaagaggacctgaaacatttgatttttctgactttaatttctaaattccataaaatgtgaaaaatttatatttgaaagtcaaaaaataggggcaaagcgcagatgacggtcctgttgagccacaggatgctcctcgctggatgggcgaggcgtgccacgcccaccgccgcccagtggatacaccacaatccagaaaagatgacgctgctcgagatgctgggcaccaccaatctacgcaagagcacccccaaggactaccgaatcctgcgcgagatcttcaactccttcgaacgatactccggagtcggcaacgacattcaattgaccttgccagagcgcgctgccaacgagctgatcatgtgcgaaaagaagcgggagtacgagaagggcatcatggatccatcgaagttcgcgccgggacaccacatcttccaggtgctcaccaaggtgaagaagtcgccgctcttccagatcctgcgacggatgcccaagggtgcggccctcaaggcgcacgacacctccatgtgcagttcgagggtggtgatcgagataacctatcgggataacctgtgggtatgtaccacacaaaacggctgccgtgtggaggagttccgattcgcaaaggataagcccaaggacgtcagtttcgagaatggcgagtggcagcccatggaaaagctcagagaattgcgcggcgaggagaatcttagaaagtatttacaaatgcgattcagcatgtaccctttggccagctttacgaccaatgcccacgcctggcgccacatgatgggcatctttggcctgctggacggtctactacagtacgcccccgtttggggcgactactactacaatgcgctaaaggaattctacgccgacggagtgcaatatttggaggtaagatctgtgctcccgcagctctactccctggatggtagccggatgcccaagcgggaaactgtgcaaatctacaaggacacactggagcgatttaagaaggagcatccaggattcatcgattccaaactgatatacgcgcccattcggcatgtgcaaccagaattagtgggagaatacattaaggagtgcacagaactgaatgtgagtataaattgccatccatgaattctggtcccattagaatttaaactacgtgtaatgctgtattgcttacattttgtagcctaattgttagtaatcgacttcgctttagaaaaatagagaagcacagaatatacaaaatgcattctaattaaaaccattttcagaaagagtttcccagcttcgtggttggcttcgatttggtgggtcaggaggacgtgggtcatccgctgagcaatttcgcagcggagctactcaagctgcccgaccacatccacttttacttccacgccggccagaccaactggtatggatcacatgtggaccagaatctgttggacgccattgtgctgggcacgaagaggatcggtcatggctacacgatcaccaagcacccggtcctcatgcggctggccaagtacctgaacatcgcgctggaggtgtgtccggtatccaaccaggtgctccaactgggatccgactaccgcagtcatccggctgccacgctgatcgccgagaatgtgcccatggtgatcgcctccggcagtccgggcttctggcgagccgctcctctgtcccatgacttctacatggcctttctgggcattgcacccatgaatgccgatctgaagtttctcaagcgaaccgccaagaattccattaagtacagctcgctaaaggatgaggccaaggccgaggccatggagaagtggaaaaagcaatgggataagtgggtcgagaatatagtcagacaaaggaaaaaggattcagagactgaaaagaaataaagcacatactagatagctgactaataaattgcatgtgtactatacattgttagtatatgtttctataaatatttaaacaactcttaccgtactatcattatttgaagcatgaaactttacaattagtcaaagtacagcaatggcgttttggatgtcactcgactttttcgtagtttgtccccagttcgaaatcgtacctgaatttgcgcaacattgttgtagggaccacaaacttttccactcacgcacatcgaaaagccccaaagtcaatgaccaatggcaaaatggggggggaaatattcgggataaaccttgagctgcactttcagtcgcaccgcaaattgtttgagtttccgcttcttgattatttcaggcaaaccaataagtttcttgccaactttttattgcatacttcgctgcgggtggtggagagggtggtggtgaaagtggggggtcatgcaaatgtcacagaaactaacacttccgggtcgtatatgtgtgggtactaatttcattgacttccatttcccgcctacccatacacacacatgacagagttagcggagggcgagaagtttggaaaagtcttcgatacgatcaagaaaataaactttctgccctgcctgccattgcttataattaaaaactttattatttgtttaactttgcccgcagctgttgcacatttgacagacagagacagagggtagctgtgcaggaaaatggggaaaactctgttcgcagccacacaagaattaccagcaattatcgaaaaagtttcgctttatttatcgcccgaaagtcactcagttttctccatacacattttttggtcctttcaatctaccaatacagaaattgacagccatgtttctgtcaactttttaacgatgcaaaaacacatttatgccagagcgctcctggcgacgtctaatttgcaaattcatgaatataaagtggcctcgcaatgccaaacaaattaatcaaatatgctaatttt

SEQ ID NO: 21479 - DNA, 1707 bp, DROSOPHILA
catttgatttttctgactttaatttctaaattccataaaatgtgaaaaatttatatttgaaagtcaaaaaataggggcaaagcgcagatgacggtcctgttgagccacaggatgctcctcgctggatgggcgaggcgtgccacgcccaccgccgcccagtggatacaccacaatccagaaaagatgacgctgctcgagatgctgggcaccaccaatctacgcaagagcacccccaaggactaccgaatcctgcgcgagatcttcaactccttcgaacgatactccggagtcggcaacgacattcaattgaccttgccagagcgcgctgccaacgagctgatcatgtgcgaaaagaagcgggagtacgagaagggcatcatggatccatcgaagttcgcgccgggacaccacatcttccaggtgctcaccaaggtgaagaagtcgccgctcttccagatcctgcgacggatgcccaagggtgcggccctcaaggcgcacgacacctccatgtgcagttcgagggtggtgatcgagataacctatcgggataacctgtgggtatgtaccacacaaaacggctgccgtgtggaggagttccgattcgcaaaggataagcccaaggacgtcagtttcgagaatggcgagtggcagcccatggaaaagctcagagaattgcgcggcgaggagaatcttagaaagtatttacaaatgcgattcagcatgtaccctttggccagctttacgaccaatgcccacgcctggcgccacatgatgggcatctttggcctgctggacggtctactacagtacgcccccgtttggggcgactactactacaatgcgctaaaggaattctacgccgacggagtgcaatatttggaggtaagatctgtgctcccgcagctctactccctggatggtagccggatgcccaagcgggaaactgtgcaaatctacaaggacacactggagcgatttaagaaggagcatccaggattcatcgattccaaactgatatacgcgcccattcggcatgtgcaaccagaattagtgggagaatacattaaggagtgcacagaactgaataaagagtttcccagcttcgtggttggcttcgatttggtgggtcaggaggacgtgggtcatccgctgagcaatttcgcagcggagctactcaagctgcccgaccacatccacttttacttccacgccggccagaccaactggtatggatcacatgtggaccagaatctgttggacgccattgtgctgggcacgaagaggatcggtcatggctacacgatcaccaagcacccggtcctcatgcggctggccaagtacctgaacatcgcgctggaggtgtgtccggtatccaaccaggtgctccaactgggatccgactaccgcagtcatccggctgccacgctgatcgccgagaatgtgcccatggtgatcgcctccggcagtccgggcttctggcgagccgctcctctgtcccatgacttctacatggcctttctgggcattgcacccatgaatgccgatctgaagtttctcaagcgaaccgccaagaattccattaagtacagctcgctaaaggatgaggccaaggccgaggccatggagaagtggaaaaagcaatgggataagtgggtcgagaatatagtcagacaaaggaaaaaggattcagagactgaaaagaaataa

SEQ ID NO: 21480 - protein, 539 aa, DROSOPHILA
MTVLLSHRMLLAGWARRATPTAAQWIHHNPEKMTLLEMLGTTNLRKSTPKDYRILREIFNSFERYSGVGNDIQLTLPERAANELIMCEKKREYEKGIMDPSKFAPGHHIFQVLTKVKKSPLFQILRRMPKGAALKAHDTSMCSSRVVIEITYRDNLWVCTTQNGCRVEEFRFAKDKPKDVSFENGEWQPMEKLRELRGEENLRKYLQMRFSMYPLASFTTNAHAWRHMMGIFGLLDGLLQYAPVWGDYYYNALKEFYADGVQYLEVRSVLPQLYSLDGSRMPKRETVQIYKDTLERFKKEHPGFIDSKLIYAPIRHVQPELVGEYIKECTELNKEFPSFVVGFDLVGQEDVGHPLSNFAAELLKLPDHIHFYFHAGQTNWYGSHVDQNLLDAIVLGTKRIGHGYTITKHPVLMRLAKYLNIALEVCPVSNQVLQLGSDYRSHPAATLIAENVPMVIASGSPGFWRAAPLSHDFYMAFLGIAPMNADLKFLKRTAKNSIKYSSLKDEAKAEAMEKWKKQWDKWVENIVRQRKKDSETEKK

SEQ ID NO: 21481 - DNA, 43671 bp, DROSOPHILA
gtcgcagattgagatagatgtgtgcacacacacacacatatacgtaaatagtcgtcattcacataagcccgcctcattaacgctgacattcagaactggcagaaaggaaatgtgcaataaatgcgactaagcctgtggaaatcaccagcaacaagagcaacaacaacaacaacaacaacaacaataatagcaacagaagcggagtggtgcggaaaagcaccacacaagccacggtaatcacagggggttaatcgcagttgggggttaagccaacaatgggagttcaactaacgctcatctggggaaaagtcaagtgttcggcggcagtcaaattcgcagtctcataagggattttcgagtttctgtcattgaactgcataagtgaaggttaaaatccatcaacatagtacttaaataatacagtaaaaactattggaactcaaattaatcatgaaacatagtaaaatcttttattattacataaaaaaagaaaattcctgatggttattaaattataagtaatagtagtaatgttaaatgctcttatgtttatatttatatgtatgtttatattgacgcttaaaaactatattttaatgaaatctaaattgacataaaaatagaagatattagtcagattattaaataaactatcactctctttataatttaatgttagtcctagctgttaacagaacagtaaaagttaacataaaacttaacatcaacctagtggcactaaaaaatatcctcgggcaacaccagttagctgggagctcaacaggctgtttctttcttttttctccgccttcaacaacagttggacgataagaatttccccaacacggaaatttctttactctctctgccaaaggatggttaatattctcccgcatttccgcactctctctctcactctcaatttctgcagtgcttcaccgttgttctctctcccatgggccatgttttcattgcctgccgcaacatttgctcagtccgcgacgaactctcaacgcgggcggttgtgtagaatctgtggcaagttcttgctccattcgcacccatatcgaatttattgagcttgctgcgcgccaaaagtccaaaaagtgaagaaaacgcagagcgtacaaagttggagaaaccaaaaataaatatgtgaatgccgcgagtgtgtgtgtgcgtttatttttaagcgacggcccccgaaggcaaatgtgaagtgtaagcggcaaacaaaatacaaaaaaaaagcaaaaaagataagtaaagagcgagaaatataaattatatcaaaacaaaaatagccgccagaaggcaagcgaattagcacgcaacatttgacgaaatgggagcgacaccgaaaacagactttccggctcactggctgctgtgtatccttctggctctcggctccttatcctcgaaagcgaatgccgttagtgcttatggcgcctccttcatttcgaacccatccatatatgcatacagtgtcgaaaatcagccggatgaacgcgagtccagggacaacaacatcaagtttgccgctgagcacggcaatctgaattccaattccaatctgaatcgtaattactactacaccgatgatcccagtcccgtttccaatctgaatccgactgcctcgctggccacgcctcccgccacccagcccgccccgcagacgggctgcaccctggaccgcctggccgtctacaaggtcgtcttgcacacctactggacccgggagctcttccccaagcactatcccgactggcgacccaccgcccagtggaccaagacattaggtgagtactccatatgacaccattataattgtttttaaattttggttttacttaagactattaaccaaacaaataaatgcaagttggtctaggcttgtgtatctagaaaccataaacttgtgatcataaactttgataataaaataatgatttttaaagaaatatagcactgatttaagagcgcaagctttttaggtttataaacataaattgaaacgtatttaatgctttaatatttgtacgctttaatttgcgcctaattggaattccagcagaattgcagcatcaattttcgtacaaatattttgcgattttccaatttttttaaattcgttcaaacaagcaaatccaaaccaattgggcccaatgccccagccaaaatgggtcaaacattgtgtgtctcccactccagtgattactcaatcgttgagatggggataaggatctcataatttgtgccagcacagcagccaggcaccaaatgcccacagactaatttgtcacaatgccttacctctcacctctctcccaatttgtcagacatgcatatgtacacacggatatgtatgggcatctacatacgtaaggaaaataaatcgaaaagcaatttcgcagcaagttggctaaacattttcggttcgttttggtattttgggttaaatcagtggggtctttggtttggtttggaaaatgcctttggccgcattggcgtgtcgcttgtcttatcaatgtttttgcagatttagctgtcgatttatagcacacaggcacacacactcgctcactcgctcacacactcccacactcacattggtagcttgcaggatattcagacgacccagtgagacaagtaaatctgacagctaaacaaccaaagcctggcccacatgcagggccaaataaaaaaggataagcaggaagcggaaaagaaatgcgatttgtacgtgcttatgcgcgatgtgctggtctcagcgcaaaacgagaaattggataaagttgttcaatataaataagagggaaaggacctgccatcacatagctcattcttatccgggaattcgaatttttgatgttttgattttaaagcttatcgtgaagaatggtcgctctatatttttctctctcatatgagtaattaaatgggcattacgagctatacatctctgggccataaacttcattctttcccttgttgtttatagtgtcgtctggcttatttatagtttttcctcttgcggcaggcagtgtgccacagtgcgtatgcgtgatttatgtgagcactgcacttgtgcttatacttgcataaaatatagcgaaaaggactagtgcccgtactttatcgtaaactacactatagttttgctattcagtcgagtgtttttgctgcttaacacttaaaatgcagtagagtgtgcgtttattttggagaatttcttcaggtttccccttaagaatgcttgatatagtgtgaattattattttagaaacttttttctgtatgggataaacacaaaagaaaaataatcgttgttaagatagcaactatgaaatattcgaagtacttggtatccatagagttaatttgtttttgccttaaaacaagcttatcaactaccaaaatatacatgacacatttcgcagaacactaggcatttcacattaaatatgaactaatgcccccggacacaatatccttctcggaattctggaattcctgctactcctgtcactggcgtctcaacttgtttcccctgatagccgtttagtcctggccagcggcacatgcgaagctggtctgatactgttcccttagtccgagaacgagtcctggccgaatccggaatgccatttggcattaaaattcaagcagcagagcggggcaaaaggatagcaacagaacaaaaaaaaaaacaaaaaaaagtaaggaaaaagcttagcaatgcacttcgacttggggcggtggaaaatcgtagtcgaagtgggtgggctggaggggcaatggcttcctgcctgtcatatcctgtttatatataattttcagtgcgcaactctaacatccgttacatttcaactggttggaggcggcacagaacaaaaaaaaaaaaaacaactaggagcaccagcaaaaaaggatatactatatatatggaggtccttttgtttttgctgtcgaaggagtttcgcagcgcaaaatttattatgaatgttcaaaaacaagcagcgacagcgattgcagcgcgagggaaatgcactgccctcgtccgctcgccttttgtgccgccaagtcgcccccaatgtcccaatgcctgatcctttcccattctcattgcatttcccattcgagtttgctcctcggcgagttgttaaatttcatttgccgctgccccggcgactgttgtcgctgtttttatcgcaaattgaaaccgaaataaagttcgcctcctgctgaatatttgttttagtcctgccattttttccattcgctcactccttgcgccgccttgtcacagtttttgtttggcccaaaacgaaacacattcgccgaaagaagcattttcgcaacagttttatgcttttttgtttgctgatagttcggctttggtagtcggttcgtctctgtttttgccatttttattgcttgtcgaggtttttgttgagtcaattctcgagcgttttgcaagccaaaatgaaatgttgcactctggcaagttgcatttcaaatgactgccacgaaaaacggcctcgaggcactgaaaaaaaaacctactagtttctgaggcattaactttatgctgtcagcttaaattatttcatacaatttgttctctatcttgagagcaattgtttttataaattcaccttagatgaacaatttacttaagcaattaaaatacacttttctgaattaccaaatatttctcgcagtgcctgaatatgcgatttatcggccagggttcacttgtttaggtcgacggcttttaccggctagattgccaaaattaattggtctacaaataaagagggaagttgattgaatttcggaggtggtcgccaggtatatccgataatccccccgccccactgatccgttgtcaatgccactttacgacccaccaccacgaacatcgccaccaccatcatggccaacaatattccgcccctcgaagtgttcgcaatttgtgccgcataacttgcggcccattgtccagagtcctgccgagaagtccttgcggctttcagctcgttaattgccacgtccattggggcaattatcctggctgctgctttcgccgctgcccatttgtttttgactgccgctgcggcaggacgtgcgtgcgtttgtagttggtgttaaatactttcgcctgcggcactttcacgcctcgcattttattgttgcctctgcctaattttcaactttctttttgctcttttgactaaataaattatcgagtaacaggcggcgcataaatgtatgctgcatacacatacatttcacatgagccaagtactctcttttgccgcatatttaatgcatttccccacagacaaaaaacatacggaaaatgccagcgaggcccttgtgtctctgcgcctttttatttcattttcaaaccaaactttaaatgtttgtaattttttgtttcaagcatatgggaaaatgggaagcataaggcgcatgttcgagccgaaaatatcgtacgataaaaatggcaactacggatggaggattatttcccaggaggatttattttggggggcttttgtctgttaagctaatgggaaaatcgtgtaagaaatggaaaatgttttaatcagcagacttaaatgtttaccacacgtatatatatttatattatttcaagaaaatgctctagctatatgtgccattaatttgcttcgcgcaactgataaccattagataaacggtttgtgaacccagattacggcttaaagcatttcggatttgttccatgcgtattttttttttcggttagggagtgcttcgcctttataagtccggagtcatacattaagaattcataacacagaacaagaaaagctcctggcagagccgtacatcttgaaaatgctgctgacaacgcaatttccttgcgtctggcgctgtttctcagctgaagcataagtacattaataataaatgtaaatactttttcttattttacctggtcttttttgctagcagaggggagagcactgtttttccgagatctttccgaccacttgcacttacttagtgccggctaaagcttaaagtgtcgtaattaaaagcagccaatgctacccaaatgttgtgctttccctcggtgaaaaaccagatttccccctggatgtaaaatgagtagcggtagctcttttacatggctaaaaatcacggcaaacaaaattttcgctggctcactttcccagctcagccgttttccatttttcccgcatttacttgcatgaataaatttcgtctgcatgtcctttacgttcgtcctgctccgctcggcccccctcccttccttctcattccatcactttcagttctttcttttgtatacattgtgccttgtcaaattcatatcattattcattcatacatgattagacaacgcaacagaacacgagagaagacaagaaaaccgtgcccaggttttgtattacacagagagtgaaagttttccagtgggctgttgccaagggtggggtaagagaaaatgggaaatgggaaaatccttgagccggggcaaaagcctgaacccaacgagtcagacaggcgtggcattggcaaatggaaattaatgaatgaaatttgatataatgtcaggttcggtttcccccaggcttccagagttttcagtgctttatttggatttttactttaacaatgtttgctcgatattaaatgctatccagcagattgcgtataagccaattttaattatttattcggcgcgcattaaaattacattatatttatattattcgcggtgtgttacataaatgaatcaattgaacaacgtatgcttggcgggtaaaaaaaacacacaaaaaatcagatatgaggacatatttcacctgggctaattaacaatcaatttcacaatttgtttcacgtttttattgctcttggtaaatttaaatccaaatgtaaggttgtaaggaaacccgaatgagaataattcaacttaaattaaaacacaaatattttgaattagcataatcctaattggccaaaacatgcttccgatcgattggccgtgtttatgaatatttatttattaaattgcattgatctagtttatctattgttggttgtaatgttttgttttgcatttatttttgatgcgcaaagagaaaatcattttaaatgcttaaatgattaaaatgtaaatgtgcttgaaaatacaccagtaaggtttgttgactttttgcatgatggaaattaattgtcaaataatacagagtttttatcgcaacaaaatactctacgaaaaaatggcaaattgcgccgagcaaaaaacaaggctattaaatttttaatgtgtttttttatctaaagaaatgcataaattccgcgataaatatttgctataagtttttattaaaatcatatattaaaagtggcaaagtctattaatcaagcatatttaggacttcggttccaagcgggttacctttgcgcactttttcattgcgtatctttcatgacaaatcggaaggtaataaaattcgcaattggaaattgcgaaattccggttaaatgcatttgctgaccgtttactcatttacatatatgtacgtagtttgccctgccaaacgcaatatttgtgcagtttatttattttattgtggctgcattttttttttgtatttgtcagcacaaatgactagcttttgatttatgtttgcatgcgtggcagtgtgcacaaaatcaatatttaacaaaattcaaaataggttgaaataaaaccgcgcgacgctggaaagtaggcaacgcaaattgggacagcaaatcgagatcctaattaagtgtgccacataaatcagtggcgcccccaaaagaaatccgcctcattaataatgcatttgcatggaaatgtgtaagcgatatgatcacaaaacccttcaacacaaatttatggtctgtgcaaacagggagatttttgaaaaagtaccttgcggttacttcttgcttgccacaacgagagttatgtatgaatgtctgtgtgtctgtgtgccacccaactgctaatggcagcctaattatgccgagagtgagcgggaaaagggacttcctctgttgcaaaagggtttcccgtctggctcgtaaattttccccccatttacctgcagctttaagacgcacacaaacacaaacacacacatacacacacaccttttttggtctacataaatcttttctgccaggtggctgaaccctgcgcagtttttccaaacagagttgtctctttccagacaagcggcagacaacatgcgtgccccttttcccattttcccgccgccaccggaaaacagcaccgaaatcggaaacgcgtcgcacaaaactttgtttgtctgtatttatgtctgcgtaatgtgctgcgattcgtgggtgcgccatttcataggtgggcggcatttttgtttgtgatggtgggcccgggagtgttttacttttcttgttgtgcgtctgagttttcttttgaggctttctttcacgggcttttcccgccagctgcaaaagtctggcgttacgtttccccctggagaatgtgaacaaattatagacgcattttgtgatttatatcactgaaaagtaggcattttaggtcgcggggttgaactttaaaatcattaaactgggaatgtggcaagcatgacgatgtgaaattagaaagcctgcgataaaattgaatgtaaattgtttggcaaacaaaaaaaaaaaaaacaggtaggatgatttatacgtgatataaaaggtgcctgtttatcgactttattttgatgtacgttaatgttttactcaatctattgctttcggtgaaaaagtatttgagttatccatgtcacataagttataccattttattccattcattgctaacgctttcaaaggccacgtgtgacatttatctgtttcgtctgacaggacatcacgcgtgtattgttatcctttagattgtatcttttcccctggccaaccgacaacacacccgaggccttaattaaggacaccgacagaacgaaccgaacccgagaattcgaaaaagaaaaggaaacaaatattaagataggggaaaattatgattgagacaaattgtcggctacgtgacaagtccgcataaattttctcgcattccgtttgagcgactgtcaataggacataaaactcatttaattaagcaatttcatgaacggaagacgatggcggagtggtgaagaccaatgaagaagaagcatttcctagatgttggaagcaatttataaggattgcaccctggggagaggccatatttttgttttgcggcaagttaatggctgcacagtaaagttggagaatatgcggatgtggaggaaagatcaaagctgtggcttcttagacaacttttttatttcgatagatgatccaatttttatggtcaatcaggcgtgtaatgagataaactcaatgagattttcttcaggcgctcggatgaccgatagccgggatacgatagcccatggctaaattaaccacttgccgatgcattcgaaatgagccggcaaagaggaaaatgaggggactgaacgcgtcaagcgggaaaataacaaggaacaacgacccagccgggtgggtgtcagtctgcggaaaatggtaaacaacgttcgcaaagaaaaacaaccaagggggtcaattttcccaaaggggggagggaggagaggcactgcaggcaatctgtcgcgagaaaaaaccttcaagtgttaataaatgcggcggcacaacaacaaacaacccaagaaactgaactgaactgaacccaaagaacttcaaagccccccaaaaaccaaaaatacgaaacacaatttcttggtggaaaattaaatatgaaccgtaagcttcttgaaataaaaataagcctctgtgaaagattaccgaatatatctaccttaacctaattagagtttcgtcgagggtgagattttataccaggggctaggaaaatgatttggggttgttcaaatagggggattggtttttaatacggcagttatggttgagtaaagtaaacaatcttggggttgtgtcaaaaataggttagcaatttgaagatatgatgtattttcttttttttaaaaaggtaataacaatgcttttatcatgagcaaaaaagcaattgggtattgcttgtattagaaactccgaatatttggctaacctgtgttgctgttaatttgcgttacgcaaaaactctgagggggattaagaactcagttttgcatgtttaaaaagcgcgagacaaaagtttggtccaataaaacagacacgaaatacacgtaaaacaacttggaagcgccagaaaatttgctaaagcgttaaaaaatgtactcaaacccccccggctcactctggccctccaaaaactgtagaataagtaacaaataaaaacaaaatagggggaaaaaaaaacttggctaagcgtaaataaaccaaatataaactttggctgctgctgctgtccgggatggcatggtacgagtcgagtattgcctggcagacaaacttgctctcaacttggctttctacgcccgagtttgcttagtagccgaagacaataacaacaagaaaatcctagcatcctacggggggcactttctctagtctctattctcatttccccgctgcggtcgcttctactgctgctgctgctgctgttgttgttgtcgtttcggtgtgaataatgttgctgttatttatgcctcaatgcgccacgccctgaaaaaaaataaacccagaagaaattgcaatttccacgcccaagtttcgggcactttcacttgacgatgctcgccccacctccaaggacccaaaaagcaaccccaaaatgttgctgctttttattaaaagtttctttcttcttcacaaaacccatacccctaaaccctaatacccacatagaccattcctcgtaccccagaacaatgggcacattttttaaagtgttttttattgtcgcgttaaccgaccgcaacgacttattggtaggttgggcatgggcagagagtttcgccaacttttgcgtaagtgtaaattattgtcagggtcagaaagttgcgcccaaagttagttgccagactggcagtaactttggcttaatacctttaactaagttctcgagctgcataatttttgagaacatttaacttaattaacagtccaatgcagacgcttttgtacggtccagtccgaaagtgtaaataaaaacgccgcactaactttcaattaacgtcgacttaaccggaggttaaccccactgaacgtgtaataaactcgccttattgttgttgttctttaaataaaaatttatgtgccacttctgcgctgcagccaagtgaggcaaagaaaaaacactttcactaaggctgccggactgtcctgtttatatatcctttggccccccccccctcccttctgacttttgaaatatgttcgagctgtttgtgaaatttggaaagggaaaaggaccgtttcagttcagcttttggacagcaattaagtgagcagtctgaccccgagaaacgaaaagaaagctgaagtaaatattttctaaaaatcaagatgaaagagttattcaataagatagctttaaaaatatttttaatacaatatattcaattaaagtgctcagtgtaaactcgttaaaaaaaagaacttgtctataaagctgcacttttccattgtctgctattataattttttcttcttcgtaattgtttaaaggaatcttaaggacaatgccaagtcgttcattgtttaaactgcattccttggttgcctgcgttttatggttaaattggcattgatgggggtcgtcgaccctcttgatttgttgccgacaattgaatgccttgaaaatctttgccttcctcacaaaaccagaaatgaaaagccaactaatgccgaagggcaaaaatttcctaagggaacggcacagagtcatcaaattttaatgccactcataattttttcaggcaaccaatgcgcaaggtttttgctgtcactaaccgaggcagcaaaataaatgtcaaatcagcagatatgagagtacagttatgccaaagggaattgagaattgaaaagttttttgctttctgaaaaaaaaaaatcagcagagatgtaacatttaaaggggtttagatacggaaacttttgcgtttttgccatttataaatgacaataaactgataatataattttattgcacatacaaggcacaaaatccagtacttctgagctttacaattttatcggcatatatcgattaatcgaatcagtgacagatttacaaggtacagtctggcatctctgacacgtgaaccacttacatccatcgcacacaatccccgagcatcatatgccatttcgcttttccaacctttttttccgccggctcctcttgtttgtggccaacttttgagtgcggaagttccttgagggttagacacacagaacaacaatacgaaaaaaaaggcctaaaagggttgctcttattgttatcgaagcgagtggatggtgtacggctccattgaattatgtgcacaacatgaaaacaaacaaacaaataaagtaggcagctgaattgattgttgcactgtagacctactccaccttgctccacaattggagatcataaatatttatgtggcaccctttcgaggaactgtgataggtatataaatatcagcagcacctttctcgtaacaacagcacagtatcagtgtggtgtagttgagcgtgaaacgcagaatttattatgttatcgcttcagcgatttactttatcgatttcacaatcagtgagaatgaagcccttaaaaaaataaccttttggcaactctgatgctccccagataattttcagacccccaccatccctgtttgtttgccttggcatttcggcagcctcctttaggcaatgtggcaaatattgttatttgttttaaaaatttaaggccaacgcgcacttgactttgattcgagcttaggtcaccttacttatctgacttgtgcatttttaatgagctctcctaatggataatgctcaactttgatgtaggttatgcaaagagttatgcagaaggttattgataaccgttgttgtgcggatttccaaaagttataatcagcttatttttatgcagtgagaacatttttcgagggaaaggaatttgaaagttggaaatgttagcagcgcacagcgatgatcagaaatttaagctcggttagatactcatagttttacaaagaaaaacttatttgacatccatacttgttagtcctcttcttgttgtttaaatatttgaaaacaatatctaataatttattttacatttcctccctgtaaaatattcactaattcgcttttgttcgttcccattccaggtaagaatatcctgcgctatcctttagctgcccaggactcgagttggggcttcgaatcctgtttatttataacgctattaggactgcatccgttgcccgatggcgagttttgcagccctggtcccgtcactgaattgataataattggattagcacatatttttgcgagcggtacgaggggggcggtaagtgaaccgtgtacgtggagcccgttggccccagcggtcggttaatagtgcccaaaaggtttacgccacgttggccacgcatcgaagcatcactgtgatatatggctggtcgtgggctggtgtcctgaaaggaggacggttagtggctgcaaaatattttgcaaaatttttcaccgcctgccatatttttcaatattcctgtcgagagctgggcgcgttgtggatgcgttgcgctccagcaattttacattttatatggccaggcttggcgacctaaatcgacttagctacccctcatatatacatacatatgtataaatatatatttatatatatagacgtatgtgtatacctctctctgtctggcgctctcgcatacatacatatatatacatatacatatgtataaatatatatttatatatatagacgtatgtgtatacctctctctgtctggcgctctcgcactttgtggcagcaagtttatgcgccctaaagtattcatcacttaatttccacgtgccgttgccattttcaaaatttatgacttcgctttgcagctatctagccttctatgcactgccccatcctccattcaccatgttgacaactttcgcagagggagctacgtacatttagccagagggaaaatccccatttcgggttacagtttgccgtttgccatctgtcagcgtccccaaatagaattatgtcagctaattgaatttgacgtcgacttgacatggatttatgctctaatgcagttgccccggaaacggcggtataatcaaattttagcggaaaatagttttccatttttggggggatttctagttgtggggtgcaaaatttggctgcaactttttacgtatggttcaagggaccaaggcaaataacattattggcgatttaatagcctatggtcgtactaaatggcaattaaacgggaattaagggaaaatctattagagaatttatgctataataggaaagagctaactggaatttagcactccacattcccatcgaatttcgaacaaaaaaattggtttgcgatattcctttgaaaccaacttgtcctttcaaagccatattcaatcacagttcagcttttgtgcccacaattgatgatgtgcatttttcaagctcaatttaaaattaatcaattgttttgcctgcctttggattgaacactcgatcacagatgtgtgcggtctggtggacttttaaaatgtcgtttatcttgtggctgtctgcgcttttccataatgacctttcattcactttttgattgattttgtggtcagaacaccacaatttctctctataattcgatgttcctcaatggcggccgtgctttttcccagtccgatgacactttgttcaacttttaacaaccgcattgcgtatctgtggccaaaaataatgaagattttatggctaacggctcgtcgatttcaatacccagtgcgcgctggggttgttcagtaaatccgcaaaaataaaaccgatactggttgcaattgaattcctaacccgaatcgaatgcagcatcatcaattgtatacaattatattccggctgttatctgaaataaacacgaaaatctatcgaaacgtaacgaattgtgttggacgtgcctaactgttaatgcggttataatacgccaccggattatcattgattatgggtgtgggtggttgggggtgtatgggtgtgtgtatgtgtgtctgtgcttctcgggggtggcaagtgggaggtatgcgagtgtgtgtgtgaacacgccctccaggagcagaaataactgtttgtgcgcgtcgatccaaacagacacaaaacgcacaaaactcgacatacgccacgtttatgcgttaaataactcgaactagcaattcaatgctgtaacatggtgtaaaaatggttttacatactttcgaaactaaattattaaaatcacaacgtaatgaataaaataagtgtcttaagtttttttttttattaaaaaaatgattgagacgccctcaaattgatttcgagtttataaatcagctttgtatgaacgaagaaagatttccgtttaacatagaataattatttttgaaatgctgcttcatacgaaattatcaagatatcgactctgcataaaccagcggcagtttggaatctattcccccgcttaacttctctctgtctgccgtaaaactttgtcgagtgtatagacataatttcaattttcatttggtattaatgtctctcctataactgcttatgtgtttgttatgtgtagctgtgtctgtgcacaaattgccgcagccttgtctgggaaatggatcaggagctggtggtagcggtgtgggtgaaccggagtatagggtttccagaacttaaatgagctcctcgttatatatgactggaaaatgcggtattggcaaaatcccaggagcgcgctttagttgatagcactggcgaaatacaatagatgcagaaaaaaaaaaaactggttaccgctcagttagtgagccatagggtcgattggctaaaatagaggaacaaatagggttggagaagtggtataaattccacttgctttttacgaccatcgtacatgcttcaataaatgaaatatgtcagagaaaaagtttgttgtgataaaatatgctggaatttcattttatcgcataaatctgcagggcactaagcaaaaaatgtgcgcacataaaattggtaagtatatttttgttgaaactggtactttgtcaaaaggcaagttagattttaattaaaaaacgttcgcctgtcaaagagttctattttccgttgaagtattaaagcaataatggctagtgcatcttattgattgcacaacaaagttttattaaaatcttttaaatgagcaacacaaacttctgaaatcaaattcatacaattaattaattcttctcttaaatgagtcgaagtttgagttttcatccaacttctgtaattgctcgaaactcaaataatttgcacacaattcgtttttaattaaaaataaatattcagatgtctccaaaaatctaaaatgcccactccaacacggggattacagtcttagacctgtgaagtagccgcaaaatttaaatttcaaatcaaagtcccatgaaagaagaaagaatatttgatggcagcagacaaaggccgttaagtaaaccaatcaaagtggaagaagaccaggccgcaaaaagaatttaataatatcgcaggaacgcgaaaagtcctgacgcgggggtagtaggccacaaaatgccagggaaatgcaaaacacaaacagtttgaactggccagccacatccggcaaactcggcggggttttccctagcttttcccgcttctccgtgcacctcctcaaaaaacccccgactagttgtgctcttcgttgcgtgcttaattaaatgatcatcatttgcgcgcaatcaacgcacaaataaattttcagccgccatctctttctgggttttctccgtttcccatccgttcccgcttttccggcatcctggtcctgttcctggtcctgacccaaggcgtttgttagttgtgtttgtttggcgggtttccgcttgaaattataccctgactaccgagcgtcgcttgcctgggctgttgtcttaattaattcctaattttcctcttcggctttgactcctttttgcgtatttaattgaaaatttcttcaaagaaattccattgttggcttgtttatgggtgaaaagctggctgccaactgttggccatttgacagacgacgcgttttattcatttgcatattgctttggctttggctttggcactttcttgcctttttgttatggctttgtttatggggccgccttacgtttccgcttttattggcgtcctgccaattgctgcccataaatttgattacatttcggaccaagattatagcgcagactttcgcaggcccttgggcgctcaattagcggggtcaggagcgctaattaaatttccactgcagccgcaacaattcgataaaatgcataacgcatacgccctggtgtctgcgcgcttatgatgcttgcattacgtttccggcgatgcataattaaacaattttttgacttgcagccagttgacccggtcgatccgatataagtatataatgttaatcagctttcgagcgatttccttacaaattgcttggtaatgtcattataattcgattgaaaaagcaggagaaatgtggttaagactataagatacccgttactcagacagtgaagaggcaaagcggggattgtttcattcagaaagtttatgctttagtccttatagtccttttcttcgttctacctgttacatacttttcattgaatctagcataccctcttactctgctagtaaggggtataattgctacacaggcctcactgcataattgcatttgcagtgccagccggagtatattgcattcgcacattcatcacatattcgtgtcacttgtgcatcgatggggcttattaagtgccgctagtagctgctcatgcaattaacccaattcggccaaatgagttttacatgttttacagtcgcgtccgctatgagccgaatttagcatcacttgcagctggctaaatgctgtcgccacttctgctctatttaagcaaccgtttgagagtatttgaataccaaatcttaatcattttatatgagcttagtcatgtctggcagttttgtgatacatagcagtaactaaccgttgatactaatactaatacaaatatttgtttaatacaacatcaaacttcaactatctcagctgactttatctaccgactgtcccacagaagccaaattgacagccacaaagtcttttgttcgaaagttgtatctctactttttcaacacacgaatgaggggccataaaaattagacaaaaacatggaaaaatctgacaaaaaccaaagaagccgaaacatactcccgagctaattttcagtgggttcctttgtttgagtccctatttttgtaaagcctaacgcgctttatttaacactcgcggctcagaacgcaagcaaaatggcacaaatatatatatatatatgtatatatacataagctggaatcggcaaaagagagttggggaaacgcagagcggcaagcaaaacaagtcataaagataaagaaaatttatggaggcggcaagagagctttgagggaaaacaacaattttgggggaaggggggggggggtggggaaagggagcacaaaaggatccagaagctgggtaccaggaaaattaggttaacgatttttcactctcggctgcaaaagcagcgcaggataaaaacaaagaatatgttttcagcagccgaaacgaaatggagactatctgctgtttttgcgagtgagttttgcacaatttacagtcgacccgttacagtttaaagtttatgggccccgccctttgtccaaaaatgtcgcctttatcgctaaacgatgcctaagtgaggctccaataccaaccaaccaaccacccacccgccaccccttttccgggacacattagccggaaaggacatcgatatcccagccttggcatgttcccttctttttgggttaatggcctccgcctccagcttgtgcgctttccatttcactttaaaggctgcctaagtccacagtttgcggttacttaaggagtccttttccttgccctcatcgaagtcgaagtcgcagcgaaattaacaatccttgcaataaattcttggaacaactggggcgttgcgcaatcgatagagggatttggtttttttgtttttgtattttttgcgaaaaaacataaaattaattaaaattaattgccgcaacatatttgcttttggttggctttcgggtttttcggaaacttttatttctggctccatggaattcgttgtttgtcttttggctgggtttctgtaccagcttgttacaaaaatatttcaacaagctgcgcacacaaaataaaacccaaaatcgcatgcacaacaatggcgtagaggtgagggtggcatcctggcaggatgttcggctattgtgacctacttgcaggtgtgcggcatatgttgtggcccagctctttgtgtttgggccaagttgtggctgaaggcttagataagcttcctcaaagcctgccgctgctgttgctgctgctgatgaagtgatgtttcgtggccaactttgcttggtgaattgtgctcctgcacctcagaaggcaaaggcgctgaagattggatgagtaatatttatagatgagaattcaattctgcgaaacgctagcttcagatgaagtgagtggggtgtttgtgtcaactgttctatatattttacttttttggctatttataacatataaataggcatatatgtaaatataacatttacattgttgtatgcgtaattcgtaatgtagctaatagcagtaactggagagctttggtaatatatttttagcactgatggattaattttttttttatattttccagaacgaatacctcagattcaaagggtattttagtaacgactttgggtgtgttcatttcctcttgcacccatccgtttgtggtttttgcctaccatattgttgatgctgtttctctttcatttttttcgttattggaaattgaattctgttgctgttttcccagttttttttgtctattttttttgttgtggtctttgcagcttgtggctggttgtttgtactgtttttgttggcgctgccgttttgtatttatatttatttctgatcttcttgcttggggcccactattggtgcaacttttgtgcggcctcaacctcaacttgcctctggtcaagcatttgccttaaaaaatagtttatgaagtatggcaagtatttccatttgccagtttaacacagttgtaaatgttttacaaaatagtagaatcaaatagaaatgaaataaaaatggccaggaggtcttggggtggtaaaggtaactgcttgtgtccacctgtttcgtcctttggcatgtctaggattctgtttgcattgccaatggctgttcggtctagtaaataacaacaaagtcggaaatttcagctgcctgggatgttgttgtttcggttgttgttgttgtctggcagtgcataaatatgctaaaaatgtaaatatttcgaggaaaatattgcacaagtaagtcacgaatcgtacatgtgtatttgcttggctacaagtccgttttctcgtttcgcatggccccctttttcatttcggtggcatatagggcgtatgcgtaatatttcactcgcatcgatgcattgataaatatgcaaatcgagagcaatttcatcgcaattttatcgaacttttaattaaaagacaatcaaggcgtcgaggaatatgaaatatgtgtttaaggtattaaagaaaaaaccgaatttcgaacttttcagatttaattttacaaaaggtaataaatacatgcagctttactttggcaaaatatgaaaaccatactgcagcttaagggcacttttcgtaggtaagcttggcttttgtgttttgtaatttttttttttttacttttttttctgtgcgtgtctcgagggcgcaacgtgtaaacaaaagtttagactttagtgcgataagcgctcctgtgtacgcatgtgtgtgtctattttcttgtgtgtgtgtgtgtgtgtgtgtgcagacgctgacagtttacatggcagcaaagtttcaagagtttagccaacaaaactgccaaaggaattacataaacattgcgggaggagaaagctgaaggcagtgggttgtgcagagaaaaggcagaaagcaaaagacaagccaagcgggcgcctgattacgagtggaaaacagaaataacacagcgcaaaaaaaaaaagagccaagatactttccaacttcaggttgaatgtctacctacaactttagcaactttgattaaaaattccactaataaacaaacaaaccaaacagtattcttttcacgtcgctgcttcagtcctcgagagccttgtcaacattgatggttgacaaggagcacacacacgtgggtattgttttaataaacggccctaagctggcttgcttaagaacctttcctaaattattattaaaaacataataaatagtaattacattcacatatataaccaagatctaaagcccatcttaagccagttacaatctactttatttattaaaaatgaaaaaaaaacgtaagttataagaaacctacaggtagagaaagacatcagtaaagattttttgaatgttttgtgcataaattaagcagatatatttatatatataagatataaatttaaacttttagctaatcaacgtatatgttgtaatttccgaaaccgctaactgaacaaaaaggtaattccctttgtgcgtctaagaaaaaccctttttcccgaaaacacacaatctctgttcccaatcgtttcacctcaagatgacagacggggattgtgggggggcttttggaaaactttgtaagctcaataaacattgcgtttaccgaaaaaaaaagtttgttactttctatatatatattttttagttgctgcttgcattgcactcctgtgtgggtgcgtttgcctgtatgggtgccgccattttgttgtgtaaacttgttggcgcgtccaaaagtttacgcccacccacccactaacacacacacaaacacatacacccacacagacgtgagactcccgcttctgcagccattttgtaaatttcatgtgcattatatttgcaaatttgcgttgtttatttatgcgcggcaatgcgcagagcacaacgaacacacaacatacaacgtacaacatacaaacacacacatacacaggcactcgcacgcacacagatgcggcaaaccagctaacgcacacacactcacatgcgactggggagcgttatttgctcgtttgtggttgtgcataatgcacgagtattttgttgaactttgctctttaattgcaattgcattttaagctggaacaatactagaattgttttatacgcttgtgtgtgtgtgtgtgtggctgtgcgcgtgcatgtgagtggccctaaataaatttattaattaaatatagttgctaattaaagttgtgccggggcaccagaacgtatacgccatgatatcccccgtatattcccactttcctaattgcatatttaatgggcaaagcttgccgtttgacttattgattggctttcgcttgttgttcatcgttgttgcttgttttggatttgtgcaggggttcaactgctaattaattttcactttgtcgctgtacgagaaatggaaaagtgtaaagggcaaattgcattcggtgcaggatcaaatggttttacgtctggagcggagccactcagcttttacaatttgtattggattgcaaaacagcatttttgcgtttgctatttgcacagatatgagttccctggtgtttattaatcaactatgttattcccacacagcaagttcagtggccttgtgggttggaaactgttgctttctgcatttgttttcttctttctagttggaaaacacaatccactctaatcaacgaatggaaagttgttaaataagtagaaagttctacagtggaatgttgtaaaatttagtttaatcatgttaagtttctttagctacagaatcagcttagagttattaatcacagggctttattaatactcagacatagaattgttaacaaaagattgaaaattaagtgttccaattaaatccgactcacgtctttaatctccttcaatctgattttcttgaaataaatgtcgaactcattttgttttactcaatttcaccgtagcaacattaaattggcaacaaaatcttcatgttctttgccccggcagtctgatgatagctcttcgctattggttttattattttgttcaattattcgaatgcaacaaatgtattgacgacaacagaaatttccagttaaatgcgggacttcaagtgtctgtgcatgtgcgtaccatttcagtttgtttttatgaatgtggcttgttttatttagcagctttacgagccgagtagcggaaaaggtggagttgggtggaaatggggcggaagagtgggtggttgggcatgagtgagtggtgaaatgtcgctgacttgccgcaagaaatcaatcaaaaactgtggcaagtacaaaagaaaaggaagcaaaaaaaaaaataacaaaaggctcggcgcacgcgatgctcatcaatttgtgtgtcattcggagagtgtccttgcatgctcctgtggccttatgtgagtgggtgtggtatgtgtgtgtgagtgtataaaggatgtgcttctgtcaatgtgtgtgctagcgtgggtaatgcctggcttttgtgtttgcttagtgcagtgcaaacaaaggacaatgcattcagtccacaatcattgggctcctccttcttgccgatttttcctctcccagtttcaccctgccctcctgttgctcctcttcgtatttcgctattgcaacctaacatgactgacacacttttcatgctacaataagccattataatgaatgtagccagaaagtaagccaaaaacccaacacacattccgtttcagtcagccgaaggaaaacaggaaagcaggcaacaggaaaaaagcatttcgaaaattgttaagaggggcaaagattggaggataatacccccaggtgttgaattcagggaattgttaggtgtatgcagtctaacaagcagtctaaataggtattagggataccagtaaaatcaatacttgcctgcacattttgaaggtaagcccttcagttgatacaagcacacagaatttggtacacaattttccagtcattcattagtttgcactaatagaaattgcttaaattaaaaaaattccaataaatatgcgtgtgtttacgaaagaagctttaaatctaaatggcaaacctgtttatgatcattcccagttcaatttcagtaattgaaatgcatgtttgcgaacaaatttggccaaagtagaaaagtcataagcaaacacgaatgctattttgaacacattcacttagcttaagacacttttaggcacaggaattttcgaaaattagcttcgaagagagcattgtcatcccgataaagctggaaaatggtacataattggcactgcaatttgccacagtgaggcatgcgtcataacgaccatgtgtttgcagacaaatgacagatggaccagacagataaataggaggacagatgacaggacgactaagtaagctaagcaaccctcatttgtcacatgattttataaactcttgttgccctgatcatcctggcattgtgatggcgatgctgatgttgatggtagctccttacgcaggccaacaggcatcttgttagcttgttatgtttttggtcaatttcgtttgtaatcccctttgagcctctcgcaaacattcgccggctcattgtgagggcgtcaatagaagaggtagtcatgggatggaagatgggtttgttcgttgggaaatggggccaagtgacaagtttaatgccagctttcttgtttgccaacataattggccagctgatggcttctgggccaggcacatcttggcctaatcccgacatgtagctgcacacattaattaacacagataaggctgagaggcagcccgcaactgcaactaaaaatccttcaaccctgcagtcattaaacttaaaagaacaaccgagaaaactgacaatgaaaccgcacactgtacgaaaagcggttgctattttcaagtcaagagaaagggtggtatagaaattttattgatagtaataaactatattacacttttatatacaatattatataatacggtttagcaattatttctgtttgcttgagtggggacgttttctatatgtataatagaattcaaccattattttggttttatcctatacatttatattcagcatttcatagaaaacaatatttaaagtgttatcgtcaccgtaagagaaaatcccttgcacacgactatccggacattctattctctgcgtgtctgcggttgcctaaggatccaaaatgggtgctgcggttgccggagcctggaaatctcccacgtactcagtgttgatgctagtgccttaggttaccacatcacaggcgacaccaagttgacattttatcgggagtcgtgactgctagttccactggcaaatatgacagaaattactattaacaggcagtcgcagtcgcagttgcagctgcattcgctcattccacttccttggctttattgagcgcatgagaagtgcagcattccgcattctgcatccagcatatgcggcgtatgcgtaatgtcactgtgggtggtatgtgccaccatggatgtgtcttaaggcaggagctgcagcttctgacatctgacaatgtcagatttttggctctccctctgctgcttttgctgcttttgtactgctttaaaattcagacgttatacgccatgtgagccgggcgaaattaggtaaaatgcaaatatttatttagcggaaagtgatattcgcgtgtgtataaagcaatttatattaagcacatgcattacgtatacgccaggtgtgcgtttctatgccattttcctgtggctcatttctattttttgtttttttttttttggctgtaatctattaatagcgtgtccgtcgacgtttcggatttacctatttgcctggactgacaagccaattaaatttgacatacataattaagtgcgctgtgtgagtagaaaggcaaataacagacaatcgctgggaatgggaaaaatgaatttttaattagcggccagctgaatgcaggatgattatagattgatataggttgtctagagcagatatccagccaattttagataaaaacgagtggtctgagtgtatatcaatcaagttccctccctggcatccaattaaacttattcatcattatatatgaatatattaaggtatatttgagttaattccatcactacggacaaacatcgggatatttgagcagaacgttattcattttcccagcggagaattaagcttggatgaatttcagctgtggggcctgacttgctcgaagcttaacatttaagcatcggatataaccgtagccacacatatagcattccatcaaatagcaaacgtgcgctgacacacccatttcaccggcttttcctcacagtttttcccgcttttctctctggccatgatattgctgcgttaatccttcttctcctggcttatttatgtgtactttccgtctcttatttgagtttctcagttcttttactgtgtttttcgaggcgagagacaatgcctgtgccggcggcgacttaatgcctcggctattaaattcaaatttattgcctataattaaattttttcgtgacggaaatcgcaggaaattgagcatccagccaaacgaaaacaagcgaccagaaaaaaaaaacgcgacgaatcgtaattcatttttcgcacagaaaaacctgtgtatgtgtgtatatgcatgtgggtgagatagtgtgggaaaagtgtgtcagctgtgcgtcataaattgaatgaaatgtgtgtcatattggttggatttatacatatattaataccgaccgaccggagcacatatttttctgccaattaaaaagcaatacgctagagcagggtatgtttaccatgagtcataacagttgcttttggccagcagccagattgcactatttagatattgtgtatcaatgttgttattctcgggcaaggttgccgattttcaattatgatatgatcagacacacagagcgcagagaatcgagccagaccaaacattctcctaagtttgcggtgccaacgggccattgggccaacggggcgtatgcgcaatgtcttttcattcgaatgctaactgaaatttatggagcatacgaggcatgcatttatattacgtgccgtgccgtgagtcctgcttggcagtaatttccggcagcttcgtggctgtttttggcttttaatgtgcataattaagcattaattacgcccccaccatccatcgcaataacccagaaatggttgtttttacagcgcccatttatttggccgcctcggaaatttcgcccccagatgtgggggacatgggaactcaaaccgcgtcaccatatcgggaaaccatttgcacaatttaagcatttaattgcaaatttattatgcttattctgtggccattctgtaattgattgaccgttgcgtttggtttaaacatatacatatgtatgtatgtacatgtgccattctattttgtggatttgtctgggaaagcgaaagcagctgaaggtgaacagctgtggtctgctgacctttattggtgtgtagaacagacaaatcctgttgcttttcgagactcttgttagtttacagatagaattcttcattggtataatgatctattctcatggacttatgtttcttgacactcttttttacattttaagcatagaggtcatttttaacttattacaaatatacacttttatcagacttaatttacgtagcttgaagttacagagtttctactgttgtcctaattattcacctattgatttgtcttctatctatgcaaattgaaaatgttgtatgtagcaaaacatggaaacttgtttggcatgtttgacacaatttccccgagtcaatttattagctcgatttctccgctcgtcgccatgctggaaaatctgctaaaatggccagaaacttttcagaaattctccaacagacgccctcgcaccattttcggccacatttttccccaatccatttgacagcagtgacccgagagtcggctacagagcttgtcaattacccagagtgccacccaggtggtggaaactatgccagcgaataaataatatttcatttgacttagtttccagagaggagggaaaaaatggcaacggctgtgatgaaagccagcggcaaagttgaaaaggcagaaatatgctttgtagtttagtttattcattagtcgtcgtcgccatcatcgtcacggcctgttgtcaaagaagtccgtcgtcttacactcgcagcaaaacttgtaaattaaaaatgcgtccacagagagcggggcaaactaataaataagccggcagcacagcaaaagcggaaggaaaacgaaacgaaacgaaataaaaaagcgcaaaagaaaaatatctcagaatgaaatggcagatgaaagcagacaaaggggaaaaagtggcacaagtggcatgttgcaatgttaattgaagacaaataagagccgacggagaaccgttgcgatgctgttgaggttactcgatgaggccgacttcccgagatccgcctcgaaggaccatgcaaacaagaaaccaccagtcgcaacatcaaaggccactgcacggctgcaggagaccctagaccctagaccccagaccctagtcgaggtggtgctccatagttgcttcatgctgctcaatgggtgctgcgcaactgggtgggttttcatgtgacacccagatgactttgaggcccagcgcgaattggagcgcagtagttttaaattacttgcggtctgggcgaaaggcaaagagataaatataagacggaagtttgctggtgaaaaaaaaaaactttatacaggtgctaatcaaagacgcggggcgctttcatgataaagtttttattaaaaaaaatagttgaaagtaaatagctgacgggaaaaaagtaataaaaaaaaattaaaaggaaaatatataacaatttgctaatttctagtaagctttattttctactttcatctaaatatagttgttatatattacccttatctttgttcagacactcgtttctcttaatttaaagtacttcccatcagctttttgtgcatttttcccatgtcgccttgcaccacttccactccactcaattttaccacacttttacaaccgattaagtattttcccaatttcccataccgcacccagctgcatttcccatggcaaccatttaacgctcagcactttggctgaaaaagtgtcgctttaattcgacgcgcagccgttgcgtatacgtaatctgccacttaagttgacaccattttgaaacagttgaaaagcactcgttgaatcttgaacgcagagaatggcgcaagtgacaaccagctgctaaattgcaaatatttgcaaattttcagcatttctttctgtttggcttcgaaaagctcattaaattttaatgactcgccaatgatgagctccgttcaccgtttcgcttctttttcgcccgcaggtcgcacccacaatgccaactatgcactgtaccacattggacaaccggcgacggcggctgtcaaacagtttgcggaatcgggacgaacggatctgctggacagcaatgccggcgagcagcagcaggtccagatgcagctgcagtcgcagatgcaggcgggcaaatccccatcaggtgggatcagcagcggcacgactagtttcaacgccacagccgcatccacagccacacccactggtggtagtggtggcagcggtggcagcggtggcagcggtggcactggcaccaccaccgccgagcgcagcgtgttcgatgagttcagcatgccggcgattccgatgggcgccggacgcagtgaggcaaaagtgtttgtcgacagcaatcacagtctggtctcgctaatgacacgcattgttccctcgccggactggttcatcggcgtggattcgttcgaggtgagagcataagccacaaaatcacagaaaatcaaacggatgaaatttctgttcgattgttgcatctataggagatgccatttttccccaattcataggggctttcaataactagcagtgcagtgacagcatgtatttgagttatttgagttcgattcattcaaataatttaaacggttctaccttctccttaacttgcatcttgccaaaaatttgctaatttgacatttatgtagcttaagcccaattaaacctgttcatcatattacattcctttgtggcttacagtttacatttatgattttaagcacaatcgcttaaggatttaacaaaaatgctttagcagttacctaaaacttccttgaatgcccacatcttttagctctgcgtgggtggctcctggatcgatacggtgaccgttgagctggatcctttggatgcgggcacggataatggcttcaccttcacggcgcccaactggccaacagaacctcagggcgtcatctatcggatcacctcgcgttatcctggacatcctgcgggtagcttttattatccgaagagcaaacgattgccgcccatcgccacgttccagtttatcaaggtgagtggacgccaaacggatcctcggattcccgctgcaaatggaaaaggttaaacaagttaattaacagcaaattagcagtcgaaatgccttttttcccaacaattcacaccactcgggcaaccataatgactttttccaaaaaaccaaaaaaaaaaaaaaaagagaaaaccagtgcgaaaaaatcaaagtgctaatgagccattagcattacaatggcgtcaacagcgtctaccacattcgcacaaacgcacacacataaacaaagcaaccacttttctcgccatgcaaacatgtgtaatggctgtgcgtgtctctctgcctgtgtgtgtgtgtatgttggtatatctgtgtgtgtgagatggtgtgcgtgtaaagggcgtattcccttggctgcgtgttaatgcgctttataaatcagttgagttcacagcttggatcgtggaaaaaaaaggaacgcacgaaatacgaaatggccaacggaaaaaaaaatacgggaaataatgataattaccttataattatttgggccaaaataacacgggcatgcagaaatgtgctaagaggaaatgtaaacaaattaaagcagtttgacaacagtcacgggcatagaaattaattttatagctttttatagcacacatttgtgggccattgaatatgcgcaattagcttaaatgggtgtcgaattataattcatgggcttaaatatgacagttatggaaatcattccaaattctttaaaattggtaaatattttggaaaaggttattgaatttaaaatgatggcgccaggaaataaggttattgaaataatcgcattttgaaatttattaccattttaataatattttgtagttgatttcaatgtgcatcaaaaggaagctattgaattgtaatttgtagatatgctaattatttgcaaacttaaagcgctattagctgaattttatgatgaaaattagttatattaaaactcgttttaaatatatatgcaaattatgagtatctcaaacgatttgcttaaaaaacatttatgactgcacattatataattgaaaataaacttgattcaattattctaaacacaggggaaaatatccgatgctgattgaattcgcatattgcaaagcagaacccttgagagaaccatttcacttaccacgccgaaacatgtcctgcattatccttatggaggcggcacagccgtttgtgccattgttttcaagcgctgcaataaacattattctgcactccttaataaatgccaatccattaggcccgccagacacaaaggacaaacgccaaaggacctcagccaaacggcgctgcaacaaagaaccctcaacggcagtaaaaacgccccaacagagcgaaatggcaatagccagaatagccagagcaggacgggtggctattggagcattgtaattatattgctggacatccaagacatccagaaagtggcgcacttacggctacaatgccttgggtcgctcatcaaaattgcttttatgtgtggcccaaggaagcgcacataaaatttatgcctcgggctccacgtccattgctcccccatttgctccccagtccattgccagatgtttcgactacgtttgcatagtttatttcacaggggcactttatgtatagatataggtatatatagaaggggcaattgctacgtgggcatgggcgagtgggcgtggctgcccactgtacgtgcggtcattattctttatttgttgctgctgctcgccatgcagctcgtattattgtaacgcctttttgacactactaattttagttttattttctaggcttttctcggagtgggcgtgttgaagcctctactcttttggggggcgtttttagtagggtacattagctgtatggtggcgtttggcattatatgttgttacaggaattcaaacagcaaaacattattaaccgatttagctgctagtcacattaattatgtccaattttgcttacaattgattttattgtttggaaaatctaaggaaatattcgaatttattataaaacggaattgggccttagtttattgtatttatcatctaagaattccgccttgagtgctaaacagatctttatgttttccattaaactgcatacccagggcaaagaaagttcgcattggttaaacgaaaggtctgtcattttattagtatccaaaacgcccaaggctgccgacttttgtttatggccaacagaatggaaagttatttacttatatgcgttattttatggccagcacatgtccaaggtcctagtgtaattatgtgttgatttgcttcctttgcattgcccaacagctaaggggtagttgggcattaaattcttaaattctgaggcccgagaccgaattgctggaatatttgtgtgtcatttagtgaatggcaaaaggcacgtaatctcggcagccgggaatgctgagggttttcactcgccgtctgggtaatccacaaggaatttcacagtttttccagccccaccacccccttcccctaccagcgttctatctttttttgtgtgtgctggattattgtgtattttaatgccactaaagcaacacgcgtctctccgccattgttttgatttttttcctgaatttttcctggattttttcgtttgtttttttttttttttgtagtgccttagatttctttttttgtattttttcattgtggcttctggcgccgctgtcgacgcatttgcagaatgtagaatgtaggtaccaaaaggtagaccaagataagccagcaaaaagcggaggggtctacaataacaatgcgtattgtatatagaaaatgacagcggcccaaacaaataaattaaaatgcgcgacagcgcaccaaacaaagtttttcataccctggaagtgtcagtgggttgtggggaatattggtgcgaggtacactttggtcgctgggttgattatatgattatatgagaagaatcacttaaagtcgccttggttttggttggctcttttgtgcttgttctttgttcaatgctcaataagactcgttgttaaagaaagagcaaatctcaggcaaatctagactggcgtttaatacccttagattccatagaggttcgtggccatttcatacctctgctgcaacatcaaacccccccccctccctttggctgtgtcaatatttgccacaaattgaaattagcagcgcgttaagagcacctgtactcccggtccttggttgctcggcattccgcatcctgtacacggagttgctgatgccgggcacataatccccgtaaattaatatgctgcacatgtgtctgaagccgggggactaacattccgtccctttgggcatcctatttgcagctgaaggagtacgagctgagcgaggtgtttaacattgccgaggacgatcgcaagtacgagacggtccagacccagacccacctggacgcggagcacaatcacgtggagatgaacaacgagttgtccgccagcatcgaacgggaacgacaaacggagcagcagcagttgcagcagaacgacgacgagaggcagcgcattcggtcccagctgttggccaaaatgaatcccatgtaagtgctacaaatgtgccataagctatgctaaaaaccctgagaaaaaaaaatcaaagggaaatgaagagcatattgtagaaatgtaatttagcaaagataaacttttaatagcgcaaatactccacaaactaatactaataaaagtcgaccaaataagctcatgttagagttgaaaactttttgaaattgcgattcgcattatgcaacattttgggttagcaaacaattctgaatcaaagggatttttaagttagctttacaatttttaattgacaatttaaaatttttaaacttttttattaaaattaaaatatttttattaaaataaattgaatatagttttatagatattaatatggtttatatataagcatttttagcttaacagttcaaggctctccagtctctaggtcgaatgataagccttcaaaataacgaaaaacgagtcattttttagagcccattaaaaattggttatcttataagtatcgattgacaaaaacaaatgattaattaatagatatcaccgagtttcctcgccacttggcctttgccagactgctgagaataatacctaaaaagtagaaacagttgccattcgacagctttaactgtttcttcaggccaagagtaagccttaaatggcacgtttcgtatacgtaatctgttttggagtgcagagagcgcttcaattggccctatttaacatatgcgtagagtgctttcccctaactcaagaccaactactttcaacactcctccgtctacatatgcattcacatatttaaagcaacgtgccaagccccgagctgttggaaaaacaagcgaatgggtgggtgggtgttttggttggaaggcaaaggaaaacagctttctggcacacttcaaagcacattacaccgctttggaggcgtcgggtgtggcccagaactaaagaccgaaagagccgagggagagtcgcccgagtggcacgtacctgggtaatgctgcatctttaaaaagccgcccaattccttggatctcacaaaactccggtcggggagaaactacaactaatccctgctaacagttccagtctcatccacatccacatccacatctacatcctcatccgcatccccttcagcgcttgctgtctattttcgtgccacttttggccaaagctgctggagtggattttggcaccattggcactggtaacctgcatatttaatgacaatccccaccagccaacgggacgtgttcgagtgccaagagccggcgagtgggcgttgtcgactggccccacttttcctggcactctgacagggttggaaacaaaggccggagaccccgacggatatcagttgggtctgccaaatgtgcggaatactcggaccagtttgaaagtaattactatcttatcgaatgccatgtcgcgggtggcctataaaagtagagaaattgccggcaatcgggcaaagagttaagtgccagcaacatgtccggaatcccaccagcaaccttcaccgtaatcgcaggtagtgcagcccacaatcagcgtcgcaagaatcgaaatcgggaacatagccaacagaagaattcgaccagtgagcatatggaattcgcagtctaaattgcgatcaaacataaaccttaacaatttccagagactgaaccgaatacggcggggtcgaagacaaatagttgccgcattgtttagatatagtaactatcttatctgtacaaggatttaacgcatgaaaatacatttcccatgacataaacaccgagtataaatgggccgaacaaagcatttggggtttcagttaatggcccaaacgaagacgagacggcataattatcgacaaaatgaaaacgacaatcgtggaggagaggagtgtgaatgaaacgatagaaacaatagccacgagcagtggctccgtccaggagacaatcgagatcgtgaatatcgatggatctgtagcaccaaagcatcgtcaccatcatcaccatcacagacatcatcatcaccatgaaaggcaggaaaatgttgaagttgtggcaacagaggaagtgattcttgtggagaacgcaccgaaatcgaggaagcatcaccaccacaagcagaggacttctccaccaccgcccctgccgcaaacctcaccaccattcctcacccccactgaagaagtgggtttcaatgtggtgtgggaaccccaggccttttggaaccagccctcacccaatccctccactgatctagatctctcacaggataacgaggttgtcgatgcagtggagactatggacactacttcagcttccgatgaattcaccactgttgtttttcaatcagagacaaaggagtctattagggaaacacagaagcacactagagtggtggaggaggaaataataattgatcaattggacccaccaccctatgcaccaccgccacttcaagtgcagacaggattctttccagtggctcagcagcccccactttcacccatcgcagaagtggtgcaaacagatgtggtggcggaatcggtggaacctccactaccgcctacaggttatattcccagaataaatctaaagccaacggaaactattgtcgagaatgtcgaggtcatcgtgcccgcacaaattcaacaagagccggagtttattccgcagccgggatttgtggccagaattgtggagaacatagaagttgccgcagcatctaagtcatcactggtttcacctcaaaagagttattatcctcggacaggcatggtggagacgattgtggaagatattgaagtggtaaaagatgatgctcctgttcagagtggttatattcccggaaatgttgaagtggaatcgattgtggaaaatatagatgccgattctccctttcttcttccacccaatggattcgctactgatgagtccattgtggaaaacattgaagtctcgacagatgtagatgattctccatttctgcttccagttaatggctttgactctgaaccagtctgtgtggaatcgattgttgaaaatatagaagttacaccttctcaacctgtcctgcaaatatcagatcaaagtgttgttcctgcaggctttgtcgagtctgcggtggaagacatacaagtcatagaaacggaagatcccccattcctactgccgactgaaaatgactttactgctcaggcaggcaatgtggaatccctgatagaaaatatagaagtaactacggaggtggatctcacattaagacaatcagaacaaatagaaaatctacctcgatctggtttcgtggaatccattgtagaaaacattgaagtcactcaagaagtagatcccccacagcctgcagttccaagtgatgtggtcactcagagtggtctagtagaatcgatagtggaaaacatcgaagtcacagaaatagtggatatacaagctccggctccaccacaaactggatttgtggaatcggtagtggaacgtttagatgtcacggaagaagttgaaccttcagtgcgaccaccacttccacttagctatcctcctcgttcagggttcgtagaatctatcgtggagaatatagaagtagaacaagttactccttcttatcaacctccccagcaaattgttcctcaatcaggttttgtagaaacatttgtagaggatattgaaatcaaagaatctgcgctaccgccaattcaaaatggatatgcaccccaagcaggagtagttgaaacaattgtcgaagaagtagaaatcgtacccgatcctccacgtcaatccatagtgacaaccgattatatgccccgtgcaagtttggttcaagaactggttgtggaatcacttgaggtcacaccaacatcatcgcctccacccgaacagtttcccttcatttccagagagagcctaatcgtagctgatgattacgtggaggtggaagaagtcaccccttacaatacggcaccacatagtccaatagtggaagtggaaagattgagtgaagccgagtcttatgtggagattaatgaagttgcaccagttaatactccaccccagaggtccgttgaagtgggtttccttcccagacccagcttagccgaaacggcggtggttgtggaatcagtggaggtaactccaactccaacaccgccaccaagcccagcactgaaactcaaaataccaccgtcgaatcagataccatcggaggtgattgtggaccaaccagttccatcttcaactttcaagccaccagcgaagccacttaacaatttcattctaactgatctggtcatcgacgatcctccattcgtagaagtggtggaaagggaagtggttgttgagtccgcaaacaatggccaagtcactgaggttatcgaagtcacggaagagatcatacaacccgtcacacccatcggaactgttttggtgggggaggtatccgagcaaaacagcgacaaatttggcaagcgatattccctaagtgcgacactggctgatggacagcagcaggtgcagggaaaaccggaaacgaatcagtcaccaccgatccaaaaacgagataaacccaccgaaccaccgaagcgtagatgttgccagtgtaaatgcatcatttcctaaagcagaggtcaggggctttccccaaggcaagtgaatcagtacaaaaccatatcatatcatagaaatcttatcaataactgggtctttttattatcagcctgggaatgtaagctccacctatcgcatatctaatcaggtaaaacagaagaccctccaaaaaaaaaaaatcacagtaattgatagttaattaccggcggacactcgaggaaatagcgtagataagtggcaaactcaagaaccccaatcgacccgaaagtgctggtcagtcagtcagtcagtagttagccatcggtcgagatgccacccccaggacgcggatacggaggaccacctccacggggtcccggaatcgcctacggaccaccgccacctcgagtgaatgtcggcatcaatatcggcggaccaccgcgtccgccgcccataggcgtgggcatcggctttgctccgccacccgtggtggttgcaccaccgccaccaactgtgatcgtcggagcaccaccaccaccgcccatggtcgtgatgccgccgccacggcccaccgttgtggtgggtggccaggctccggtggccagtgtgtatgcccagccgcaaggagaggttttctgctgcactattctctgacgaaaaataggaaatgaaaaactgtgcttctgtatagaattattcactacgtgtacatatatgccttaaataagtaaaataaaatagttaactcatagtaaagtccacagtccatgttcaattcaagttcaaaatggcttaaaagacattttaatgcaatcaaaaatcattgtccagtgtgttgttttaatttttgaagtgtgaaccaatgaaagtattaataaaatgaatgcaaaccataattgtatgttatataattaaatacacatataataaactgctaccctcacgattttcccattgcatttgaccgatgcaaatattcaataatcacattgaaagcatgacaaatttcaaacaattgtcagtttaagtatacaatttgagcaaaccaattataatattaatatcaatttaccgtcgctttccgattgggaaaactaattcacttcgggccagagagcaatttcctcgtcacatgtgtccaaaggctgagtcacagtcagtttatcgagcacaggaaatgcaaattgcgcctcaaacaacatttacttaatacattttgatgtgctcatctaacggtaattgccgtgaacatgatcgaagcaaattgtcgctaataacttccatgttccatgttccaggcaggcagggcgtttgcaaaaggaaaagggaatttgagtatggaaaatgctgtatgtaatttcaatttgagaattttcctcattattttcgttgggcccatggcgcttggcgtccttctctgggtatttcaatatttttgccaatttatttgcgctcctccctccaatcgtcccgttgctcatcagagttgagtttctgtgcctgttcgtctgccttttgattttttattattatttgcgcgattttgcacgcggcgtgtgtatgcaaataaacgaaaaactgcaggaaacaaaacacggaagttgcccaggaaggaaggcaggaaggaaggaagccaggcagcgccacagccaaacgtagtctgcaaaatgggaacttcgggggattgtggttcgcgcgtgggtcctcctccagaagaaaaaaaaaaagaaacataaaaaataccctcctgggttccatggcataggggtctccgatttcgcattccggcctttttgggctctttgggctcactgtctgtcagccagcaacacggcacgaaggctggctggcaaaaggcaaatttaaattgaaattttccacagttgatgttctgaaataacaaacgtgagcagccagcgagcacacctttgaaaatggaagaggcggaggcacacgggtcgtatgtgtaatgtggcagtcttttagcgtcagcaagttaagctactctggtagagcaaatcatgaaggtggaatatatatatagcagatctaaacccttcaaagaaattgctgtgtgaggctaagcaatttggagattacaaaaatataatgttaattataaacaaaatttaggattaagtgcctaatggtatcaattcatttgctcgagccaactatagtataataagtataatttgcagaatttaaaaacaggctgtcttattatttcaaattgtttcgtgcaagacctaacaagaccttttcacattattcacttgcagctatggcagcaacaacagcctgcagccggcacctggtcaggtggtcagtgtggtgccgaagaacgacaagcatgcgatcctgcagagcatcgccagcagctatcggcgtgccgcagatgccagcgatgcaaacgcctccaaaccgacaccatccgcgattggtggtggcaaggccggtggtgcggtgggcggtggtgctgccacccgcaggcggagctccgcgcagcgtcgtcgtgattgccgcgtgagccactggtccgagtggacggcctgcagcaaaagttgcggcgtcggcgagatgcatcgctaccgcaaggtcataaagcacggcaagaggggcggacgacagtgcccggcgctccagcagtccaagtggtgcggcaccgagcgcaactgtcacgggtcgcagacctattttaattggtaagtgtgccgcgccgcggaaaactcaatcaaattagtgttacactgcaaacaatttcaattcattaatattaattaaattggaatttaattcaatttcgcatttcacatcaaatttatatacacaatcgaaaaggggaagtcctttgtttttatatagataacacaaaaaatccataatagattgatatttttatatttttttgttctttgactcaccccacaagtatatacaattaaaatatatatatgtccgattcgatttcaggtccgattccgacacatgaacgatccacttggcggaggcacaggcgatataaatataattttaatttaaggcgtaagaattgctttttctgtgtgaacaagaaagaccagccaggccgttaggagtgtggttcatcccgcaaggagattttaatttaactttacattatcaaatgacattgtttttaacgcagacggcagagacttcaattaaaaatggattaaattagaggcgacgatggggaagactactgacaatattaaaaaacacaagaaagatttagacacaggacacagaggattggagtcattcgtcctgcggatgtcgattcaaacattcttatgtttatgtgttcacattgatttatattttttttttcgttgctttagctctaaataatatgtaaaaaaatcatcataaaatataaaaaatgaagaaaaaaaaaacaaaacattgaacagtagacgtacaaagtttagaaagcaaatcaaagtaaacaagaagcgtgaaaatttgcatacccaaacaaggaaaaatggaaacaaaaccaaatgaaaaaccaaacacagcacacttgaacctataagcgtggagccaaagtgtgttgttcagcaactaagctaatattagatgtaaactaagctaactaataacttaaaatggattgcaataaaagtcaaccccaaaaagaactcacttgaattgaaattatattgaaaataaatctgtaataaggaggaagtaatagttaatgacatcggtcaattaacaattacatggatatacaaacatttactcagaatttggaacgaggaccagtaaaaaaaagtcataaaaatgcctaagctattagttgtaagacaatcccaagttccaagcaggagaaccaataaatattgcaattccaatagtccaattcctcattgggccatcctgttgcgacatttaataagcaagggcagcagaagcttcagaaatccggacactatgagacataatcccgcaaagcaaaaggcagcagaatagtttcccgtgatgcctatcaatttaccagcaattgtagtcccaataaaggcgcccattcccatggccaatgaggtaatcccaaaagcgttggtcagttttgaaagtcccaggtatttcacgtatatcaaacctctcagtgtggaataaacagctattccatggaaatgagagagggtaatattgtaaacttaagtaaggtaagtaaatgtacgcaccaggcgctacagcataggagaagccatacagaaactggaaccaaatcaagttctctccatagaaggcgctaatcaaaacggaaacaccaccgaaaattagaccacaaccacaaagtccgagggtccaactacgccttttgtaagcgaggatgccaaggatgtttctcatcacaagattactaattccgataatggggccga

SEQ ID NO: 21482 - DNA, 2574 bp, DROSOPHILA
gacgaactctcaacgcgggcggttgtgtagaatctgtggcaagttcttgctccattcgcacccatatcgaatttattgagcttgctgcgcgccaaaagtccaaaaagtgaagaaaacgcagagcgtacaaagttggagaaaccaaaaataaatatgtgaatgccgcgagtgtgtgtgtgcgtttatttttaagcgacggcccccgaaggcaaatgtgaagtgtaagcggcaaacaaaatacaaaaaaaaagcaaaaaagataagtaaagagcgagaaatataaattatatcaaaacaaaaatagccgccagaaggcaagcgaattagcacgcaacatttgacgaaatgggagcgacaccgaaaacagactttccggctcactggctgctgtgtatccttctggctctcggctccttatcctcgaaagcgaatgccgttagtgcttatggcgcctccttcatttcgaacccatccatatatgcatacagtgtcgaaaatcagccggatgaacgcgagtccagggacaacaacatcaagtttgccgctgagcacggcaatctgaattccaattccaatctgaatcgtaattactactacaccgatgatcccagtcccgtttccaatctgaatccgactgcctcgctggccacgcctcccgccacccagcccgccccgcagacgggctgcaccctggaccgcctggccgtctacaaggtcgtcttgcacacctactggacccgggagctcttccccaagcactatcccgactggcgacccaccgcccagtggaccaagacattaggtcgcacccacaatgccaactatgcactgtaccacattggacaaccggcgacggcggctgtcaaacagtttgcggaatcgggacgaacggatctgctggacagcaatgccggcgagcagcagcaggtccagatgcagctgcagtcgcagatgcaggcgggcaaatccccatcaggtgggatcagcagcggcacgactagtttcaacgccacagccgcatccacagccacacccactggtggtagtggtggcagcggtggcagcggtggcagcggtggcactggcaccaccaccgccgagcgcagcgtgttcgatgagttcagcatgccggcgattccgatgggcgccggacgcagtgaggcaaaagtgtttgtcgacagcaatcacagtctggtctcgctaatgacacgcattgttccctcgccggactggttcatcggcgtggattcgttcgagctctgcgtgggtggctcctggatcgatacggtgaccgttgagctggatcctttggatgcgggcacggataatggcttcaccttcacggcgcccaactggccaacagaacctcagggcgtcatctatcggatcacctcgcgttatcctggacatcctgcgggtagcttttattatccgaagagcaaacgattgccgcccatcgccacgttccagtttatcaagctgaaggagtacgagctgagcgaggtgtttaacattgccgaggacgatcgcaagtacgagacggtccagacccagacccacctggacgcggagcacaatcacgtggagatgaacaacgagttgtccgccagcatcgaacgggaacgacaaacggagcagcagcagttgcagcagaacgacgacgagaggcagcgcattcggtcccagctgttggccaaaatgaatcccatctatggcagcaacaacagcctgcagccggcacctggtcaggtggtcagtgtggtgccgaagaacgacaagcatgcgatcctgcagagcatcgccagcagctatcggcgtgccgcagatgccagcgatgcaaacgcctccaaaccgacaccatccgcgattggtggtggcaaggccggtggtgcggtgggcggtggtgctgccacccgcaggcggagctccgcgcagcgtcgtcgtgattgccgcgtgagccactggtccgagtggacggcctgcagcaaaagttgcggcgtcggcgagatgcatcgctaccgcaaggtcataaagcacggcaagaggggcggacgacagtgcccggcgctccagcagtccaagtggtgcggcaccgagcgcaactgtcacgggtcgcagacctattttaattggtccgattccgacacatgaacgatccacttggcggaggcacaggcgatataaatataattttaatttaaggcgtaagaattgctttttctgtgtgaacaagaaagaccagccaggccgttaggagtgtggttcatcccgcaaggagattttaatttaactttacattatcaaatgacattgtttttaacgcagacggcagagacttcaattaaaaatggattaaattagaggcgacgatggggaagactactgacaatattaaaaaacacaagaaagatttagacacaggacacagaggattggagtcattcgtcctgcggatgtcgattcaaacattcttatgtttatgtgttcacattgatttatattttttttttcgttgctttagctctaaataatatgtaaaaaaatcatcataaaatataaaaaatgaagaaaaaa

SEQ ID NO: 21483 - protein, 601 aa, DROSOPHILA
MGATPKTDFPAHWLLCILLALGSLSSKANAVSAYGASFISNPSIYAYSVENQPDERESRDNNIKFAAEHGNLNSNSNLNRNYYYTDDPSPVSNLNPTASLATPPATQPAPQTGCTLDRLAVYKVVLHTYWTRELFPKHYPDWRPTAQWTKTLGRTHNANYALYHIGQPATAAVKQFAESGRTDLLDSNAGEQQQVQMQLQSQMQAGKSPSGGISSGTTSFNATAASTATPTGGSGGSGGSGGSGGTGTTTAERSVFDEFSMPAIPMGAGRSEAKVFVDSNHSLVSLMTRIVPSPDWFIGVDSFELCVGGSWIDTVTVELDPLDAGTDNGFTFTAPNWPTEPQGVIYRITSRYPGHPAGSFYYPKSKRLPPIATFQFIKLKEYELSEVFNIAEDDRKYETVQTQTHLDAEHNHVEMNNELSASIERERQTEQQQLQQNDDERQRIRSQLLAKMNPIYGSNNSLQPAPGQVVSVVPKNDKHAILQSIASSYRRAADASDANASKPTPSAIGGGKAGGAVGGGAATRRRSSAQRRRDCRVSHWSEWTACSKSCGVGEMHRYRKVIKHGKRGGRQCPALQQSKWCGTERNCHGSQTYFNWSDSDT

SEQ ID NO: 21484 - DNA, 2818 bp, DROSOPHILA
cttatcagttaggacttccccccagcgttttgatgggtgatttacgtgtggcattattgtgtgtttgtcacctttcttatttgatgacccatagactttttccccagggctctcaaaacatttctatacttaaataaaaacatgtttctgtaatagctaatttaatgcaaatttttatttaatctctatatttctattaattataagcaggcatttagccgtatgactattgaaataagaaattataatggaaaggcgaggcaaataatttgtgaaactcctgctaatttgagaaaattaattaaataaagataaaattaagctgtagttgtgaaatatacctcatcttaatttaaaaattaaaaggctagcgttaagcgatagcatcatcattatctcctaggcttgagtttctgttgattgaaatcgcgtagtttcttatcataaacaagctaagcatctgtttgaaataattaaatactcaaatgagtatcgatccgaaatgtaccctttaaatcggtttcatttgataatttcaatgtatttttcatagggcatcgtatttttggttagaagtttagaacgcaaaagatgagcctgattcaattaaaagatattttattaattaatccttataaaaaggataaacacagatgctgaaaatttttgtagataacaagtatctttttacactactaggaacgaatatttaaaaaatcaaacatttacttctgcaaattaaattctattaacaggctggaactttcagattaaaataatcgtcatttttgttgctttgcttaggtcagtgtctaattgattctaatgataatgatgattttgattcatcaagttagttaaattaagcttatcatacattatgcaaaaagacatgattcttttttaaattaaaatttattattaggtttattaggtttcaatattttgattttaatataattgtcaataaattagaattaataatatcaaatacgcaggcttagccgaaatgatgagatagacccaggccagcaccaaagtttggcttctggttggcaaacggtccactcgtccacttgctcgccgatcccgtgagatccaaggtagtagcacgattgggcgatgaccagagattagcacgtccatccaggccgagttgctggccgattcctgggaagttgctgtgcgtcaaggaagcaccatgtccgttgatgtgggagtaatccagaccagctccattccgctggaactcgaaaccattggccagtttattttgcgaagcaaagaccttggcatccagattgtgtctgccattgttgaataaattggcatgggcctcctgctggaaaacatccttcactccgggcgtgtgtgttttggtcaaagaggcaccatgaccagcacttcaaaaatgaatagaatagagttaatatatcctctagtaatctcttagtttagagaactcacttgttgtaggccaaagttccgccagttgtgactggaccactttgagtgtttccggcggcgaaaacctgacccaccacattgtggttgggattgccaatgcccttggtcagatccaaacgagcatcagccccaccagcgggattggaggttaaggaacctccgagcacctggcgacggacgcgaatgggtcctgttgtgggaagtgcctcggtaatggcgaaaagtgccaccagggccacgattaggatgcttgtgttctgcatgttgctgaactggattgctggagctgactgatgtttcaaggtgtccaatgcatcggttttatacctcaagatgcggggaagaacttttctgatgattgacatgattcatctgattgccgatctcggcctggatgccttatcaaagcgaaattccccgctcagatgtgatggtggtttacttctgctgtttgcttgtgtggctgtgcgacttgacctcatcacctccccttttttgcgacccattgacgccacttgttgctgcattgtccagtttcaccctcgccgcagaacctctgtcagcgtctccaagtggtttcttttgtgtcttgatggaggagtgcatcctcatcttgcgcaggtcggcatttgacagttataagggattctctatcgtatttctcacttgatgtcaggctttatcaatacgttattttgcgtggagggattattctgggggagccggaaagggaaggcgagcgaaataaagagcgacggtgagagcggcaggatttgagtgaagtttcagccgaatcctaattgaattttctgcgcaggagcgggcaaaaaggatgcgagccgaaagagaggagagcggaaactttaacccgcagtgtcaacgaaaagtttgcactgaaaaatataatctaccaggtaattagcttataaacatttttttcaaaccctgtttttaaaaaccaggatatatatttttaaatgtcgtaataatttgttctatttaaagtatttacatatgcaattatatacgaactaatctattaataaataagttttataagggggcttgtcagttcgttttttttaggggacaaacccattcattatgatttgcagccatctggttatttcgctagaatttaagaagaacgtgctatagaacaggtttgtgattcatatgagtcgcgaattaaattcgtttaggctttttttctctcaaacgtgacttttgtggttttgttttgagcaagtatatttcttatcagctctagagctcagcagattcggtacaaaaaccgctgataagcgatgggaacccctcattgtgtcacaattgattgaagattattaat

SEQ ID NO: 21485 - DNA, 754 bp, DROSOPHILA
aaaagttcttccccgcatcttgaggtataaaaccgatgcattggacaccttgaaacatcagtcagctccagcaatccagttcagcaacatgcagaacacaagcatcctaatcgtggccctggtggcacttttcgccattaccgaggcacttcccacaacaggacccattcgcgtccgtcgccaggtgctcggaggttccttaacctccaatcccgctggtggggctgatgctcgtttggatctgaccaagggcattggcaatcccaaccacaatgtggtgggtcaggttttcgccgccggaaacactcaaagtggtccagtcacaactggcggaactttggcctacaacaatgctggtcatggtgcctctttgaccaaaacacacacgcccggagtgaaggatgttttccagcaggaggcccatgccaatttattcaacaatggcagacacaatctggatgccaaggtctttgcttcgcaaaataaactggccaatggtttcgagttccagcggaatggagctggtctggattactcccacatcaacggacatggtgcttccttgacgcacagcaacttcccaggaatcggccagcaactcggcctggatggacgtgctaatctctggtcatcgcccaatcgtgctactaccttggatctcacgggatcggcgagcaagtggacgagtggaccgtttgccaaccagaagccaaactttggtgctggcctgggtctatctcatcatttcggctaa

SEQ ID NO: 21486 - protein, 221 aa, DROSOPHILA
MQNTSILIVALVALFAITEALPTTGPIRVRRQVLGGSLTSNPAGGADARLDLTKGIGNPNHNVVGQVFAAGNTQSGPVTTGGTLAYNNAGHGASLTKTHTPGVKDVFQQEAHANLFNNGRHNLDAKVFASQNKLANGFEFQRNGAGLDYSHINGHGASLTHSNFPGIGQQLGLDGRANLWSSPNRATTLDLTGSASKWTSGPFANQKPNFGAGLGLSHHFG

SEQ ID NO: 21487 - DNA, 3407 bp, DROSOPHILA
acaattattgatatttacattctgaatcccaaaaggaaatggttctttattggagtatttatttgtcgatacagtaagtacaatagtactcttaaagtatataatttcatttttaaccgagtaaaaggttttagttcataaaaaataggtaataagaaaacaattttataaattcaacaaacttaaagtttaagaaacaaacagaacgaaacaaaaaactataactacacttcataaaagaatatgcactttaccctttacttcctgatttggataacttggcatattctcaaacgtgaataacttaaaccaaagtttattgcaaaactccccgtatccttatacttcctgatttattgtcagtattcgaagttattgtcgtttacttaaagtgtaagttgcaaatgtgactataatactaaacgtcttttaccctaatcttcctgatattttcgttgttaagggtaaattgacatacataaatggtaagaaactaaaagtgcagtttctttaaaataattcactttaccctacacttcctgattagtgttattaagggttattgtctccattcataatctcttcttgttttgttaacattatttggggttatcgtcatatacttgtaccttccaccttctgatttattgtcattaacttataccctacaccataagatttattgtcgttattgcgggttgttgtcatattaattagtttcttgataagatagaaaaactacagcttattaattaatgccatttaccctaaacttcctgatttgttaacgttattaagggtaaaatggcatgtatttgtgccattagaaactaagactagtttattaaaaattgcctcttccctgctcttctaattcgttatcgtaataaatccctcaataaaggaggtatgtaaatattaattaagttgtgagtcaagtaaaatacgatatgaatgttgtactttccactgaacctaaaatagaaatatgttaacttctttaacccatgctagtcagttgcagcagagcacaagcggtctgctgattatcccccgattcgtggaccttgcgatgggtgcgcaaggcagagggttgtataaatttcttgccgcaaacgtgacactcaaagttcttttcgccagtgtgggtcatttcgtgatattttcgcgtgtcggtggtggcaaatttcttttcgcaatagctgcaggcataatctcgtgccttctcgtggattgcgcggatatgtttcttaagactcgttgagctgttgcaaactttggggcaatccttgcaggaccaggtcctttccagagtatgatagttgatatgcagtcgcagttcgtttttggtcgtcttcttgagaccacagtaggggcaactaaagttctttatgccctggtgacgcatcatgtggatcttgagtttctccgtgctatagaatcgcatagaacattccggcagttcgcaggcatatggcaataccagctggtcaccgtgtgtgaaccgatgctggcttagggcagagccagtcttgaacacccgaccacagaactcgcacatatgggtcttcaaaggcttgccaatgtcgtgagccttgctttggtggtatttcagcgaggccttgtgccggtacatcctgttgcagccctcctcctcgcagacaaaccgcatgcccacttccgagtgctctagctcgtgctgcctgaggttctcgaatcggttgaaagcttcctcgcatccgggctcagtgcaatgatacagcatgtgtccctggtgttccttcttgtgcagaatcaagcgtttctcctctcgaaactcgtcggcgcacaagtcgcacttgtatgtggtcaatggcggctcctgaaatcattgaatacaacttaacttacactcctgtttaaaccttaaacccaaactcacttccaaagctttcttttccgtttccgggggttgctggacattttcggtgaaggtatggaataccaaggttggcggtgcctgttcagcgactattggggtattttgtgcactcaaattggtatcacatataatcatctccggcggctccaatagaagttcttccagctccagctcctcttcctcatcttcatcgacctcgtaaacaggtttcctgcgatctattttcttccaagttaccagacttttagaacgccacttattgtcggctataatgcaaagtgctcggaaggagtggaacttctccagaagctcgtagcactccgagcaaatttcgctgggcaaaatatcctggtcatcaggatccaccaccaaatttgtgcactccgaaaatttgacggcgagatatggatggtgcagcaaattgtaggcctcgtcgtctctagccacatcgctggagcatacgcggcatttgtccaggtgtcccattaagtggttgaatcaaagttattgagacctttttttaaattcacaagaaaaaatatttttctgtgtcctgtctgccgttttttcttatcgctgttgtttgtatactaaacagctgatagggctggcaaaaataccgctgatagcaatagtgatggcaaataatagcgtgagttggaaggggttaaataaatatagtataaatgtttaaaaatatctactgtaagcataccacaaataatgttaaatacatttatatttttaatccttgcacgtacaataaatgaaattaatcgtgacttaaaacagcttgttactcgtggcacatctctagcaccctgtgctaaagtcacatctctaatggggggtgtataaaaagttgtgctgttgcagtttgttatttatttttttccagcacaacaatggataattccaatggaatccactacattgagctaaccccaaatcccatacgatttgatgctgtcagccaactaaccaatgtgtttttcgatgactccaacaagcaggtatagttaaaacatgttaaaaatccatgttgatgatggctaaaaatctatatctgtaaagatatttgctgttcggtctggaggagctactggtgtggtggtcaaaggtcctggatctcccgacgatgtcgtcatctccttttgcatgagcgaccgtggcggtgccataaggtccattaagttctcgccggacaaccaaatcttggccgttcagcgaaaggagaattccgtggagttcatatgttttcagggagatcagcctctgctgcaggacatcattacccaccaggtgaagactctgatccatggctttgtttgggtccacaatcgagaggtggccctgatttcgaataccggcgtggaggtctacaccgtagttcctgagaagcgacaggtgcgctctgtgaaatccctgagcattggcatcaagtggttcgcctggtgctgcgatgccaatgtggctctactgtgca

SEQ ID NO: 21488 - DNA, 1347 bp, DROSOPHILA
atgggacacctggacaaatgccgcgtatgctccagcgatgtggctagagacgacgaggcctacaatttgctgcaccatccatatctcgccgtcaaattttcggagtgcacaaatttggtggtggatcctgatgaccaggatattttgcccagcgaaatttgctcggagtgctacgagcttctggagaagttccactccttccgagcactttgcattatagccgacaataagtggcgttctaaaagtctggtaacttggaagaaaatagatcgcaggaaacctgtttacgaggtcgatgaagatgaggaagaggagctggagctggaagaacttctattggagccgccggagatgattatatgtgataccaatttgagtgcacaaaataccccaatagtcgctgaacaggcaccgccaaccttggtattccataccttcaccgaaaatgtccagcaacccccggaaacggaaaagaaagctttggaagagccgccattgaccacatacaagtgcgacttgtgcgccgacgagtttcgagaggagaaacgcttgattctgcacaagaaggaacaccagggacacatgctgtatcattgcactgagcccggatgcgaggaagctttcaaccgattcgagaacctcaggcagcacgagctagagcactcggaagtgggcatgcggtttgtctgcgaggaggagggctgcaacaggatgtaccggcacaaggcctcgctgaaataccaccaaagcaaggctcacgacattggcaagcctttgaagacccatatgtgcgagttctgtggtcgggtgttcaagactggctctgccctaagccagcatcggttcacacacggtgaccagctggtattgccatatgcctgcgaactgccggaatgttctatgcgattctatagcacggagaaactcaagatccacatgatgcgtcaccagggcataaagaactttagttgcccctactgtggtctcaagaagacgaccaaaaacgaactgcgactgcatatcaactatcatactctggaaaggacctggtcctgcaaggattgccccaaagtttgcaacagctcaacgagtcttaagaaacatatccgcgcaatccacgagaaggcacgagattatgcctgcagctattgcgaaaagaaatttgccaccaccgacacgcgaaaatatcacgaaatgacccacactggcgaaaagaactttgagtgtcacgtttgcggcaagaaatttatacaaccctctgccttgcgcacccatcgcaaggtccacgaatcgggggataatcagcagaccgcttgtgctctgctgcaactgactagcatgggttaa

SEQ ID NO: 21489 - protein, 448 aa, DROSOPHILA
MGHLDKCRVCSSDVARDDEAYNLLHHPYLAVKFSECTNLVVDPDDQDILPSEICSECYELLEKFHSFRALCIIADNKWRSKSLVTWKKIDRRKPVYEVDEDEEEELELEELLLEPPEMIICDTNLSAQNTPIVAEQAPPTLVFHTFTENVQQPPETEKKALEEPPLTTYKCDLCADEFREEKRLILHKKEHQGHMLYHCTEPGCEEAFNRFENLRQHELEHSEVGMRFVCEEEGCNRMYRHKASLKYHQSKAHDIGKPLKTHMCEFCGRVFKTGSALSQHRFTHGDQLVLPYACELPECSMRFYSTEKLKIHMMRHQGIKNFSCPYCGLKKTTKNELRLHINYHTLERTWSCKDCPKVCNSSTSLKKHIRAIHEKARDYACSYCEKKFATTDTRKYHEMTHTGEKNFECHVCGKKFIQPSALRTHRKVHESGDNQQTACALLQLTSMG

SEQ ID NO: 21490 - DNA, 4731 bp, DROSOPHILA
caatgagaatccttcttcgtcagttgctgaactcgcaaaacgaagccaacgagatccaacacaatcgtttatccctggaacgcgagcgcctggactgggagaagtctatgggcgagcgtctgttaaacctgttgccaagtctcatgcagccgccacctgcagcctcgccatgctccacggctcaacgtcttcagccgcccaagctgctcttcacaactgctctgccaatgggcaatggcaccgtcaccatgccgcacatcctaacatccaattcgctgccaaaagtgattaccacttcaagttgcaacagcggcgtggcagtggccggatcaggagtgggcctagtagccagtgtggcccccaagccggtagataacgacgtccagttgatttcgcccaagctggaaaaggagatctgattaagaggaactagtcgttataagtgattgatattagaaacacacttaagtgatctcaaagaaatgatattctggtctttactttagtagactctaaaaccagtatcctaataataaaaaccaaagaaatctctcattctagggttattttcatatttaaaatgatgggcaataagcaataattagtcaatatttaaatttaatctagaattttgcgctcttatatatttgattaatagcatacatgattgtctaatctaaaaccagatatggcgtctaagaatcttaaaaagaaagtttacaaaatacgcattaactattctcctattacagcaaataaaacgagtatatcgtgaccctagtaaatattgagcctttccatatcccggatttccatgatatccgtcttcagtcgctgcttaacgatctcccgccaaatggcttcccgatcccggttgtccgtcacgcccattctttgcagtgaggagtctgtgatccggagtagagcccttccggttatatcgtgctgtgtacatggaaagaaattaaacaagatcagtaggcagttatagtgatgtctaaattttagcaaaaggtaaccgggaattttcctgtttgtgttttgaggtgctgaaatgacggaactgctgaaggaaaaccgttccaacgaggctcgacggtaagtgaagtagatcaaggactacgatttggattgtgggctcaactcacctgggcgaagagctgctcatactgggtgtattcaccgcagtggcggcgataccacttgagcacatcgctaactgtccacaggtacactgccttcggtcgcgtagttttcgttctggttttgttttgcgttgagttaatagtttcttcacccatttcacaaaaaacaaatcgagaaatttaagatttatttgcaaatagcaacaaaacaaatagtgatggtagctaggcgatattaattaggtgtgagacaagatatcgattacagttgtattactgtaatgtaaatataaaaaaatgtaaattaggggtgacacaatcggccgataagttccctaatccgactgatttaaatcaaaggtataaacgatatcctaagaaattcacgagttgtgtgcgatatatcgacaacaagcactagtacgacattcgtggcctatcgatgcccgctaagactcgcatatcgaaatcgcaccagctctaatcgtgactggcgcttaataacaacgaccgaaaggtgaaaaagtcagcattaaacacgtaaatacgcaatcaatacacaccggaaacgatcgaacacaaagaaaaaattgtcgcattgctagtagctgagttgagacaagcttagttgattgattgattagtaaatttttgagttgagcgcccccacatctcatctcgtctcgtccgaacacaaatttcaagtcgcaagatggccggagcaacacttttcgagcgtgcccaggcattgtccagcgtgaatcgcgaggagcaggatagttcgctgctgaacaaactggtccgcgaccaggagggcgccgagaacgatgaggagcgcatccgaatcaaggagcagggcattctgcagcagggcgagctctacaagcaggagggcaaggccaaggagctggccgatctcatcaaggtgacgcgtccgttcctcagctcgatcagcaaggccaaggcggccaagctggtgcgttcgctggtggacatgttcctggacatggacgcgggcacaggcattgaggtgggttcttttttcactcattgactactagaatttactagaaaattctttgttcgatctctaggttcaattgtgtaaagactgcattgagtgggccaaacaggagaagcgcacatttcttcgccaatcgctggaagctcgtctgattgccttatattttgatactgctttgtacacggaggccttggctctgggtgcccaattgctgcgcgagctgaaaaagctggatgacaagaatctgctggtggaagtgcagctgctggagagcaaaacctatcacgcactgagcaacctgcccaaggctagggccgccctcacctcagcccgcaccacggccaatgctatctactgtccgccaaaggtgcaaggcgcactggatcttcagtccggcatcctacatgcggctgatgagcgtgactttaagaccgcattctcctatttctacgaggcctttgaaggattcgacagcgtggacagcgtcaaggccttgacctcgcttaaatacatgttgctgtgcaaaatcatgttgggacagtccgatgatgtcaaccagctcgtcagtggaaagctggtaagttattaagtgcagtccgaaataagtttgcgtcagcagttgtaatgttctacatatacatattatgtaaatgaattattatctaacaaccaaattgttgtgtagatttaatcaatttatcttacaaatataattgtcattaccaggctattacctattcgggccgcgatatagatgctatgaaatcagtggctgaggcttcacacaaacgttccctggccgacttccaggctgccctcaaggaatacaaaaaggagctcgccgaggatgtgattgtgcaggcgcatttgggcacgttatacgacaccatgttggagcaaaacttgtgccgcatcattgaaccctactctcgtgtgcaggtgagatagattataacgtcttggcttgtttgccctcactaaaatctgtttttttcctattggcaggtcgcccatgttgccgagagcattcagctgcccatgccgcaggtggaaaagaagctgtcccaaatgatcctggacaaaaagttcagcggcattctggatcagggtgagggagtactgattgttttcgaagagacgcccgtggacaagacctatgaacgcgtgctggaaaccatacaaagtatgggtaaggtggtggacacactgtaccagaaggctaagaagctgtcgtaagcggtgtgcaggagacattattcaactcaaacatgatatcagcatacttagcagacttttcatagtttccttttgtattttccaacaactcccaagcattgttcaagccaaacatgttttatgtttctgcaaaagcaaaatgaattggtgaagatagcaacaggagcagcaacaaccacaaaaaaatgtaaaacaaaatccattaaactaacataagcaaaattattaatcattgagtgggatcgaattgtttacgcaagtgcggtataataagcaaaatattcaaataactacaaaataaaatgataaaagaaaaccgtaaactgatacgaaaagcgtatatttaatccaggttttgaaatggatgttcatattctatttgctcagtgaaatatatatttttttgattttaagaagggtaataatttagcagatagcttcatagcttttttgattattttttattttgttttaaataaattagtttctacatctataccagggtaatatttaaccgaagtggtgggaaagtcccaggccagcaccaaagtttggcttctggttggcaaacggaccactcgtccacttgctcgccgatcccgtgaggtccaaggtagtagcacgattgggcgatgaccagagattagcacgtccgtccaggccgagttgctggccgattcctgggaagttgctgtgcgtcaaggatccaccatgtccgttgatgtgggagtaatccagaccagctccattgcgctggaactcgaagccattggccagtttattttgtgaagcaaagaccttggcatccagattgtgtctgccattgttgaataaattggcatgggcctcctgctggaagacatccttcactccgggcgtgtgtgttttggtcaaagaggcaccatgaccagcacttcaaaaatgaatagaatagagttaatatagcctctagtaatctcttagcttagagaactcacttgttgtaggccaaagttccgccagttgtgactggaccgctttgagtgtttccggcggcgaaaacctgacctaccacattatggttgggattgccaatgcccttgctgagattcaaccgagcatcagcccctccagcgggattggaggctaaggaacctccaagcacctggcgacggacccgaatgggtcctgttgtgggaactgcctctgcgatggcgaaaagtgccaagataaggatgcttgtcttctgcatgttgctggactggattgctggagctaactgatgtccaaggtgatctgatgatccgcttttatacgtaatcttaggggaagaactttgttggtaaa

SEQ ID NO: 21491 - DNA, 1700 bp, DROSOPHILA
aattttagcaaaaggtaaccgggaattttcctgtttgtgttttgaggtgctgaaatgacggaactgctgaaggaaaaccgttccaacgaggctcgacgtcgcaagatggccggagcaacacttttcgagcgtgcccaggcattgtccagcgtgaatcgcgaggagcaggatagttcgctgctgaacaaactggtccgcgaccaggagggcgccgagaacgatgaggagcgcatccgaatcaaggagcagggcattctgcagcagggcgagctctacaagcaggagggcaaggccaaggagctggccgatctcatcaaggtgacgcgtccgttcctcagctcgatcagcaaggccaaggcggccaagctggtgcgttcgctggtggacatgttcctggacatggacgcgggcacaggcattgaggttcaattgtgtaaagactgcattgagtgggccaaacaggagaagcgcacatttcttcgccaatcgctggaagctcgtctgattgccttatattttgatactgctttgtacacggaggccttggctctgggtgcccaattgctgcgcgagctgaaaaagctggatgacaagaatctgctggtggaagtgcagctgctggagagcaaaacctatcacgcactgagcaacctgcccaaggctagggccgccctcacctcagcccgcaccacggccaatgctatctactgtccgccaaaggtgcaaggcgcactggatcttcagtccggcatcctacatgcggctgatgagcgtgactttaagaccgcattctcctatttctacgaggcctttgaaggattcgacagcgtggacagcgtcaaggccttgacctcgcttaaatacatgttgctgtgcaaaatcatgttgggacagtccgatgatgtcaaccagctcgtcagtggaaagctggctattacctattcgggccgcgatatagatgctatgaaatcagtggctgaggcttcacacaaacgttccctggccgacttccaggctgccctcaaggaatacaaaaaggagctcgccgaggatgtgattgtgcaggcgcatttgggcacgttatacgacaccatgttggagcaaaacttgtgccgcatcattgaaccctactctcgtgtgcaggtcgcccatgttgccgagagcattcagctgcccatgccgcaggtggaaaagaagctgtcccaaatgatcctggacaaaaagttcagcggcattctggatcagggtgagggagtactgattgttttcgaagagacgcccgtggacaagacctatgaacgcgtgctggaaaccatacaaagtatgggtaaggtggtggacacactgtaccagaaggctaagaagctgtcgtaagcggtgtgcaggagacattattcaactcaaacatgatatcagcatacttagcagacttttcatagtttccttttgtattttccaacaactcccaagcattgttcaagccaaacatgttttatgtttctgcaaaagcaaaatgaattggtgaagatagcaacaggagcagcaacaaccacaaaaaaatgtaaaacaaaatccattaaactaacataagcaaaattattaatcattgagtgggatcgaattgtttacgcaagtgcggtataataagcaaaatattcaaataactacaaaataaaatgataaaagaaaaccgtaaactg

SEQ ID NO: 21492 - protein, 422 aa, DROSOPHILA
MAGATLFERAQALSSVNREEQDSSLLNKLVRDQEGAENDEERIRIKEQGILQQGELYKQEGKAKELADLIKVTRPFLSSISKAKAAKLVRSLVDMFLDMDAGTGIEVQLCKDCIEWAKQEKRTFLRQSLEARLIALYFDTALYTEALALGAQLLRELKKLDDKNLLVEVQLLESKTYHALSNLPKARAALTSARTTANAIYCPPKVQGALDLQSGILHAADERDFKTAFSYFYEAFEGFDSVDSVKALTSLKYMLLCKIMLGQSDDVNQLVSGKLAITYSGRDIDAMKSVAEASHKRSLADFQAALKEYKKELAEDVIVQAHLGTLYDTMLEQNLCRIIEPYSRVQVAHVAESIQLPMPQVEKKLSQMILDKKFSGILDQGEGVLIVFEETPVDKTYERVLETIQSMGKVVDTLYQKAKKLS

SEQ ID NO: 21493 - DNA, 3203 bp, DROSOPHILA
tgatagaattaaagaaaaaaaacactgtaactaataataataataattacttcaataatatctattcaaaaaattggttttcctaattttccatattgattaataaccaaattaaacttaaacaatacaataatgaaattatttaaaattttttaaaccccaatattttgcctttggaatcttaagcttctaaaattatagttattactgctgtttttttttctcatggcagattctgttcaacttggttcattgtgtaataagttgactttttgaaaattaacatgactatatcataaatcttctgctcgataaccattgataaccattgtggcaaatgttaattttagtggctatactttattcatatttaaactccacacaagtatgtgtgtatatcaagttctgatcagccttactcgataagcaatgagtcatatccaatgaattatttaaccgcttctctgtttggctgggatttagaatggccaaatttaaaaagccttctaacaaaaatattcaaattcatgggaggggcgcataatagatgggattctactcgtaacatcttttgggaaataacttaagaattagttagcttacggagtagcaatctaaagcaaagttacatcttatttaaatacactactgaaatacatttgtatgttaaattaaatatgctcattcctttggttattccccgatttgtattggaatttatttagcaaaccataaaatcgacagggtacattgtacattacatttgtgtgggtgtgagtgtgtttacctcgttttaaataataaacttcattgttctcaatgcgtatggacaatatgttgaaattcgtattatgtataaattacttagagattatcaatcgctaagagctaatgcaggttatgtgggccctcttcgtgcgcggcctgttttgtgagtgggtgagtaaatacgattcaaatgaagaccaaacgaatcaacaacgttgcacagcagcacctatcatgttgcgggcgctactgtcgcctgatcctcgacagattcgttagacgtcgtcgctggcggcggtgcactggttgtgttgactgcaggtccgttattgttatcattcgccagcggctcttcccccggcggcgccgtctccaatgtcacacttggtgcttgtgtttcactttgactatgcactggtgcagtgttaaatgagttcgtggtgccggcgactttagccggttgctccggactgctgtacatctggataaccgagttgttgttcatgttttccaccgaggcgcccgatatggacagatcgtcggcggagtcgtccgccgtactgtccgtttgcacagccttctcctccagcaggtggtcgctctcacgaatcggtcgctgcgaggagccgtactgcttggagatttgcagcagctcgcgcagcgtttcgttctccagacgcagctgggatatggtctgcagctctcgctgcacgacaccgtcatctacacttgcagctagctgcatcactgctgccatttcgttgatcttctcgcgctgctcccggatcacctgccacatgcgttcgttgtacagctccttaaagctaaacttgctatccaggaccttggagacggtgtgctcgcgatacttttgcatcatcagctccatggcacgctcgtagtcctcaatgaagatctttagctcgcgattctctttgagtatctccgagctgttgatgttttgctgctgaatgcgattcaccatgtccgcgttggtcttgttgttcgaaatgcggttgagtgattcaatgtcgtcctgatactggcgaaggctctccaccagccgattgttgttctccgcctcctcgagcagcgccgtgcccagggcgtccaggtccttcacccgactggccatgcgctgcgcatccattataatctggcccacggataggttcgacatcctgcccaattcagtccagttgcgatttttggatttgtattgttttcgggggccaggccctctgctgctggcactgcgaaaacaaagggaaccgcttaaatttgtgcactttctggggcctacgagcagtgtcttacgttcggtgcgggtaaggtgcagcttcgtccctagcgtaacagcttcatttgattttccggccaaaatatgtaggaatagaaacgattttaatagaaattttgacgacgacccaattattggctgacagcttattaaatcccaaacgccatcggatgttgcacaaatccctaacgccactcattgaatgcgaaaaaatactgtttcaacacttgatataccgcaaatataccaaagatttaaattataattttgttttttaacttttagcttgagatgtcatttttttggctaaatcctttatgtttatgttaaaaaactcttttaaggttaaaaggtgaagctacaagctttattgtcatttttgtataggtcattaagaagctatcagtacagattttgatcttatcgcgaaaaatggaagacttagcgtagaatggacataatgctatgttcttaaacgatcatgcatacataaatctagttatgtctatttaagtacctatttaagtacaaacagcaaaggttttgtcattcaaagtggtagataaaacagaggtagaggaatagcatggtacatcgggcgtagggatgcacagactaaagatcacgagattgcgattacacgccaacgctgttgaggctgccggaggagaggttctcggagcgactggacagacgggggcgtttcatgagtacacgacccggcttgccgggattttcgatggaacccgcctctgcggattgatttagattgttgttgttgccgttgttggagccattgctgccgccagcacgttccagcgtgcgttgtgagcgacgcagcgaggaggaggacatcctgcgcagcgtgggatcgtagtcatagctcgacggccgctgataatagggcgcatcctggtctgtgtcattcttctcctccagcgcctgctgctgctgctgggcgagtggattcaaggttatgtggatgtgtcgtgttcgctggcgctgcttggtgggcgagcagttgcccagcggcacaaagtcatctctcagctccgccatccgtggcttgtttggattgtttccccggcttctggaattcctacgccggcaaacacagaaacaggtgctaatcaga

SEQ ID NO: 21494 - DNA, 1139 bp, DROSOPHILA
ataattgggtcgtcgtcaaaatttctattaaaatcgtttctattcctacatattttggccggaaaatcaaatgaagctgttacgctagggacgaagctgcaccttacccgcaccgaactgccagcagcagagggcctggcccccgaaaacaatacaaatccaaaaatcgcaactggactgaattgggcaggatgtcgaacctatccgtgggccagattataatggatgcgcagcgcatggccagtcgggtgaaggacctggacgccctgggcacggcgctgctcgaggaggcggagaacaacaatcggctggtggagagccttcgccagtatcaggacgacattgaatcactcaaccgcatttcgaacaacaagaccaacgcggacatggtgaatcgcattcagcagcaaaacatcaacagctcggagatactcaaagagaatcgcgagctaaagatcttcattgaggactacgagcgtgccatggagctgatgatgcaaaagtatcgcgagcacaccgtctccaaggtcctggatagcaagtttagctttaaggagctgtacaacgaacgcatgtggcaggtgatccgggagcagcgcgagaagatcaacgaaatggcagcagtgatgcagctagctgcaagtgtagatgacggtgtcgtgcagcgagagctgcagaccatatcccagctgcgtctggagaacgaaacgctgcgcgagctgctgcaaatctccaagcagtacggctcctcgcagcgaccgattcgtgagagcgaccacctgctggaggagaaggctgtgcaaacggacagtacggcggacgactccgccgacgatctgtccatatcgggcgcctcggtggaaaacatgaacaacaactcggttatccagatgtacagcagtccggagcaaccggctaaagtcgccggcaccacgaactcatttaacactgcaccagtgcatagtcaaagtgaaacacaagcaccaagtgtgacattggagacggcgccgccgggggaagagccgctggcgaatgataacaataacggacctgcagtcaacacaaccagtgcaccgccgccagcgacgacgtctaacgaatctgtcgaggatcaggcgacagtagcgcccgcaacatga

SEQ ID NO: 21495 - protein, 315 aa, DROSOPHILA
MSNLSVGQIIMDAQRMASRVKDLDALGTALLEEAENNNRLVESLRQYQDDIESLNRISNNKTNADMVNRIQQQNINSSEILKENRELKIFIEDYERAMELMMQKYREHTVSKVLDSKFSFKELYNERMWQVIREQREKINEMAAVMQLAASVDDGVVQRELQTISQLRLENETLRELLQISKQYGSSQRPIRESDHLLEEKAVQTDSTADDSADDLSISGASVENMNNNSVIQMYSSPEQPAKVAGTTNSFNTAPVHSQSETQAPSVTLETAPPGEEPLANDNNNGPAVNTTSAPPPATTSNESVEDQATVAPAT

SEQ ID NO: 21496 - DNA, 3152 bp, DROSOPHILA
ctgcgattctaatttaacgctggctgagcagcttcgccgaaataaaccgctaaacagagcatttattctgtaattctggggggtgaatgacagccaggaagtgtacaaacggtccatatcctgttggtcgtcctgggtgtccttcggctgccacatggccagccttcataaattgtggccctggctcggcggtgctgtaatttcacaaaggattaagcccgattacgcactcatttattaatatttacgagccggccgacacgggataacagatagcctgcgcccagaacaatggccattccacctgccgcaatttatccgcctccgaacgcctgcatatttcagaatcgctactcataaataagcaattgacgatcaaaaccgtgggtcctttttaattaaaacaataattgtttgtgctggcagccgggcaggactagtggtctagtccagaggacaaatcaattatgcaaatacttggccagcgcaggctggcaggcggaaaatttgcttcgtcatcagctacaagaagttgactcgtcttgacggcccggacaatgcggaaaatattttaattttcctctggccttgttgcgactagcgtaatccttggcgattgcccggcgggtcctctgaactctgtccttccgctctcgccgagtatccttactatccttacccgcatcctgcgcccttttcttatgcaaatatgcgctcggcatccccgggcgacttgccagtttattgatttcccagtctcgctgatttcaatatttgtcgttttcatcttgggcgataaagaaaattattttgatatttttggtgaatattttcgcctgattggtgacaccattattgagtaagagtttcgctgaaatggagaacacagctttactatacaacttttactatattattaattgatatatgtacagaatacattttcattgcgatacatatttatgttcactttttaacaggttttgccgttggcctgcgcatgattaaggtctccattcccgcctacaaactgcgtggcgagtccgcttttctggagtgccagtatgagctgaaccgaacgcaccatacggtcacgggtctgcagagtcactcggaccatgcccacggtcacaatacccacgccggagagttccactatccggatggcgatgcactggaggacgaacggtcgtcgtaccgctcaaggatgcgacaaagccagcggcaacatggccagcggcccaggcagagggaacccatcgccatgcgtcagtaccagagccaacagagccaccagcagctgccagctccgccggagaagtcgccgtacgggcacagtgtttaccggggcagtgccgcctccggctatctgggcgccgcccatgtgggcgccagtacccacagcggatccgtgtccgtaagtaacgggaacagcaacggcgttccggcggcctatatgcccgatttcgatcgggcggacagcttcgacgatagccacgatcgcgaggaggaggaggacgaggacgaggaggagcagcccgaggaaggcgaggccctgtacgccatcaagtggtacaaggacaacgaggagttctaccgatacgtgccaaaggcccggccgccgaagaccagctaccgggtggacggtgtgcgagtcattgtgagtacacacccaaagtattcaaaagaaatattcaaaacaaaataatgccataaggctattgtatttttagcaccgatttcatttccttaatcctatttttctaaaattaagctactgtatatttttgctggcagtagaatttacattggaggcattgttgatatttacctatggtaattttcttgcttcttcaggaggagctttcggacgcgagtcgcgttctgctgcgcggactgacgctcaactcgaccggattgtaccgctgcgaggtgtccgccgaggcgcccaacttctcatcggtgcagggcgaggggcggatggacattgtgtgtaagtactgccattgcgaatgcgaatgccaatctattcgaagtcacgttccgcatttgcctgccacgattttattatatttgttgcaccccgcaagcagcacacaaccgagcaaatgtttgctcgaaaaatttcacatcaattacaggcaaatattgagagcgtaaataaagcaggacaaatgcggaggggtgcaggagcgggttttaaatcaggacctccgtcgttattggcatcatagagaaggatcttgtttgcttatttgttcagcagtatttcgatacagaccgaatccaatgtgaatagtattcatggtttttatacacagatttttgattcaagctgcaaggaatttcaataagcggctaagaactcagagaactcaatgcatgaatgggaattgatacgggattttattggaattactagtttaaataagtaagacaaataggattttaatatgccaatgaatgaaactcaaattaaaacctgtcgcttatgctgtgagggaaatgcataaagagctgaatcgaataaaattatacctgctgtgaccttcattcgctctcctctattttattattttattatttttggtaaaagctttagctgttttaaattgaatatttaaaagccttttcgtggctctgtttaccatttctgcggtccactttccgccacaagctcgcccacacatccacccgctacatgtacatatacatatgtacacatatatattctgattcggatcgagtttatttttgcagcttctgccggcttttgcttttggtcgactaatgcgactggtgctgttgtttgttttggctttctttatcgggccgagcgggcggaaatgcttttaaaaagtcattcataagctttagtttcataacagcatatttttgtaatccaagccgggtcccagcatttttttacgttttacacacgcgctaaactttgctcctttccgctctgcccccccgttttttactatttttatttacttaaaccaaatggccagcggcaaaagggaatatataaaacggtagaccggcacggggggctgcggggcggacacgccagcgatttataagttaaaatgccattttaatggatatttccgcagtctggccgcttacaacatattttgtgtagtccc

SEQ ID NO: 21497 - DNA, 807 bp, DROSOPHILA
atgattaaggtctccattcccgcctacaaactgcgtggcgagtccgcttttctggagtgccagtatgagctgaaccgaacgcaccatacggtcacgggtctgcagagtcactcggaccatgcccacggtcacaatacccacgccggagagttccactatccggatggcgatgcactggaggacgaacggtcgtcgtaccgctcaaggatgcgacaaagccagcggcaacatggccagcggcccaggcagagggaacccatcgccatgcgtcagtaccagagccaacagagccaccagcagctgccagctccgccggagaagtcgccgtacgggcacagtgtttaccggggcagtgccgcctccggctatctgggcgccgcccatgtgggcgccagtacccacagcggatccgtgtccgtaagtaacgggaacagcaacggcgttccggcggcctatatgcccgatttcgatcgggcggacagcttcgacgatagccacgatcgcgaggaggaggaggacgaggacgaggaggagcagcccgaggaaggcgaggccctgtacgccatcaagtggtacaaggacaacgaggagttctaccgatacgtgccaaaggcccggccgccgaagaccagctaccgggtggacggtgtgcgagtcattgaggagctttcggacgcgagtcgcgttctgctgcgcggactgacgctcaactcgaccggattgtaccgctgcgaggtgtccgccgaggcgcccaacttctcatcggtgcagggcgaggggcggatggacattgtgtgcaaatattga

SEQ ID NO: 21498 - protein, 268 aa, DROSOPHILA
MIKVSIPAYKLRGESAFLECQYELNRTHHTVTGLQSHSDHAHGHNTHAGEFHYPDGDALEDERSSYRSRMRQSQRQHGQRPRQREPIAMRQYQSQQSHQQLPAPPEKSPYGHSVYRGSAASGYLGAAHVGASTHSGSVSVSNGNSNGVPAAYMPDFDRADSFDDSHDREEEEDEDEEEQPEEGEALYAIKWYKDNEEFYRYVPKARPPKTSYRVDGVRVIEELSDASRVLLRGLTLNSTGLYRCEVSAEAPNFSSVQGEGRMDIVCKY

SEQ ID NO: 21499 - DNA, 4317 bp, DROSOPHILA
ctggcgcagcttcagcgtcgcctcgtgcttgcgcttaatgaactcctgctcctcgttggacaaaaccatttttcttgttttgtgttgcaaaccaaatttttagcaacagctggcaggtgtgaacgtatacagaaattctaaaaataccaaacagccgacaaatataccagtttcatatatgtaaattttaaatattgtttaagctacttgttttattcgcttaaactcaaaataactgcactgttattaaattattcaactgtaaattattcaactttaaaatggccaaagcatttgcttgaaaaatatcaattacagttggcagccctaagcttggctaatcgactgacgacttatcgatacatgccgattgaaaagttttgaatctgtcactttttgacaatcgctccttgtgaatggtaaataattttgattcgctatcctggtctttcaacgaaagttttccaaagttttatttccttctcgcaaagtctgctgcttcgttgcagcgagcactttccaccccgaccacagttaaacgcgcgctctcgctcgctctcactgcgcatgtcctacaaagtgtgatgcgcagatctcgtgtccgcatcctaatttgcgtccttattcgacagattcgcattaataacacctgttttgcaaaaagacgtgcattcccgttagccagttaattggcaaataagaaaaaaacgaggctttttcgcggtgtcagttggaaaaacccctaaacgcaggtagttactaatcaataactcccccttggcgcatgccttttaaggacgagagagagcgagagagctgttgtgagccaacgcgcatgctactacttagttgggtgggaaatgcacttggcttagccaccaattttcccgagcggcgggggtttagccgatgtttaggggtggatttccggcaattcggttgcccgcgattgcgccgttcgcctggctcatttttcactcgcctgcagacggaggcaacggctcccggatttccattttctagcctatattgattttcacctgcctacctgttcgttttctagacgcagttccgccgccatgagcctgaagtccagtgctaggatcaaaaaacgccgctcggaggcagcggcggccacctatccggtaccatcagctccggctcaaacggtgagcaacggctcagctgccacagcgaatcctgcgagtgccacgagcactccaggaaatggtgccacaaatccttgccagagctcgtccaagaaacaaagcttcgtgggacgcaatcccaacttcgataccgatgaaaccaagctgctcatccagttgtggggcgatcccaaactgcagagaaccctaatcaccacgcacaaaaagcacgccgtgatctgtcaactggccgccaagatgcaggagtatggctaccatcgttcgccagaggagattactacacggattaagaacctcaagtgcttctacaatcgcttgaagaaggacaaggagtgcggcggtcagtccaccgattcggagcccagctggaaacactttgccgagatggacgccattatgaccagacccattttcagtgtgcgtcccaatgaggtgcctgctccatcgctcaaataccaactggagcaggccctggaggagcatgccgaacgacgcaagcggcggctggcgaacggagaggagctatccgaaagcgacaacgaggaggatgatatgctgctctccgctctggtcagcaaaaacaaggatactggcggccgaaaggaactggaagctggctgcctagaagccgacagcgatatgaacgaggaatccttctcaaagcgtcgcaaggtgtccgctgatgtagaggttgatataggagaagcactgacttcgccgtgcatcaaaatcgagccaggccaggaagttgaaacagcagcagcaacttccaccgtagagccccaacaggaggaggaggacgatgactgcatgattctgccacagcccaaggaagaacccatcgatgtggatgccgctgatgatccaccaattgagaagtcatcaagttccactactaatacatccactttggctgacatgttacagggtaacaaaccgtcgaatctgcttcctttcaccggggccaatgtcatcattccggccagcattaccacgactacggctggcacaagcgcgaccacgcaaagttcaacgacaacgtctagcaaacttcagggcggtaaaatctcgttggtgccagcgaatttcctgatgcaatcaaagctgccggctgccgcaggaccaagtcccatggcaaacgccaagggagctgcgccccaaatccagctgctgcagagtgccatcaatcagggggctcgtctgatgattagcggatcggcagcagcaccggcacagcctagcaacgccggtttggtggccacagcccccggaggagtcaagttcgtgctggtcaatgctgagcaggccaaggcggctgcagcggctgctgctgtgggtaaatcgaccgcctcgttgcccttgtccactgcccaagctcaggtgcaggccgctgttcagcagcagcagcagaaactacatcagagcctgcagcaggagcagcaccatcagcagcacattcaactggagaaggaggagagtcgccatgatcacgagaaaggtaggaaggatctgcaaacgaagagacacatgacatgtgggtagcaagttgctaatattctgtctccaatgtactaaaaaaaagttcaattttcagcaatgagaatccttcttcgtcagttgctgaactcgcaaaacgaagccaacgagatccaacacaatcgtttatccctggaacgcgagcgcctggactgggagaagtctatgggcgagcgtctgttaaacctgttgccaagtctcatgcagccgccacctgcagcctcgccatgctccacggctcaacgtcttcagccgcccaagctgctcttcacaactgctctgccaatgggcaatggcaccgtcaccatgccgcacatcctaacatccaattcgctgccaaaagtgattaccacttcaagttgcaacagcggcgtggcagtggccggatcaggagtgggcctagtagccagtgtggcccccaagccggtagataacgacgtccagttgatttcgcccaagctggaaaaggagatctgattaagaggaactagtcgttataagtgattgatattagaaacacacttaagtgatctcaaagaaatgatattctggtctttactttagtagactctaaaaccagtatcctaataataaaaaccaaagaaatctctcattctagggttattttcatatttaaaatgatgggcaataagcaataattagtcaatatttaaatttaatctagaattttgcgctcttatatatttgattaatagcatacatgattgtctaatctaaaaccagatatggcgtctaagaatcttaaaaagaaagtttacaaaatacgcattaactattctcctattacagcaaataaaacgagtatatcgtgaccctagtaaatattgagcctttccatatcccggatttccatgatatccgtcttcagtcgctgcttaacgatctcccgccaaatggcttcccgatcccggttgtccgtcacgcccattctttgcagtgaggagtctgtgatccggagtagagcccttccggttatatcgtgctgtgtacatggaaagaaattaaacaagatcagtaggcagttatagtgatgtctaaattttagcaaaaggtaaccgggaattttcctgtttgtgttttgaggtgctgaaatgacggaactgctgaaggaaaaccgttccaacgaggctcgacggtaagtgaagtagatcaaggactacgatttggattgtgggctcaactcacctgggcgaagagctgctcatactgggtgtattcaccgcagtggcggcgataccacttgagcacatcgctaactgtccacaggtacactgccttcggtcgcgtagttttcgttctggttttgttttgcgttgagttaatagtttcttcacccatttcacaaaaaacaaatcgagaaatttaagatttatttgcaaatagcaacaaaacaaatagtgatggtagctaggcgatattaattaggtgtgagacaagatatcgattacagttgtattactgtaatgtaaatataaaaaaatgtaaattaggggtgacacaatcggccgataagttccctaatccgactgatttaaatcaaaggtataaacgatatcctaagaaattcacgagttgtgtgcgatatatcgac

SEQ ID NO: 21500 - DNA, 2317 bp, DROSOPHILA
gctcccggatttccattttctagcctatattgattttcacctgcctacctgttcgttttctagacgcagttccgccgccatgagcctgaagtccagtgctaggatcaaaaaacgccgctcggaggcagcggcggccacctatccggtaccatcagctccggctcaaacggtgagcaacggctcagctgccacagcgaatcctgcgagtgccacgagcactccaggaaatggtgccacaaatccttgccagagctcgtccaagaaacaaagcttcgtgggacgcaatcccaacttcgataccgatgaaaccaagctgctcatccagttgtggggcgatcccaaactgcagagaaccctaatcaccacgcacaaaaagcacgccgtgatctgtcaactggccgccaagatgcaggagtatggctaccatcgttcgccagaggagattactacacggattaagaacctcaagtgcttctacaatcgcttgaagaaggacaaggagtgcggcggtcagtccaccgattcggagcccagctggaaacactttgccgagatggacgccattatgaccagacccattttcagtgtgcgtcccaatgaggtgcctgctccatcgctcaaataccaactggagcaggccctggaggagcatgccgaacgacgcaagcggcggctggcgaacggagaggagctatccgaaagcgacaacgaggaggatgatatgctgctctccgctctggtcagcaaaaacaaggatactggcggccgaaaggaactggaagctggctgcctagaagccgacagcgatatgaacgaggaatccttctcaaagcgtcgcaaggtgtccgctgatgtagaggttgatataggagaagcactgacttcgccgtgcatcaaaatcgagccaggccaggaagttgaaacagcagcagcaacttccaccgtagagccccaacaggaggaggaggacgatgactgcatgattctgccacagcccaaggaagaacccatcgatgtggatgccgctgatgatccaccaattgagaagtcatcaagttccactactaatacatccactttggctgacatgttacagggtaacaaaccgtcgaatctgcttcctttcaccggggccaatgtcatcattccggccagcattaccacgactacggctggcacaagcgcgaccacgcaaagttcaacgacaacgtctagcaaacttcagggcggtaaaatctcgttggtgccagcgaatttcctgatgcaatcaaagctgccggctgccgcaggaccaagtcccatggcaaacgccaagggagctgcgccccaaatccagctgctgcagagtgccatcaatcagggggctcgtctgatgattagcggatcggcagcagcaccggcacagcctagcaacgccggtttggtggccacagcccccggaggagtcaagttcgtgctggtcaatgctgagcaggccaaggcggctgcagcggctgctgctgtgggtaaatcgaccgcctcgttgcccttgtccactgcccaagctcaggtgcaggccgctgttcagcagcagcagcagaaactacatcagagcctgcagcaggagcagcaccatcagcagcacattcaactggagaaggaggagagtcgccatgatcacgagaaaggtaggaaggatctgcaaacgaagagacacatgacatgtgggtagcaagttgctaatattctgtctccaatgtactaaaaaaaagttcaattttcagcaatgagaatccttcttcgtcagttgctgaactcgcaaaacgaagccaacgagatccaacacaatcgtttatccctggaacgcgagcgcctggactgggagaagtctatgggcgagcgtctgttaaacctgttgccaagtctcatgcagccgccacctgcagcctcgccatgctccacggctcaacgtcttcagccgcccaagctgctcttcacaactgctctgccaatgggcaatggcaccgtcaccatgccgcacatcctaacatccaattcgctgccaaaagtgattaccacttcaagttgcaacagcggcgtggcagtggccggatcaggagtgggcctagtagccagtgtggcccccaagccggtagataacgacgtccagttgatttcgcccaagctggaaaaggagatctgattaagaggaactagtcgttataagtgattgatattagaaacacacttaagtgatctcaaagaaatgatattctggtctttactttagtagactctaaaaccagtatcctaataataaaaaccaaagaaatctctc

SEQ ID NO: 21501 - protein, 543 aa, DROSOPHILA
MSLKSSARIKKRRSEAAAATYPVPSAPAQTVSNGSAATANPASATSTPGNGATNPCQSSSKKQSFVGRNPNFDTDETKLLIQLWGDPKLQRTLITTHKKHAVICQLAAKMQEYGYHRSPEEITTRIKNLKCFYNRLKKDKECGGQSTDSEPSWKHFAEMDAIMTRPIFSVRPNEVPAPSLKYQLEQALEEHAERRKRRLANGEELSESDNEEDDMLLSALVSKNKDTGGRKELEAGCLEADSDMNEESFSKRRKVSADVEVDIGEALTSPCIKIEPGQEVETAAATSTVEPQQEEEDDDCMILPQPKEEPIDVDAADDPPIEKSSSSTTNTSTLADMLQGNKPSNLLPFTGANVIIPASITTTTAGTSATTQSSTTTSSKLQGGKISLVPANFLMQSKLPAAAGPSPMANAKGAAPQIQLLQSAINQGARLMISGSAAAPAQPSNAGLVATAPGGVKFVLVNAEQAKAAAAAAAVGKSTASLPLSTAQAQVQAAVQQQQQKLHQSLQQEQHHQQHIQLEKEESRHDHEKGRKDLQTKRHMTCG

SEQ ID NO: 21502 - DNA, 2750 bp, DROSOPHILA
atcccgccatggatgtagttcgcaatttgatgctgactaggatccgcaagtttctgctcacctttgtggccaccagggatttcctcgatctgccgacctcccatctgatttttttgctcgaatccgatcaaatctgtgtgaacaccgagattgaggtggtgttcaacataatatttatagttattattgcattttatatgtttttcttaggttttctttatagctgttcgatggctgggtcacgattggaacaagaggaaagtgcacgtacgtcgtttaatgtcctgtattcgattcaacctgatgccattgtggtatctactatatgcgcgacgggaggaggatcacccgttggtgatgaagctgattttcaacccggaggtggagtacaagatcgacgaatccatatcgagaataacgtcgcgcatgtacgaggatgccttggagggcaatgacgcacagagtgaggaatacgcaagtgattccggacagcgaaactggatatgcgatagcttgtgcagctattatcacggcgtcggttgtcccaatacccgggaaattcgtttcaaacacttcgaggattacctttcggaattacaacaatgctccaaagatcactggtctcaggtgatatttcaggacccgagtaaaaagattgactgttgcagcacaaggaagataaaatcggacgattttgttgccgattaactattgagtttgaatagtaacgactagaattcaaatttgcgggcttcagtttgtgctagtataacaacttggcacacttttctgttatacattgtacacttcgttcatttgatatttatgaaacaaatcagcatatttttaataatatattttttaaaatgtacatcaacattttaaaaaaaaagcaagtggtttaataaatataattaatatttattgtattattgtcgcaactttaagtgtgaccatttctgcaacgctctttggcatttcgggcagatagggtggcgtgcacactttgcattgttttggaaaataatttgatacatttatcaggaaaatggaaaaactggaggccctaaaaatatcctcgatgcgtccgcgcagcaacatcctagacagaccactatccaagggcaaaacggaggtttcccagagcattgtggcgctgcttttcagcgaaatcgtccagtactcgcagagccgagtgtttacagtcccagaattgcaaacaaggtgggagtttctctaagtttttgcgattaattcgttaattccaaggcgttttcagactccacgatctgggtcaagatgtaggcacccgcataatcgacctgtatttcgtgagggagcgcagctccaagcgagaaacaaaactaacccaaatgcttctctttgttaagaccacggtgtggaagaatctctttggcaaagaggcggagaaactggaacatgccaacgacgacgaaaggacatactacataattgaaaaggaaccgcttgtcaacacattcataagcgtgccaaaggataagggctcgctgaattgcgctaatttcaccgctggcatcgtggaagctgtgctcacgaactgcggatttgtatgttttccggcagactttataaaataatatatactaacattattatttgcgttttacagccgtgcaaggtcaccgcccactggcacaagggcaccacgtacatggtcaaatttgaggactttgtcatcgcccgcgacaagcagatggaggagaaataaatggcatagcttcattacggttttgttttaattccactatacgaatcgaagatcaattggctgaatgtatggcttagatgaacttgaactggcggtccttgtaggccacctggccagtcctgtacttctcctcgcgtccatcgcgctccgccttcaaagcccaggcgtagagggcaatcggcaggacgacggcgaaaaggcccgtgcggaaggatttgccggtgggcttgaagtgttcgtagttggagactcgcatcgcctggaaacgggctaatcccgcatcgaactgcaatttaaagcggtttaatagtatttattcctcaacgtgatgacataaccaagccaaggattggtgctaccacttacaacggtgccgccctcgccggtggcatggcggtagggattggagctctgcttgaggaactcctggcgcagcttcagcgtcgcctcgtgcttgcgcttaatgaactcctgctcctcgttggacaaaaccatttttcttgttttgtgttgcaaaccaaatttttagcaacagctggcaggtgtgaacgtatacagaaattctaaaaataccaaacagccgacaaatataccagtttcatatatgtaaattttaaatattgtttaagctacttgttttattcgcttaaactcaaaataactgcactgttattaaattattcaactgtaaattattcaactttaaaatggccaaagcatttgcttgaaaaatatcaattacagttggcagccctaagcttggctaatcgactgacgacttatcgatacatgccgattgaaaagttttgaatctgtcactttttgacaatcgctccttgtgaatggtaaataattttgattcgctatcctggtctttcaacgaaagttttccaaagttttatttccttctcgcaaagtctgctgcttcgttgcagcgagcactttccaccccgaccacagttaaacgcgcgctctcgctcgctctcactgcgcatgtcct

SEQ ID NO: 21503 - DNA, 633 bp, DROSOPHILA
cacactttgcattgttttggaaaataatttgatacatttatcaggaaaatggaaaaactggaggccctaaaaatatcctcgatgcgtccgcgcagcaacatcctagacagaccactatccaagggcaaaacggaggtttcccagagcattgtggcgctgcttttcagcgaaatcgtccagtactcgcagagccgagtgtttacagtcccagaattgcaaacaagactccacgatctgggtcaagatgtaggcacccgcataatcgacctgtatttcgtgagggagcgcagctccaagcgagaaacaaaactaacccaaatgcttctctttgttaagaccacggtgtggaagaatctctttggcaaagaggcggagaaactggaacatgccaacgacgacgaaaggacatactacataattgaaaaggaaccgcttgtcaacacattcataagcgtgccaaaggataagggctcgctgaattgcgctaatttcaccgctggcatcgtggaagctgtgctcacgaactgcggatttccgtgcaaggtcaccgcccactggcacaagggcaccacgtacatggtcaaatttgaggactttgtcatcgcccgcgacaagcagatggaggagaaataa

SEQ ID NO: 21504 - protein, 194 aa, DROSOPHILA
MEKLEALKISSMRPRSNILDRPLSKGKTEVSQSIVALLFSEIVQYSQSRVFTVPELQTRLHDLGQDVGTRIIDLYFVRERSSKRETKLTQMLLFVKTTVWKNLFGKEAEKLEHANDDERTYYIIEKEPLVNTFISVPKDKGSLNCANFTAGIVEAVLTNCGFPCKVTAHWHKGTTYMVKFEDFVIARDKQMEEK

SEQ ID NO: 21505 - DNA, 2971 bp, DROSOPHILA
tgagtgcgaactaaatgcactccatgcctgcattattgagaccctggacattcggaaggccttcaatctgatctactgcatgctgcgctcctattcgaatgagctgggcccgtgctcgaggagcatgggtgtggacgtcagcaaggccagggagtgtaaggcatcccgaaccacggcagaaatactggcgccctacggcaaggaaacccttaaactgggcatctcctttgtgcccaccattgtgttcgagaatgtgagtaaccaacccaaccaggcttacatgatcaaataccagacttaacttaacattaccctctgatccgcaggactttgatccttacgaccagagaagcattcgcaacaacttcgaaagacacttctgtcggcagtatctgaaaaagttcaacatcaaactgcccacttgttccgcaattttgtaaacttttatgtaatgtactgagtaatttaactgtttcaatgttccaagaccaataaacaataattataaccaactggagtgtttgcttactcgctgactcacttggggccaataaaaatttacatgtgtatagtatatacatatcagcttatcagtcatgtttttgtatacagattctaatcagaaacagctgtctggtggtctaaaaataagattaaaaccccgctgctcagtaagttttccgtagtcagcgcataaatgtaaaggggaaaatgctggttgacagcaggggcgtcgaattggttggctagtcacaccctttatctatatatttatattaattttttcaaaagcggatatattacagaaaaattataaaaaacaagcgaaaagtcaccctactattgcaatacaaataattattttttttttaacttatatgatttttgagccccccttgagcattttctaaccacgccactggccgcttcgaatttgacgaaacgcagtgacaacgctgcgcattacaagtcccggaattatttcagtgtcgagcgttcgctggcgttgagcggccgaatatttcaagatcagctcgggattaaactgaatttgccatgagggcggctgtctttgtgtgtctgctgctgggatgggtgggcgtggccacgccaagggtaagtgacccagttgatcggactgaatcccgaattgcgacgctcccattgatcgtgactttgcagcgtttgcgcggaccgcaagctgaccgactggcgatcaccctgtactacgaagcattgtgtccctactgcatggagttcgtgaccacgcagctcaatccctcgatggtccgtcaggatcgacttccattcactgatcttacgctggttccttatggaaatgccagggtaggtttcatttttcgtagcttaaactagtagttatagtacaagtacatagtatagctcaatttgaagttttagagtgtcaatcagcgttaatccgcacttaaacttcgcttaatcccctccagacgaacgatgacggaaatgtggagtgccagcacggagtgatggagtgcgaattgaacgcgtggcacgcctgcatactggagcaccatgacattgcccaatccctcaagctgatcgcctgcatgatgaggggtaagaagaacaggctggaaaagtgcgctgaccactatcaaatcgacgtgggcgatgtcaaaaattgcaagaaaacgcgacaggtgaacgacattctgaggaagtacggcaaggaaacggccaaggtctcatttcagggagtgccagccgtagctctggataacgtgagtttaaatgcgaaagaaattcatgaaatctaaaataaaactttgtgattttaaggtttataacgcggatctatcagcaaacttaactgatcattttgatgccattttttgcgccaagtataaggaaaagttcaataagcagctaaataattgtcaataaatattgtgttcatttaacaatacatttttttattaaaaaatattttttgcattttctttgtaattaaatcgtaaaatcaggttctgaaaaatgaatagttcgaatttttagttttcccgcccagcagtggcgccatctatgacagcatgctgccagacctttgaacattcgctacgattttagtatttttctttggcggtggtatatttcaacgcgacaacggtcccactcaactattttcgcaacacgcgacgatacgaattttccacatttctttgttgatttctggaaaatcgctgtatatagaccgaatagccgactgcagactgagcaccaggtaaacgcgcgagatgagcgagaccataaacaccgcggctcagttcccgagcttcgagaagccgaccgtgcagttcaatgaaaagggctggggtccctgcgagctgcccgatacgttcaaggatgtgccgtaccagccgttcagcaagaacgatcgtctgggcaagatctgcgactggacgaatacgtcgaacaacgacaagaagtaccagagtgagtttattccccacccgaaaccgacccacaaaatactaatcgccgaaagtgaggttaggtaggtgtgtcgtggcatgatattgttgctaacatattggtggttggtattccattcgcagacaagtatgcctccagctttggcacgggcattcagtactcgtactaccatgaggaggacgagacaaccttccacctggtggacacggcccgcgtccagaagccgccgcaccagcgcggccggttccgcaacatgaggaattcgcgttccggtcgtggcaggaatgcccgcggtggccttaatactcacggcatgacgacgctcagcggcaagaatgtaaaggcccgcgatccgcgccatggtcgcggcatgggcaagaagttcggtcatcgcggaccaccaccaaagatgcgcgaatcttcggtggccgtccgcgccgattgggcatccatcgaggagatggacttcccgcgactcatcaagctgtcgctg

SEQ ID NO: 21506 - DNA, 722 bp, DROSOPHILA
ctggcgttgagcggccgaatatttcaagatcagctcgggattaaactgaatttgccatgagggcggctgtctttgtgtgtctgctgctgggatgggtgggcgtggccacgccaaggcgtttgcgcggaccgcaagctgaccgactggcgatcaccctgtactacgaagcattgtgtccctactgcatggagttcgtgaccacgcagctcaatccctcgatggtccgtcaggatcgacttccattcactgatcttacgctggttccttatggaaatgccaggacgaacgatgacggaaatgtggagtgccagcacggagtgatggagtgcgaattgaacgcgtggcacgcctgcatactggagcaccatgacattgcccaatccctcaagctgatcgcctgcatgatgaggggtaagaagaacaggctggaaaagtgcgctgaccactatcaaatcgacgtgggcgatgtcaaaaattgcaagaaaacgcgacaggtgaacgacattctgaggaagtacggcaaggaaacggccaaggtctcatttcagggagtgccagccgtagctctggataacgtttataacgcggatctatcagcaaacttaactgatcattttgatgccattttttgcgccaagtataaggaaaagttcaataagcagctaaataattgtcaataaatattgtgttcatttaacaatacatttttttattaaaaaata

SEQ ID NO: 21507 - protein, 207 aa, DROSOPHILA
MRAAVFVCLLLGWVGVATPRRLRGPQADRLAITLYYEALCPYCMEFVTTQLNPSMVRQDRLPFTDLTLVPYGNARTNDDGNVECQHGVMECELNAWHACILEHHDIAQSLKLIACMMRGKKNRLEKCADHYQIDVGDVKNCKKTRQVNDILRKYGKETAKVSFQGVPAVALDNVYNADLSANLTDHFDAIFCAKYKEKFNKQLNNCQ

SEQ ID NO: 21508 - DNA, 4081 bp, DROSOPHILA
acatccagatatttttagtttatattggctttttaccctcgcttcaatgaatcaatttttgctgatggcaggtgctactagtatccttgctatggcttccttgacggtgccaaaaaattgaattagccaaattagcgacacttgtgggttatcctgtcgaggatatagaggcagctctggtacctcgatgcctctcattcgttttaaaccattggtgcatccagcatggctacggtttcctataccaaacttggtcccaaacgcaaaataagcaggtggaatggctactgattttagtatttaggctaagatatgtctagcatgataagctcacattaaaaaatggttacaaagagatattaaaatgaagattaaaattgtattctccatcgaaactaatgcaatttacaccaattttttcatttcacagcgacttcttagtaacagtacgcgcacaggtaatgaccagagacgagagcaccgagggctggcttccgctggccgggggtggcctggccaatgtttcgatccggaagcgggctaggctatccccattggcatcgggtcatgactacatcatctacgggcagagaatatccgatcagagcgtgagtatagatcccacactagaatatgctgttgatattaaaatgaattacttccggcaggtcatcttgagctgtgtgatcaatcgtgatctgaagtattacaaagtaatgcctacatttcatcattggcgcgcagggaagcagcggaatggactcacatttcaaacggccgccgatgcgcgagcctttgacaagggcgtcctgcgcgcctacaacgagctgatcgatggtaaacccctgcccgaatcctcatggctgagccccaactaccatctaatgtaccaactagttgcatgaccggcttgcacatcccgtctctctatctctctctctctctctgctttctgtcagcccgctttagttgctatttgattcctactgcttaccttctcatgccgaagccacttgcctttctttcctccaaatcttccaagtctctgacttagtattgctttcgtttactaatatatatatatatataactttttgtatgtcttatgctctacttttgccacaataccaaacgaaaaaccaacccaattatcaaacatcatcacacacaatcacattggaatattgcaaattgttttaaaaatcaacaaatcaaccaaacatttaaaactataatttcactcaaattggtaagtgttaaatgaggccgtacctcgaatttagttttgtgtgtgtgtgctgtttgctttgaagaggaacattgcgctgctcgatcacttcaaaattctcagcacatatatgtgaaatagtatagtctagtccacactagtaggtcaccacgtttcgatgagttcttttcgattttcatgcttacacttagctgtattctgattatacgctcgtcaagatctatcttctttctgtacaactttaaactgttctctgctttgcgccttgctaaaaaactttgctgtttactcataaatagtttggaatttatgatgactaaacctgattcatttaccttatctaggactggccaaatcgaatccaacgataatatgcccaccgctaaccaaatatgattcggttggcgaagatgatgtattcatgaccctggacttacctgtggagagcgagagtttacaaaagatccattcaagccccgagggcagcgagaaaagtcacagtaagtgttgctaaattgggtaaaaaaaaaaaaaacaggtggaatcaattaatgaagattcacttgatacccaatgactaatcaattgagagcacatctttaatccatcgcttaccttgcagagagcgtcagcaacaactccgactcggagaagctgcctccgccgcccattcactacatatccacggacaaaacatcggccaccacgtcgccgccagacgcaccgcccgcttctgctgctccatcgccggcgacggccggccagatagcggccagtgagaactactcgtacgtgacgctgacggcggtgcaccacgactacaactatccggtggtggaccagccggtgggggcgcaggtgctcaatgctcgcagggagtcgatcagtgcactaaagaagcgcaacgctctggaggcagcgcaggcgatggcggcggctcagacggcggcgggtggtggactggcctgtcgcgacggcggatcgggaaagccactgcacaagccaaacgtatccgacatactgaagaaggagacgcgcctgcgatgccgctactgccacgagctgtacagcgaggacttcaatcggcggggcgcctgcgaatatgccccggatgcgtttcgcagcggctacgagtgcatctctgggatgggctgtgcccgttgcatgatctaccactgcatgagcgacgccgagggcgagacggcccagcatccgtgcgactgcagcgccagcgaggccggctgcagcaagcgctggctgggcctggcgatcctctcgttgttcgtgccctgcctgtggtgctatccgccgctccgcgcctgccacttggccggcatccactgcggcctctgcggcgggcagcacaagccgcatgtctgacatttggaggcccgcttgcaaggacagcacgatgatgaccccaggcccagaagcgaattccactaccaccactccgagcagagcataatgaacagcgccaagcgtccgtggggcgccaagcagaagcagtcgcagcaatcacagcaatcgcagcgtcatttttacaactgggagctgtcgcacagcttgggtgctccccagcatcagactccgccgtatttaatgcaatcaactggcaggaaggcaccgcagaacgattacggacgcttgctgttctaggctttatccatgatgacagcctgaggactcatttttacaaactgattaccaagaagtactgattatttcaccagatctacggtatcttaaagatatctaaaagtggacaaggaaatgtttttctgataaatggcaagaaaacaatgttttcacactgttgagatgaaaaaatcgtgtcgatgcaaaagcacagctttttcaaatcgggtgaaagaagaatgcgtaagaagcaattcagcttgaaaatcagtttgccaaaatgggtctggggttcgattttagtatcatttcggtatactccatttgaattgccataattaattgtatatacaaaagagcaggaaggattatgtatctaattttaatatacttttaaaattgtaacttatgtttagtgctctcgcttaattatagttttgtaaaaacgggctatttgtttttattcgtaactgaacacacatttttttgaaaaatcaaaatattatacaatgattgttttagttttagttgtttagggttttttgctattttacacttgcttgtttacaattcgaaattggagaacagtattaaaaggccaaggcgaaggcaaaggcgaaacgagaactaaatatatttaaatgcgattttctctgcgcgattccaatttgttaatcaatgtcacgcgctcaaaaactcacacgaaaagttcaaacaaacggcaacctgatgcgcaaatgaataaaaaaaaaaaaatcgagacacgcaacaactcggcagaagaattagtggacgacgacgacacggctgtcgagccgttcttctccgaacctgaagaagaattacaaattgtattcgatttactcctctagcaaaagagtctgcggcaatgctcaagttttgtgcgttcgctatgctcggcaattgttacttaaatgtgctttagttcagaactatgtacccattcggttgccttataaaaaggatgtttttgtctcttcttagggctcatgaagattcaaaatattccttttgccccaaactcaaaacgtttgttttccaaaatcttttgttcagacgttgaaatagaatgagaaaccaattagaattagagagtcgatggacaaacaaagagcgcagcattgctcgattggaaatcttttgcaactaaataattctagaatgcgaagcaat

SEQ ID NO: 21509 - DNA, 1683 bp, DROSOPHILA
aatgaccagagacgagagcaccgagggctggcttccgctggccgggggtggcctggccaatgtttcgatccggaagcgggctaggctatccccattggcatcgggtcatgactacatcatctacgggcagagaatatccgatcagagcgtcatcttgagctgtgtgatcaatcgtgatctgaagtattacaaagtaatgcctacatttcatcattggcgcgcagggaagcagcggaatggactcacatttcaaacggccgccgatgcgcgagcctttgacaagggcgtcctgcgcgcctacaacgagctgatcgatggactggccaaatcgaatccaacgataatatgcccaccgctaaccaaatatgattcggttggcgaagatgatgtattcatgaccctggacttacctgtggagagcgagagtttacaaaagatccattcaagccccgagggcagcgagaaaagtcacaagagcgtcagcaacaactccgactcggagaagctgcctccgccgcccattcactacatatccacggacaaaacatcggccaccacgtcgccgccagacgcaccgcccgcttctgctgctccatcgccggcgacggccggccagatagcggccagtgagaactactcgtacgtgacgctgacggcggtgcaccacgactacaactatccggtggtggaccagccggtgggggcgcaggtgctcaatgctcgcagggagtcgatcagtgcactaaagaagcgcaacgctctggaggcagcgcaggcgatggcggcggctcagacggcggcgggtggtggactggcctgtcgcgacggcggatcgggaaagccactgcacaagccaaacgtatccgacatactgaagaaggagacgcgcctgcgatgccgctactgccacgagctgtacagcgaggacttcaatcggcggggcgcctgcgaatatgccccggatgcgtttcgcagcggctacgagtgcatctctgggatgggctgtgcccgttgcatgatctaccactgcatgagcgacgccgagggcgagacggcccagcatccgtgcgactgcagcgccagcgaggccggctgcagcaagcgctggctgggcctggcgatcctctcgttgttcgtgccctgcctgtggtgctatccgccgctccgcgcctgccacttggccggcatccactgcggcctctgcggcgggcagcacaagccgcatgtctgacatttggaggcccgcttgcaaggacagcacgatgatgaccccaggcccagaagcgaattccactaccaccactccgagcagagcataatgaacagcgccaagcgtccgtggggcgccaagcagaagcagtcgcagcaatcacagcaatcgcagcgtcatttttacaactgggagctgtcgcacagcttgggtgctccccagcatcagactccgccgtatttaatgcaatcaactggcaggaaggcaccgcagaacgattacggacgcttgctgttctaggctttatccatgatgacagcctgaggactcatttttacaaactgattaccaagaagtactgattatttcaccagatctacggtatcttaaagatatctaaaagtggacaaggaaatgtttttctgataaatggcaagaaaacaatgttttcacactgttgagatgaaaaaatc

SEQ ID NO: 21510 - protein, 409 aa, DROSOPHILA
MTRDESTEGWLPLAGGGLANVSIRKRARLSPLASGHDYIIYGQRISDQSVILSCVINRDLKYYKVMPTFHHWRAGKQRNGLTFQTAADARAFDKGVLRAYNELIDGLAKSNPTIICPPLTKYDSVGEDDVFMTLDLPVESESLQKIHSSPEGSEKSHKSVSNNSDSEKLPPPPIHYISTDKTSATTSPPDAPPASAAPSPATAGQIAASENYSYVTLTAVHHDYNYPVVDQPVGAQVLNARRESISALKKRNALEAAQAMAAAQTAAGGGLACRDGGSGKPLHKPNVSDILKKETRLRCRYCHELYSEDFNRRGACEYAPDAFRSGYECISGMGCARCMIYHCMSDAEGETAQHPCDCSASEAGCSKRWLGLAILSLFVPCLWCYPPLRACHLAGIHCGLCGGQHKPHV

SEQ ID NO: 21511 - DNA, 4212 bp, DROSOPHILA
attgcgacgctcccattgatcgtgactttgcagcgtttgcgcggaccgcaagctgaccgactggcgatcaccctgtactacgaagcattgtgtccctactgcatggagttcgtgaccacgcagctcaatccctcgatggtccgtcaggatcgacttccattcactgatcttacgctggttccttatggaaatgccagggtaggtttcatttttcgtagcttaaactagtagttatagtacaagtacatagtatagctcaatttgaagttttagagtgtcaatcagcgttaatccgcacttaaacttcgcttaatcccctccagacgaacgatgacggaaatgtggagtgccagcacggagtgatggagtgcgaattgaacgcgtggcacgcctgcatactggagcaccatgacattgcccaatccctcaagctgatcgcctgcatgatgaggggtaagaagaacaggctggaaaagtgcgctgaccactatcaaatcgacgtgggcgatgtcaaaaattgcaagaaaacgcgacaggtgaacgacattctgaggaagtacggcaaggaaacggccaaggtctcatttcagggagtgccagccgtagctctggataacgtgagtttaaatgcgaaagaaattcatgaaatctaaaataaaactttgtgattttaaggtttataacgcggatctatcagcaaacttaactgatcattttgatgccattttttgcgccaagtataaggaaaagttcaataagcagctaaataattgtcaataaatattgtgttcatttaacaatacatttttttattaaaaaatattttttgcattttctttgtaattaaatcgtaaaatcaggttctgaaaaatgaatagttcgaatttttagttttcccgcccagcagtggcgccatctatgacagcatgctgccagacctttgaacattcgctacgattttagtatttttctttggcggtggtatatttcaacgcgacaacggtcccactcaactattttcgcaacacgcgacgatacgaattttccacatttctttgttgatttctggaaaatcgctgtatatagaccgaatagccgactgcagactgagcaccaggtaaacgcgcgagatgagcgagaccataaacaccgcggctcagttcccgagcttcgagaagccgaccgtgcagttcaatgaaaagggctggggtccctgcgagctgcccgatacgttcaaggatgtgccgtaccagccgttcagcaagaacgatcgtctgggcaagatctgcgactggacgaatacgtcgaacaacgacaagaagtaccagagtgagtttattccccacccgaaaccgacccacaaaatactaatcgccgaaagtgaggttaggtaggtgtgtcgtggcatgatattgttgctaacatattggtggttggtattccattcgcagacaagtatgcctccagctttggcacgggcattcagtactcgtactaccatgaggaggacgagacaaccttccacctggtggacacggcccgcgtccagaagccgccgcaccagcgcggccggttccgcaacatgaggaattcgcgttccggtcgtggcaggaatgcccgcggtggccttaatactcacggcatgacgacgctcagcggcaagaatgtaaaggcccgcgatccgcgccatggtcgcggcatgggcaagaagttcggtcatcgcggaccaccaccaaagatgcgcgaatcttcggtggccgtccgcgccgattgggcatccatcgaggagatggacttcccgcgactcatcaagctgtcgctgcccaacatcaaggagggcgtcgatattgtcacctgcggcacgttggagtactacgacaagacctacgaccgcatcaatgtgaagaacgagaagccgctgcagaagatcgatcgcatcgtgcatacggtgaccaccacagacgatcccgtcatccggcgtttgtctaagaccgtcggcaatgtcttcgccacggacgccatcctggccaccatcatgtgctctacgcgatcgaactattcctgggatattgtcatcgagaaagttggtatgttaaatgaaatacgaaatataataataataagagaaataaataataattgtaaccttattttaggcgacaaggtgttcatggacaagcgtgaccacaccgagttcgatctgttgaccgtgaacgagagcagcgtggaaccaccgaccgacgacgacagctcatgcaactcccctcgcaacctggccatcgaggcgactttcattaaccacaactttagccagcaggtgcttaagactggagaccaggaacccaaatacaagttcgaggaaagcaaccctttcatcagcgaggacgaagatatccaagtcgccagcgtgggctaccgctacaagaagtgggagctgggaagcgatattgtaagtgttgcataatccaactttaaagttggaatatttttctatattatgttaaactattgtcttatacttttaggtcctggtagcgcgttgcgagcacgatggtgtcctgcagacgccaagcggcgagccgcagttcatgactatcaaggcactcaacgagtgggactcgaagttggccaatggcgtggaatggcgtcaaaagttggacacgcagcgcggtgctgtgctcgccaacgagctgaggaacaacgcatgcaagctggccaagtggactgtgcaggccgtcctggccgggtccgatcagctaaagctcggctatgtgtcgcgtatcaatccgagagatcactcgcgtcacgtcatcctcggcacgcagcagttcaagccgcatgaatttgccactcagatcaacctgagcatggacaacgcctggggaatcctgagatgcatcatcgatctggtgatgaagcagaaggatggcaaatacctgatcatgaaggaccccaacaagccgatcatccgtctgtacgacatcccagacaatactttcgactccgatgactcggacgatggcgagggcgatgacgaaggtttccagcaggtctacaactacgcgcacaacaagatttagacgccacgcccccctactcctgcatcccttccagtcttgggctcttttgccacaacccgctaagaataaccacaactgatgtcctctaaaggaaaaggtcatgttataggccctagcttaagcatttgtattcgatttaaattcagatatttcctagtaaatcacagagggcgaaacaatacatgaatttttattggtccaggtctaatgccgggtacttgtgataaaaactttcgactgaaacaccgaggtcttgtacgtaaatgactgactcatttcccggactcatatatagtaagctgattgtgcgtgtcgggcatctagttaagatttagacattgtttaaactctgacggttaaagatggtcttcctacaaagagtgtacatatccttcctggtcctgcatactcaattgctgatgtacctggctgagtctggtaatatatgttgcaagtactccacattgtatacgttataacattcaagaaaatgattcatttggatatgggtatttccttgaattttaaaatataaatagctttgtttcgtccaatcattatctaaacatccaattaaaatgactcacataatataatatttattaatatccaattctttactgtatcagaatatccgccttgtaatctggatgagaaatgcattagtctagcccgctgcacatcactcttgccctttctgaagccccacaacatgacgccagccgagaaggcggtattcgaggacagatattgcggctatggccccaaggggcaggaattattggacagagttctcatctgctgcccaaatatgggacacattttgccaaatacccagatatgtggaccaatcatgccggcttatcgaattttcggaggagaggagacgcaacccaacgagttgccttggatggccctgattctatatgcgcatcgcagccgttcggtgtggaatgaaagactcgtgtccaggtgcgctggatccctgatcacaaaccgctatgtgctgaccgcagcccattgtctgaggataacgggattggatctcaggagggtgcgccttggcgagcataacattttaagcaatcccgactgcgtcacccatattaatggtagggaacactgcgctcca

SEQ ID NO: 21512 - DNA, 1945 bp, DROSOPHILA
cggtcccactcaactattttcgcaacacgcgacgatacgaattttccacatttctttgttgatttctggaaaatcgctgtatatagaccgaatagccgactgcagactgagcaccaggtaaacgcgcgagatgagcgagaccataaacaccgcggctcagttcccgagcttcgagaagccgaccgtgcagttcaatgaaaagggctggggtccctgcgagctgcccgatacgttcaaggatgtgccgtaccagccgttcagcaagaacgatcgtctgggcaagatctgcgactggacgaatacgtcgaacaacgacaagaagtaccagaacaagtatgcctccagctttggcacgggcattcagtactcgtactaccatgaggaggacgagacaaccttccacctggtggacacggcccgcgtccagaagccgccgcaccagcgcggccggttccgcaacatgaggaattcgcgttccggtcgtggcaggaatgcccgcggtggccttaatactcacggcatgacgacgctcagcggcaagaatgtaaaggcccgcgatccgcgccatggtcgcggcatgggcaagaagttcggtcatcgcggaccaccaccaaagatgcgcgaatcttcggtggccgtccgcgccgattgggcatccatcgaggagatggacttcccgcgactcatcaagctgtcgctgcccaacatcaaggagggcgtcgatattgtcacctgcggcacgttggagtactacgacaagacctacgaccgcatcaatgtgaagaacgagaagccgctgcagaagatcgatcgcatcgtgcatacggtgaccaccacagacgatcccgtcatccggcgtttgtctaagaccgtcggcaatgtcttcgccacggacgccatcctggccaccatcatgtgctctacgcgatcgaactattcctgggatattgtcatcgagaaagttggcgacaaggtgttcatggacaagcgtgaccacaccgagttcgatctgttgaccgtgaacgagagcagcgtggaaccaccgaccgacgacgacagctcatgcaactcccctcgcaacctggccatcgaggcgactttcattaaccacaactttagccagcaggtgcttaagactggagaccaggaacccaaatacaagttcgaggaaagcaaccctttcatcagcgaggacgaagatatccaagtcgccagcgtgggctaccgctacaagaagtgggagctgggaagcgatattgtcctggtagcgcgttgcgagcacgatggtgtcctgcagacgccaagcggcgagccgcagttcatgactatcaaggcactcaacgagtgggactcgaagttggccaatggcgtggaatggcgtcaaaagttggacacgcagcgcggtgctgtgctcgccaacgagctgaggaacaacgcatgcaagctggccaagtggactgtgcaggccgtcctggccgggtccgatcagctaaagctcggctatgtgtcgcgtatcaatccgagagatcactcgcgtcacgtcatcctcggcacgcagcagttcaagccgcatgaatttgccactcagatcaacctgagcatggacaacgcctggggaatcctgagatgcatcatcgatctggtgatgaagcagaaggatggcaaatacctgatcatgaaggaccccaacaagccgatcatccgtctgtacgacatcccagacaatactttcgactccgatgactcggacgatggcgagggcgatgacgaaggtttccagcaggtctacaactacgcgcacaacaagatttagacgccacgcccccctactcctgcatcccttccagtcttgggctcttttgccacaacccgctaagaataaccacaactgatgtcctctaaaggaaaaggtcatgttataggccctagcttaagcatttgtatt

SEQ ID NO: 21513 - protein, 560 aa, DROSOPHILA
MSETINTAAQFPSFEKPTVQFNEKGWGPCELPDTFKDVPYQPFSKNDRLGKICDWTNTSNNDKKYQNKYASSFGTGIQYSYYHEEDETTFHLVDTARVQKPPHQRGRFRNMRNSRSGRGRNARGGLNTHGMTTLSGKNVKARDPRHGRGMGKKFGHRGPPPKMRESSVAVRADWASIEEMDFPRLIKLSLPNIKEGVDIVTCGTLEYYDKTYDRINVKNEKPLQKIDRIVHTVTTTDDPVIRRLSKTVGNVFATDAILATIMCSTRSNYSWDIVIEKVGDKVFMDKRDHTEFDLLTVNESSVEPPTDDDSSCNSPRNLAIEATFINHNFSQQVLKTGDQEPKYKFEESNPFISEDEDIQVASVGYRYKKWELGSDIVLVARCEHDGVLQTPSGEPQFMTIKALNEWDSKLANGVEWRQKLDTQRGAVLANELRNNACKLAKWTVQAVLAGSDQLKLGYVSRINPRDHSRHVILGTQQFKPHEFATQINLSMDNAWGILRCIIDLVMKQKDGKYLIMKDPNKPIIRLYDIPDNTFDSDDSDDGEGDDEGFQQVYNYAHNKI

SEQ ID NO: 21514 - DNA, 5186 bp, DROSOPHILA
cacaccctcatccacaggagcatcgcctagacaggatattatttgtaagatcatcatggtgattaggactttttgttctaaacttacagaatgctcgccaaccgcgattcagttgctcgctgagtagcttgacattatgtttttggacactatctatatttaatggatttgttgccttatccttatcctccactgccaaagattgacagatcaggcagactgcgatgatcatctgggctgtgctcttctgcatggtgaattgtgctctcatgtctgaattcgaaaaccggggctcttttatagccaggccttatcgggccaaaagactcgcgaaccgagactctcttatctggtagctggttttcgatttcggtttattttataagcttgttgcagcacgtttgttggaggggctactgtctggtcgttgtctgcggttccgcgccaaaatcttcagcctcaaaaagccgcagataaggcggcaaatcttgctagactttgctgattgattatcatccccaatccgatcgtgcctcaatatgaaaatacttaccaaagtttcccttgcaacacttcattcacttcttttttccgtcaatagataaggcttatgatatctagttttttgatgggtgctcgaaaccaactaggtgctaaatctttattcattaagttgtatattttgactatatgggctttgcttagtttgcttttttttcgagtatagttagtagggctgtaaatttgactagagctcctcgtcttgactgacaagcgcgattcacaattcaaaatttacgctaatgaggtagcggcggttgttgtctgactctgattcttttcccaacggaagttctctagagtggccttaaaattagattccttaggtgctaaagttgtgtatgagcatcgctaatccaggccaaaaaaaatcataaataaatatgcaaagaatccagagaagaagacgagatgaaacaaataacaagagcatggcaggttaaacttaaaatttaaacagtttattcgtgtgggcacacaagaactaattcataaaaataataaataaattgagaggtggactaaaaataaacattggtagtcagaaatacttgatgctacgatccgtggcatcttttcactggcttctgctcccctgctgctccaaattggactaaaattagcattccgctctgttttgtgtgttgttttctttttgggtgttgcgaatggatctgttagttgaatgctttgatttagaacttcagaccagcctggacatcggacatgatgttggcggacttctgcagttgttcaacttcggtgggagtcaggatctgcttgaccacggatgtcacaccgttggcattgagaacgcagggcagcgagaggaacacatccttgtcaatgccatgttcgccctgtgagataaaatataatatattagaacatctttacaatcatataaaagttttataaaagtaatcttaccaaaacggaggtggagacggcggccacgctgctcgtgttgcgcaagatggccgaggccagggaggcggtgctcaggccaatggcccaggaggtgtatccctttagcttgatcacctcgtaggcggagtccaccacctgcttgtgcagctcgttccacttctctggatcctcgccggtgcccagaatggggttcagctcgcgcaaacgcacgccggcaatgttcactccagaccaaacgggcacggagctgtcgccgtgctcaccgatgatccagccgtggcaggaggtgggtgccacgcccaggcgctgcgacatcaggaagcggaagcgggacgagtccaagttggtgccgctgccgatcacgcggttcttgggcagaccggacagcttccaggccacgtaggtcatgatgtccacgggattggacaccataagcaaaatggtatcgggactgtactgtaagtgaaatcaagttattgctccaaatctctatattagtttcttgattgtcgacatgaacctacctctaccagcttggggatgatgttcttgaggatgtcggtgttgcgctgcacgagggacaggcgggactcgccctccttttggcgcactccggcggtcacgatgcacagacgggagttggccgaggcggcaaagtcggtgctggccgtgatctgggggttcttcagaaagttggagccgtgctgcagatccatcagctcgccctgcagcttgtccgcgcagacatcgatgaggcacacctccttggagacgttctgagccaggatgctgaaggcgctggccatgcccacctggccgatgcccacaatggtgaccttgtgcccggagctgggcaggacctcagcaacctgggccaacagactgtccttaatggcggccattgctagggggtaacaaaaaaaaaaaaaaaagaaatataactttaatattccgccaaagaaagcaaagcgcattgcccctgggagattacccattttgattgctatcacgtgcctatgatttagttaaaacattcacattttttttgggaaaactcttttccccacaaacagacacacacatactgcttagttggcgttctttaaccttcacgaaggtcgtattaatgagaaaaaagcgacatcgccacaacacgcaaccggaccgaaccgaaaacattgccgaaaaaattaacttgtgattttttttgctcttttatatagcaattcatagagccacatgacactgccagtcaattagggtcttcttcattcacacagataaaatctaattaggcccaaatggaagttttatcaatgaaaatgtgtgctaccttatggaattaatcccccgattcagatctaatcgttttatttctgatttggcaaacagtcatagtgacttcctcgaaagttggcagttttttatcttatcacaagagtttcaaacaattatagcaatttgattaatccaattatggcatacctatgatgattaataaataaataatacaatgacgtaggactaagcttatcgcaaataggaagagttttggggggccaaagttgagtttgttgccaatgtttgcaatactatttcagattagattgctaaagattataagtgcatattggaactattatcagtgggaaaatatttatataaacatatggcacgttttttaattagaatctgcttcaggttgagtgttttcctagcttgaattacgactgcagttatgagttctgaagaatttgggtggggtacaaaaacccaagagttctgatgagttccgcaagtgtgaggtacgaaaagtcagggaaatgtcacaaatatataaaaaactagataatgatttatggctgagtgatcacggtttatttttattggggacgagtatctagtattagtaagtataagtattagtgccagataaaagggggctaattgctttttctcttttttaagaatctagatatattattgacaaacacggattatttaaaactttgtagatacaacaaaaaatacaaaactataacttttctcttaataaacaaaaattcgtcattaattacaaaatatcatattggcataaaaattcgagttttttatataaaaattcatatcttcgccacacttgttgcaagctgtgaaaatgtgcgtcaaaattgggcctacgcatgaccttctctcaaagtcaaatgcggttgttccactttacttgggcggtgcgacgtccccccgtcggaaaatggggaagtcagctgtttgcgacatggcgcatgctcccgttgaaaacgaaagtgaaagtcaattgtacgcccaattgccaccccacaccctcttcgcgggaaaccccggaaatccggcccaccccactaacgtctcaggtgcggaaggccaagggcgacggggttcggttttcggaaccgaccgatgcacttgacccttgaaagttgaatgcaccctgatgaggcaggaagttgacacccagtttgtactactaattttcaggtatcctgcacaatcacaaatactgttttttttccaagtgcatgctagtatatatacttacttttgtattggttttgttttaattctctttttttttcactggattattttgggcgcctctaaactttgaggtcgtcgacgttccgttcactttgcgcgttcgttgcgaactgtttgcacttcaagcggactgctttggaatttagctgctgccgctggattttgtagcctccgcagccgcttttctctcactacctctctcgctctttccttcgcagctagtacacttagaaaaatgatatcacgaaattgtgatattcaaatggactaaagttgaatgtgtagctgttgaatttttagtaaaatcatattaatttaaaaatagtgtagttttatatccaacttaaaacaaatttaaacaaatataaaatgacatacactttatgattgttcgacttgaaatattatttctgtataaatggtagagttagttaagctgatcatttttttcagtgtggccagctgttttggacctctctgccagctgcgccaggatgaatgacgaaacggcctctgcggcgttgtgaaagtgagcggccatttctctcgctcgctctttcgccgcctgtgtttgttggtgttgcgctctccagagttttttggctccattcggccaagttagtcaaggtgacctttgctggttttccgtatatattcctctatttataggcggcacgttttcgactaattttccgggatttcgttagtggagttgttggataattcttcatttacaattcccctgcggcataaattacatttagatcttacatgctgaattcgttccatttgtccgagtaggtggttgtttatttgagcctcgtgacagcagctggggatctttggactaacacgtgcccaagatcacatacacataggggaccagtttatttgaacggatgtgtatgcagccaattttggccaactgcccagtcaggcggctgctgcagttaatttggccaacagatggtgcagtggattatgtgtgattaggaaataccctgtactaagcagcttgtgttatatgattaagctaatatgcatatccctttaatcttaaaaaggaccagctttaagaacactgtctgtttaattggttgcctttaaaaacatatact

SEQ ID NO: 21515 - DNA, 1372 bp, DROSOPHILA
gcaaacagttcgcaacgaacgcgcaaagtgaacggaacgtcgacgacctcaaagtttagaggcgcccaaaataatccagtgaaaaaaaaagagaattaaaacaaaaccaatacaaaaatggccgccattaaggacagtctgttggcccaggttgctgaggtcctgcccagctccgggcacaaggtcaccattgtgggcatcggccaggtgggcatggccagcgccttcagcatcctggctcagaacgtctccaaggaggtgtgcctcatcgatgtctgcgcggacaagctgcagggcgagctgatggatctgcagcacggctccaactttctgaagaacccccagatcacggccagcaccgactttgccgcctcggccaactcccgtctgtgcatcgtgaccgccggagtgcgccaaaaggagggcgagtcccgcctgtccctcgtgcagcgcaacaccgacatcctcaagaacatcatccccaagctggtagagtacagtcccgataccattttgcttatggtgtccaatcccgtggacatcatgacctacgtggcctggaagctgtccggtctgcccaagaaccgcgtgatcggcagcggcaccaacttggactcgtcccgcttccgcttcctgatgtcgcagcgcctgggcgtggcacccacctcctgccacggctggatcatcggtgagcacggcgacagctccgtgcccgtttggtctggagtgaacattgccggcgtgcgtttgcgcgagctgaaccccattctgggcaccggcgaggatccagagaagtggaacgagctgcacaagcaggtggtggactccgcctacgaggtgatcaagctaaagggatacacctcctgggccattggcctgagcaccgcctccctggcctcggccatcttgcgcaacacgagcagcgtggccgccgtctccacctccgttttgggcgaacatggcattgacaaggatgtgttcctctcgctgccctgcgttctcaatgccaacggtgtgacatccgtggtcaagcagatcctgactcccaccgaagttgaacaactgcagaagtccgccaacatcatgtccgatgtccaggctggtctgaagttctaaatcaaagcattcaactaacagatccattcgcaacacccaaaaagaaaacaacacacaaaacagagcggaatgctaattttagtccaatttggagcagcaggggagcagaagccagtgaaaagatgccacggatcgtagcatcaagtatttctgactaccaatgtttatttttagtccacctctcaatttatttattatttttatgaattagttcttgtgtgcccacacgaataaactgtttaaattttaagtttaa

SEQ ID NO: 21516 - protein, 332 aa, DROSOPHILA
MAAIKDSLLAQVAEVLPSSGHKVTIVGIGQVGMASAFSILAQNVSKEVCLIDVCADKLQGELMDLQHGSNFLKNPQITASTDFAASANSRLCIVTAGVRQKEGESRLSLVQRNTDILKNIIPKLVEYSPDTILLMVSNPVDIMTYVAWKLSGLPKNRVIGSGTNLDSSRFRFLMSQRLGVAPTSCHGWIIGEHGDSSVPVWSGVNIAGVRLRELNPILGTGEDPEKWNELHKQVVDSAYEVIKLKGYTSWAIGLSTASLASAILRNTSSVAAVSTSVLGEHGIDKDVFLSLPCVLNANGVTSVVKQILTPTEVEQLQKSANIMSDVQAGLKF

SEQ ID NO: 21517 - DNA, 8661 bp, DROSOPHILA
gccgctgatgaacaagatccttggatggagggatacggtgagttcttattactagctattgcttggcaacgattatagtcttgtttattcaaatttaaaaggaattcagagattaccaagtagaaattaagttaatttttctatttccatttacgccaatcaaaaatccatttaacaactcaaatggtttcattcatagacaatcattttcattggcacctgggcccattcgatagcccgcttgttcttctatttcgccaccaatacggacttgctctacgccggagccgttgtctgcagcttgggcccaattgtgggtcccatgatccgggccatgacctcgaaaatagtgcccacatcagagcgcggaaaggtatttgcactgctatcagtttgcgataatgcggtgcccttcatcagcggtgtgtgctattcgcaactttataggcgcactcagaatacgaatcacggaggaaatgtcttcatcctaaccattgccacccaaatcgctgtctttgtgatgatactgtaagtgatgtcgcaatgtgactcttatttattttataaatgattttattggttgtattactattagttgcttacacattgttttgggcaaaaattcactggctgttccggaagttcctgagaaggagagcggacttatttcccaaacggaagctgtcctggaggcggaaattgaggagcacaagaactagcctgtgcaataactttaacgattcctaataaaaagacttgaacccagagcagatattgaatgcattgcattgaatattttgccaatgtaaatcattcccatcaacacattttgaataaaatgctaaacttttatatatttggacttatcatgaaatgtgctgattttacttcaatggatttttgttgaaatagaataggggtgcagcatttgtggtaagatctccttaaatagaaaaaaaggttttgaatatacaacttacccgagcggtcaagtgccaaatcacttgttcttggacagggtgcgctgcttctccgcatgctccaccacctgctcgtccacgaagaggcccttccttcgccggacactgtccatgtagaccttggctcggttggcggagtccgccttctcgccgaagtgcatcagctcctcctcggttgtcggcagccagaagggatcgatatcaatcacctgtaagcagacgcagggtgtaaattccgggaaatcatttaggcacttgagacgggacaatagaacgaggcgtcgctgtgtctatgcgcctgcgcctcgcactggattggatttgggttggttcggtttatggatacgagtatatgagctggttcggggtttattccttcaatctatgtctttttgggtctttgagcaggactctttgtctaagcagcagggaaagcgtgcattttcacatcttcattgtttggactcgagaggctgcgacaaaggactcgacgcttaatgactttcaaaggacgcagggacacgcattgcacgttacgtgataaggcaggctcgccaggatacgcagaaccggcgtaccgtagaacggggcatttcctcaatggcgtgaagagcgttccctgcgcttgattgatgattgcctcctgcgaggcgaaccacttgagaatctctggtgtgagatctgcattgttttgtttttcttcctccttttttttttattttttgcctccttccagcaaggactcgagacccagcgggcgggtgtcgagcggttcgctggaaaaactcagcactctcccactccagaatttcggttctacactttatgaattccctcatcaatgactgagcttgctcgagaactgattaagatgctgaggcggcttgaggttggtcttttgtcaggaagagacttttctttccacagcaagaaaatatagagccgaatagcaaagtaaatgaaaaacacactggtcacaacaaaagcaaataagttagctagcaccattgtatttattttatacccatataataatatatctttagagccaatttgctaatgcttttctcacagtgcgtgttctgggccatctgttcgcactacgctaaactgcgggccctcgaacatcttcgcaatcccatgtagatcattatcgggcacaaagtttcgcttgtttaacaacagccaacaacgccaagtgggcaagggatcgcagcgagcggaacaatggggccactatagggagccaagcagtagtcctcgacaaggtaaggcaatcccagttcgcagtttgcaatccctgtcacaacaaaacagcaacgcaaaagcgagactgcctgccatcctttgcaaatggctctgcgcatgcgcagcagcctccaatctttccatcgctccccatcaccatcaccatccctacccatgcccaaactcaagcccatcctcatcctcattcccattcccattcccattcccaacattcccactccaaaatctcgggcagcattcggaggagaccctgtggcagctgaagtgctccagaagtgcgcagaacttgcgtctgagccgggccagacaaatgagcagccagccagcagcaggcagaggagtgcactgctccaaatcagggcagtcttataagggattcgcagttattgactaacattagaaatgtgaataaaattatgacgtatttttatcaaactattggcttgtaccaataatttagttagatgttgaactgaaattatccttttgttgcacatatttaacaataaccgtagaatgggaaatctgtaagaatttttaatttttacttttcgccagtaaaccatttggggaaggtggttatccccactaatgcaacaccacgctgcagattgctgcaaatcccccctaatcacccacttctgatctccaccttcgtagcgagcatacttccatcttgagtttgaaatattatgaaaaatattgcagcaaccgcgaaaaccaaaacaaaaatccaaaaaaaccaaagccaaaaccaaacgacgtgacatcaacacacacacacacacacgcacacacacacacttggtgtagtaccatattatatggtaaggtaacgtatatctctcagtatcttcagctctctttgcacacacgtgttcttatgagcggtgtgcttaggtgtatgagtgaatgtgtttacctgtcccgaccgcgcgcggtttgtatgcaggtaatttacgcggcagctaccgaaatacgctgaccgtccatcggtccgcttgtccatttgtccgtccgcgaccaaaaccaagttgagattattatcgcgcgccagaaactggctgaaagactgtgaaagagaccgggcccacagaatataactcgattcgagtcgagttgattcgaaagacttggggtccccgctttggtaaaagtccagcgaatggacaacggacggcggacttcgatgagcgtcattttgacagccagcgagcggacaatgcaaaccacgttccactttagaagagagcaacaacaatcctttggccacttggataaacacttgccctggcatggatatatatccctacagtacgaaaaaaataacgaaaatgatttcataaagcaattttaaagccagtttttgtacgattttaataaaaaaaatataaggagttgaatttatattctgatttcgatctttggtttttttttaattgacactttttaattagacgatagcttattacaattaattgagcttataaattcataactgttacattttgttggccagtgtatttgtatgtgtgtgcttattcgcaccaggcagactttagggcactgccatgctctcccccgcctccgtgcgaactccctacgacccccgcctccaacttcagccccaaactccccacccctggccctgccccgcctcctacctcttcttcccccccctgcctgccacactgtctccactgcagactttccctttgacggggggagggggcagactgtggcaggtatacaaaacgagttatcagattatttgttatttgtcttggttctttgctcacagtttgttgtggccgtggctgttatgcttttcaagtagtttcagagctccacaactgaggtcttgcatgcaaagcgcgacaaccagcaggaacaacaacaacaacaaccacaacaataaaagcaacaaccagaaccaaatcatatgcaacactccgcggcagaggaaaacccgatgcagagcggcctgaaagtaagaccagtagccaaagttgttatgttattttattattatttttcctttttttcttatttcggtaggctgcaggtcttgaccctctttctgccccgtctccggcacacacacacacacgtaatcataataacaatctttgggttcatcaagtggccagaagagatgagaagtgatgcagccagcgggaggagttggggcaaaacaaaaggaagcacgaaattaaataataacaaaagcgcgcaagacagtagccacccgacgaggagatatttctcgcttaaacagtgcgacacattgctgtaaggcagatagatagatagttcaatagatagttcaaataaaacattttttttgaactagctgtttaaaatgaaataaaatcaaagcaatattaagcaatgaaaccgcagtttagaaaatgttataattctaagatattttaaattaaaaatatttttaaaaatatcactgttattaaacataaatcactaagtaataataaaacctattaaatgtagccactgtgtcgagcttctttggattttgttgtgaatattaaatgaaaatattgtagcttctaagcgtaacatatttttattaagctctgcttaccaaaaacattcaaatgaaacgcactgttggcttgaaacttcagctcctgactgttgtcttaatgctgctacgtgaagtgaaagagcaacggcaataacagaaaaaaaaattatgatatatgaaaactgaaaattagttttcgttgcttcggtttctgtttcaggtggctcgcagcctgcagcttccagattccggattccacgttaaaaggtcatctcgagagatgatttcttgcgtctgcagatctgctgatccgacgatgcacatgcttaacgaacttattgtgggccatgatgcggcaagaaatggaaatggctttttgggaacacgacgactctcccccgcccacttctggacccttttttttttaccccatttggccccaaccagaagttggccactccagtgaagttgacgccttcgttgttattatgggcacgtgacaactgcgcccacggcatagagcccggcccactcacctggcaggtagggttaaccacaacaacaacaaaaaatactttaaaaaagggagggtttgggtgcagggaccgcggcgtgccactgtccaagagatgtgggcgtgaacaaagcgctgaaagcgaccgttttaattgctcggacgaaaggtaagcctaattgttttcacttcgagcagaataatgccatcgaataaaatatctataagatactttttcacttcaacacagttaagagttgcacttcttttgaaaaaagtgcagtatgcaatatatatagattcaattaaaaaaaggttataattatagaagtattgaaaaaatcagtatgtattttttctgtgcaatccaagcttcccctcccattgtcacgccccttttccacttttcctgctgtctgccgttggaaatgcgtaagaaattatacgaagcaacggcaaacaacatctccgtcgccggcaaaacttgaaaacttgagctgagaaatagaaaatcgccggaagtcattatacaaaaacttgttgttatcgattggttgggcgatgtgaccaacaccagcacaaacacactgatagaaaaaccaatactaatacgaagtgcacgcactttgaaaatatgtgtggttcaggcggcaaaacatgttgcattattaatatgaaacaaagttatgagttcatagatatttcttaagaatatttcaatgctacaaattaactaggttcgatgaaaagtgaataaatatggggggtttgtgtgaaaaaaacttattcaaaacttattcgaaactcctgtgggctgaacaacattttgactaagcttggcccatccgctgatcttggcaaaagcgcaagacagaagggaataaccatcaagttaagtgttaattgtggcccacgacaaggtcagaatgcgatggagaaagggggagactggagaagagagaggggtttgggtttggggctttgggttacctcgaatggcacacagctgcagcttcaaatggaccatatatctttcagtccaactgttgctgttgccatgttgctgctgctgatgttgctgctgctgctgttgccatgtcgctactgctgctgactgtggtttagcttataagacttcagcagaaggtaacagaaggcttaaagcagcgtaagctgagatttttattgaccacagacaggcagcgaaagtttcgggaaaagggagccgggtcgagaggttgggatgggggtcaggaatagggggagttcggggtgggcacgcacatggcatatggtcgaacacaatcgctgcacttgtgccccatcagtgccttagagcagcaacagctggcagttacagtcaggattccataacagaaacagaattctaagatctaacgttagtttacaacaagcaacaacatcattgaccaaatgattatctgttgattaactgttggaatgtaaatatttgactccttttttatgatatctgatgactttatgttaatatttaaatgttttccaactgactaactgtgcttagcaaatgtaactaggttcaaaactatccgagttacgcatcaaagtgtaattttttaattactcattaacagatggagtcatgttgcccgatttaagtacaatcatctaaataccatttgaagtactgcctctataagtatacatcactaaaaaggcccaaaacattagcttaaagggaataatcgatagcgtccaggctctactgtacagtatgtactcacctcccagtggctgaacatgagctgtggacaggccaggccagatgtctgctttcgcatctcctgggcgaaattgaacgactcgatcaccggcagcagacaggtgaccgcgaagttgccgctgccctgggtcaaatcgccggagaggattttgccgtgccgccggccaattaccgcgtacattttacctgcgaatgatagaaaaaagagatacgttctttgatcagctgttggtcgttagctagaaatcgaattggaaaaggttaaatggaacagggaaaagggaaaccacctccaactaacaatggccgcctttcagttggagttgtcggttctgcttaatgctcctatatcgccagctctttcttgtgttcttgtattgttgttgttttggctattgttgttgtttctggcgcgtctcaaggtaactcgtaaacaaatgaaatcttatcgggtttggcccataaaattggcgggctttctgccgaacctcgcgcgtttttcgcttgaacttccaagctgaagatggagatgaagatcgtttccaggtctctctcgtactctccatatacactatcttggggcattcatattttttttagaagaatattgaaaggaataatcacaaaggaacaacccaaacaaaaaaaaaaagactaacgaaacagacttttttgaaaacctcacaaattgacaatcaagttatcaaaggcacgccaaaaatacgaaactttttttttaacattgttacattacttttacattataaatgtattgtagtataaaaattggtgttaaataaacattacattttcttgcaactctcaagcatgtattactataaaagtttattgatagacccaaatccatttaaactttatgatctgtaattaccaaggtaattagcggtttattagccgattttataagccagttcgccactaaagctttgtttcgaagggcatttaaagcatcgactttaagctcgatcttccttttgtgttaaactcttttctggattcttctccagttgttctttttttggcatgcgctacaagaataaggcccaaacatgaaaccatggcaaaaggagaaggttgaacgatgaaggccaggaggaggcggcggcccaagtccaggtcgttgtggctaaggcaggaattagtttccggtgccgtagtaaaaatgacaaaaacaacacggcggcagcaaaaacggccgaaaggatgcaacggaagcggcaagagccgcttggctgcgaagtccccttttaattttttgttattttgttgtattttatttcgttgttgcttttgcttttgctttaagccaagcacgcgagccagagacaccttgccatccgctcgctctcaccaatacagccgcgcttagtcacagatgcatctcacagatgcgcgcacgcacacaggcgcagcagcaatggatgctgcaaccaccagcggaaaaaggcagcaacaacatgttcattcattcatatccagcccactctctttcgtgttctctcacgttcggacgctgccgctcatgcactgggaacaaattcggttgaccaaatatgtgaaaaga

SEQ ID NO: 21518 - DNA, 471 bp, DROSOPHILA
atgccccaagatagtgtatatggagagtacgagagagacctggaaacgatcttcatctccatcttcagcttggaagttcaagcgaaaaacgcgcgaggtaaaatgtacgcggtaattggccggcggcacggcaaaatcctctccggcgatttgacccagggcagcggcaacttcgcggtcacctgtctgctgccggtgatcgagtcgttcaatttcgcccaggagatgcgaaagcagacatctggcctggcctgtccacagctcatgttcagccactgggaggtgattgatatcgatcccttctggctgccgacaaccgaggaggagctgatgcacttcggcgagaaggcggactccgccaaccgagccaaggtctacatggacagtgtccggcgaaggaagggcctcttcgtggacgagcaggtggtggagcatgcggagaagcagcgcaccctgtccaagaacaagtga

SEQ ID NO: 21519 - protein, 122 aa, DROSOPHILA
MYAVIGRRHGKILSGDLTQGSGNFAVTCLLPVIESFNFAQEMRKQTSGLACPQLMFSHWEVIDIDPFWLPTTEEELMHFGEKADSANRAKVYMDSVRRRKGLFVDEQVVEHAEKQRTLSKNK

SEQ ID NO: 21520 - DNA, 3255 bp, DROSOPHILA
gctcggcccagttcagcttagtttaattttgctccacgtaccgacagcgcgacgacgggtttaccgctggactcttgaggctcctcgagctgcaactgcgattgcgatgccgaccgccgagcaacctgaccgctcgacaaactcaaccaaactgcgctccagagttggccgcgagcggctcttaactcacttttttccagcccgcacgaaaaaagtttagttggcaacaggtagacgcttcgaaatgagcggatcacacaaaataatggttatgattgtagtggtagagtcagaggtgtaggtggggtcttaactcttaagatattatatttaaaactgtagagataacaacgatttcagctcaaaataaaatattttatttattatttttcatttaaagaaaaagcttagggatcagtaatttctagggctttgcttattttatttctaaaaattatatcgagattagagatgaagtccagtttattactttaaattcccccttttaatttacgcccatgaaacttctagagatctatatactctctttttggtactctcttctcagagagtcggctttaaagagtgcaatcagctgtttttgatttggcttaaagccaaagatcaggggagccgaatggagttattgaagcacagtgagctagatgctttaaagagaatttttagagtatttgggatgtagagaatactcttatttaaatgtacttgctaagccattcttatcataaatttaaaatgttaaatttaccataaaatttgaaatttaatgattattaaaatgaatttaacgctacaagtctgttaagtgatctatatttatctgtctggtaacgcttcccatgaataaattgaatgcttaagcatacttttgggcccactaagaaaaccaaaagatacaattatcttacaagaacatactttaataaataaataaattacctattgaactaaaaaacatttacaattctaatagctaaaactaaaactttatacggttcttttcagaggatttctcaggacgtctcgccttgtagcgcagtccatgttccatataggtgaatggaggattcggttgcgtcatgcagaagtacagacccttggcattcgctgggtagatgagtccaatgttgatggtgttctggaaattacaatcgccctgtcggaacttggcccaactctcgcacttggtagctgggatcatcacaccctcgatgagagcctatgaatttatacagaaattaaattgaaatgcttcagttaccttcgaaattctcacctccatgaacagaataaatggatacatgtgactgcagatcttggactcgcagccaggttgcagtttcctcctcgggaagtatccaataccattgggatagatatcgatgtgacccagtggcaccctcaccccaaaaacatctccctccccgtgcagcaccaccactcttaaagccacactttgttttaccaaaatatcggtggtgcgacacatggtggctgggtctatggccaacagttggcccaccaattgtttgttttctttggcaaaaagttgggcacccagtgcggctatgttagcacccactgagtgtcctgccaaagtgatatcctgcacggcaatgcccgcatccttcagagctctcagcagcttataaacgaagtagccattaacggagagatgatgacgcactgcatagtacaattgagccacatcctttgcgaaatccaccacaattacattgagatccctcctgctgttttgcagcagagtcaagtgctcctgcacactaaaatagctatcggccgtgtggaaggcattcacatagatgagggtcttacgctccggattgatatcgaaatccttgatctgagatatggatttaatgggcagctctacactctggttggtgatggtcatcacatggagtcgggcatcgctgggattaatgccctgaaataaggacatcacaccctcatccacaggagcatcgcctagacaggatattatttgtaagatcatcatggtgattaggactttttgttctaaacttacagaatgctcgccaaccgcgattcagttgctcgctgagtagcttgacattatgtttttggacactatctatatttaatggatttgttgccttatccttatcctccactgccaaagattgacagatcaggcagactgcgatgatcatctgggctgtgctcttctgcatggtgaattgtgctctcatgtctgaattcgaaaaccggggctcttttatagccaggccttatcgggccaaaagactcgcgaaccgagactctcttatctggtagctggttttcgatttcggtttattttataagcttgttgcagcacgtttgttggaggggctactgtctggtcgttgtctgcggttccgcgccaaaatcttcagcctcaaaaagccgcagataaggcggcaaatcttgctagactttgctgattgattatcatccccaatccgatcgtgcctcaatatgaaaatacttaccaaagtttcccttgcaacacttcattcacttcttttttccgtcaatagataaggcttatgatatctagttttttgatgggtgctcgaaaccaactaggtgctaaatctttattcattaagttgtatattttgactatatgggctttgcttagtttgcttttttttcgagtatagttagtagggctgtaaatttgactagagctcctcgtcttgactgacaagcgcgattcacaattcaaaatttacgctaatgaggtagcggcggttgttgtctgactctgattcttttcccaacggaagttctctagagtggccttaaaattagattccttaggtgctaaagttgtgtatgagcatcgctaatccaggccaaaaaaaatcataaataaatatgcaaagaatccagagaagaagacgagatgaaacaaataacaagagcatggcaggttaaacttaaaatttaaacagtttattcgtgtgggcacacaagaactaattcataaaaataataaataaattgagaggtggactaaaaataaacattggtagtcagaaatacttgatgctacgatccgtggcatcttttcactggcttctgctcccctgctgctccaaattggactaaaattagcattccgctctgttttgtgtgttgttttctttttgggtgttgcgaatggatctgttagttgaatgctttgatttagaacttcagacc

SEQ ID NO: 21521 - DNA, 1137 bp, DROSOPHILA
atgagagcacaattcaccatgcagaagagcacagcccagatgatcatcgcagtctgcctgatctgtcaatctttggcagtggaggataaggataaggcaacaaatccattaaatatagatagtgtccaaaaacataatgtcaagctactcagcgagcaactgaatcgcggttggcgagcattctgcgatgctcctgtggatgagggtgtgatgtccttatttcagggcattaatcccagcgatgcccgactccatgtgatgaccatcaccaaccagagtgtagagctgcccattaaatccatatctcagatcaaggatttcgatatcaatccggagcgtaagaccctcatctatgtgaatgccttccacacggccgatagctattttagtgtgcaggagcacttgactctgctgcaaaacagcaggagggatctcaatgtaattgtggtggatttcgcaaaggatgtggctcaattgtactatgcagtgcgtcatcatctctccgttaatggctacttcgtttataagctgctgagagctctgaaggatgcgggcattgccgtgcaggatatcactttggcaggacactcagtgggtgctaacatagccgcactgggtgcccaactttttgccaaagaaaacaaacaattggtgggccaactgttggccatagacccagccaccatgtgtcgcaccaccgatattttggtaaaacaaagtgtggctttaagagtggtggtgctgcacggggagggagatgtttttggggtgagggtgccactgggtcacatcgatatctatcccaatggtattggatacttcccgaggaggaaactgcaacctggctgcgagtccaagatctgcagtcacatgtatccatttattctgttcatggaggctctcatcgagggtgtgatgatcccagctaccaagtgcgagagttgggccaagttccgacagggcgattgtaatttccagaacaccatcaacattggactcatctacccagcgaatgccaagggtctgtacttctgcatgacgcaaccgaatcctccattcacctatatggaacatggactgcgctacaaggcgagacgtcctgagaaatcctctgaaaagaaccgtataaagttttag

SEQ ID NO: 21522 - protein, 378 aa, DROSOPHILA
MRAQFTMQKSTAQMIIAVCLICQSLAVEDKDKATNPLNIDSVQKHNVKLLSEQLNRGWRAFCDAPVDEGVMSLFQGINPSDARLHVMTITNQSVELPIKSISQIKDFDINPERKTLIYVNAFHTADSYFSVQEHLTLLQNSRRDLNVIVVDFAKDVAQLYYAVRHHLSVNGYFVYKLLRALKDAGIAVQDITLAGHSVGANIAALGAQLFAKENKQLVGQLLAIDPATMCRTTDILVKQSVALRVVVLHGEGDVFGVRVPLGHIDIYPNGIGYFPRRKLQPGCESKICSHMYPFILFMEALIEGVMIPATKCESWAKFRQGDCNFQNTINIGLIYPANAKGLYFCMTQPNPPFTYMEHGLRYKARRPEKSSEKNRIKF

SEQ ID NO: 21523 - DNA, 3167 bp, DROSOPHILA
tgttcaccctctgcagcccagtagtcaatcttgcaatttctggccaacgacaaatgacaggaggcaggcaggtttttaaggtcctgcagcaggacgtctgccaactggcacaagccaagcccagcacttggccgacatttcaccaaacccaaaccgaaagaggggattttcgggtgaggcacggacttcggattcgacctccgggcgcattgacagaagaaagttgaaaacactttggccacaattgtgcaaaccgaacaaaatgagctgcaaccacgcacttgagggcaactcggaaatgagcaatgaaagtgcgtggccatgcaattagacaactcctccaggaagtggacaagatgcaacttttatgcagggaagcactccagaaaggtgcacgagttttgattggaggactctggcgattgaatatgattaaatcgctttaattacaacacaataaattaaaatacgagggtaattgaaaatgtgaatgccgataacatctatataattattgtgcattttgtgatgaatttaaaatggcaaataaataaaccacttgaaaccacttgtttatttgcgatgaataaagaaaaaacaaatattgtttgcgctgtacaattcaattcaatcgaaaacagcatattgatcttttaaactgggtttcagacttgcaattttattaattgaccctagtggaaataaatccaagagaccattaataaccaaaatgtaggttattttttaattaatggcttataaaaatatatatttgttttgtatcacttaatattttatattatggccgcattgtatgcatttgttgaattattaccgttcattagactctggcaactgatatatttttgcataaaatatccattcaagatccttttgaatgaccaacatatgaatttgtaagcattatttggagattccaatgtcgatagaaaataaatggctttcgaacaaataatttgcggaatggttaccaagcggcctaatttttcttcctgccgtggcaaaatttgacagggttaggtgcccttagatgggaactgggccttttgcgtaaaaatgatggtttgatcttggaggacggcgtttcgcgaagggacatcgacccaatggagcttccatcgatacatcgtgcggtcgtggacaactcagaagtctccataagtccaccacgaccagggtataaaatgttgatcaatggagcgtgagaagttcttagattttcggcatgcgtctcctctacttcgtgcgatttgagttttgtaagcgcataaactgaacaattggatgcacctccagctggcttaatgttcaccatgtaggaataagaggatcccttgttcaggactttgctgccctcgtgttggagctgcagtttcacgagaagatcgccaatctggctgaaaatcttatcagtctctgagataactttctcacattttcctcccttggcaattaatggtagatgtttcctttcgctaattgctgatttggtggaaacctcgggatatctaatcttttggttctttttacgtttaatttcgaaggtgtcttgccggcgaaggcctgaaagtggaatcaagctggtgcaacgtgcctgtggagttggttctgctggtccaattttcccatgaacatttttcatctgctctagcgtgcagcaaatctgattcatacctggcatagtccgaaacaatagtttgctgtcttctattttcatgttggtaatgctaatggatgtatctttctcttccagtccagcaatactaaggctctccagatcctctttaaagcggcgctcattatctgcatcattcagtacagccaatgcttgagagcttaggtttataggcatatctaattctggaggtggttcttcatcctccaggaggggaaaatattgctgctctatatctgcctgaacctttttcatccgttccttttctatggaactaagcattgcttccaaatctgaacgatcctcatatttcgcacagtctaccaaaataaatggtgcagcctggtcatctatctcttgggattggggttccacgttcagtcgaataggctccgtgttgacaactctcgatggttcaggttgttctacttttggtgtccgatctctacgactcttcttcttcatgacggctgaaaaataattatttttagactaaaaaatactatttgttaaaaatatttaatcaaaaatatacttattttctaccatcacattttcacataagcctcctaattttttttcgtacacctttttatgtatcattcaagtcaaattagcagcgccaatcgcattgtgcttgattgtggccaagtcggcaaagccgtgattaggccaacaagaaacactcacctggtcgccacgaactcgatgctgccactcccacggttgttgtttcgctgttggctcggctgcaaacagaaatttaaatccctcaaaagtactcggcgaagaaaaacgaaattgaaaaggataaaagttttgcgtgccccagaatcaacagggacgaaccttcagcccctgatccagcttctgctcctgaattttgctcctgtcttggctcctgggcacttgtagctgcctctggccaaaaagtggtggatagtaggaggagcgttggcggacaggaacacaatccgtaaaccaaaactttattttgtgctgataaaaacttaaatgttgctgccgctgccacgcaatcgtaaatgtttgatatccccaaaggttaacaatttccgttgccgcttggatctgctctgcttcggcccaagttagttttctttattttgtttgccaagaattttgcggttggccaactaaaccgcatacacacagctggtgtgggagtgtctttgggctgtctgttcgactgctgtgaatgtttttgtttgtgtctagaatgggaccaggaatacggatagggcccctgctacttggggaaaggcgtactctgttcaatttagatcatctatgtggagctataggaatggacaatcctgtattccgggagctggtgttcccaaattttgatattcaaaatggttcttcgaaagtcactgcgcctgacaattacggcaatgctttaaattatattgtaaaaataagaaaacgaaaatgttgttctccatctaat

SEQ ID NO: 21524 - DNA, 1167 bp, DROSOPHILA
gccgtcatgaagaagaagagtcgtagagatcggacaccaaaagtagaacaacctgaaccatcgagagttgtcaacacggagcctattcgactgaacgtggaaccccaatcccaagagatagatgaccaggctgcaccatttattttggtagactgtgcgaaatatgaggatcgttcagatttggaagcaatgcttagttccatagaaaaggaacggatgaaaaaggttcaggcagatatagagcagcaatattttcccctcctggaggatgaagaaccacctccagaattagatatgcctataaacctaagctctcaagcattggctgtactgaatgatgcagataatgagcgccgctttaaagaggatctggagagccttagtattgctggactggaagagaaagatacatccattagcattaccaacatgaaaatagaagacagcaaactattgtttcggactatgccaggtatgaatcagatttgctgcacgctagagcagatgaaaaatgttcatgggaaaattggaccagcagaaccaactccacaggcacgttgcaccagcttgattccactttcaggccttcgccggcaagacaccttcgaaattaaacgtaaaaagaaccaaaagattagatatcccgaggtttccaccaaatcagcaattagcgaaaggaaacatctaccattaattgccaagggaggaaaatgtgagaaagttatctcagagactgataagattttcagccagattggcgatcttctcgtgaaactgcagctccaacacgagggcagcaaagtcctgaacaagggatcctcttattcctacatggtgaacattaagccagctggaggtgcatccaattgttcagtttatgcgcttacaaaactcaaatcgcacgaagtagaggagacgcatgccgaaaatctaagaacttctcacgctccattgatcaacattttataccctggtcgtggtggacttatggagacttctgagttgtccacgaccgcacgatgtatcgatggaagctccattgggtcgatgtcccttcgcgaaacgccgtcctccaagatcaaaccatcatttttacgcaaaaggcccagttcccatctaagggcacctaaccctgtcaaattttgccacggcaggaagaaaaattag

SEQ ID NO: 21525 - protein, 386 aa, DROSOPHILA
MKKKSRRDRTPKVEQPEPSRVVNTEPIRLNVEPQSQEIDDQAAPFILVDCAKYEDRSDLEAMLSSIEKERMKKVQADIEQQYFPLLEDEEPPPELDMPINLSSQALAVLNDADNERRFKEDLESLSIAGLEEKDTSISITNMKIEDSKLLFRTMPGMNQICCTLEQMKNVHGKIGPAEPTPQARCTSLIPLSGLRRQDTFEIKRKKNQKIRYPEVSTKSAISERKHLPLIAKGGKCEKVISETDKIFSQIGDLLVKLQLQHEGSKVLNKGSSYSYMVNIKPAGGASNCSVYALTKLKSHEVEETHAENLRTSHAPLINILYPGRGGLMETSELSTTARCIDGSSIGSMSLRETPSSKIKPSFLRKRPSSHLRAPNPVKFCHGRKKN

SEQ ID NO: 21526 - DNA, 3683 bp, DROSOPHILA
gcgactgaacaatgatgtttccaaggaaaagccgaccggagaaatgggttcgtatattgatggagctggatttcctgccaattcgtatgtgtgccagttaatccgtatactggacaatcccatcagcgtggcgttgtagaactcaaccaggccataaagggcgtccagactagatggttccatgatgatcaagtcaaaactttcgcttttgtcatgcagcatcctttgaacgccaggatcacttagaatgtcattggaggcattaaagagcgcctttgccgtaagagcgctctccgtccatttgttaatcataaagtccagaacttggtcagactcaagcatttctaaaaagataaaaaaaaaatcaacaaacagacactttaataaggtgactaaccttttatacgttcgttaagctgggcaacacgtatatgtcgaactccctcgatatcgtttggcattccgatcggtgtaattagagtcacattgtgccctctcgttgccaaagtccgcaccaaaggctgcatcacaaaaaagggtgaaatgtggcggtagggaaatatacccaggatgttggcagcctgggcacgatcgtgttgcagaagcaggcaaagggagagagtcagccagcaatatcgtaggcgcattttcgcggattcggttcgttcatgttgaagctctgaccacaactgagcaaatcttatcggtattccgcgatacccatgaaagctcctcattatttacaaccaataacaataaaatggtttgataattatgaattggaacactttagaattaaatgaaagctcattgaaaataattttttggaactatgccattggaaaaatgttaatgcacctattaaaacatatgctccttactaaatttaacctgagtaatcgatatgtaataatttttttttttaattttaacattaacatttttttaaaataatcgagatctggaaatcgcgtacctggacaatcaaaatcgaagaaatctaggatactacttcataattgctcaagcccaattgtatctgcgcaataactctttccctttcttggagtcttgtgtgcctattgcgattcttctggtacaatctccagcccaaaaagatcagcgatccacagacgcaaccaaggcgaactccaaaggttagtatgctgtcgagtctgtagtatcgcataagaggaatctcctccacattgagacgcatatgggaagtatcccgattccgtagagcgtactccgtccaccagatggcagtgtccagaggactcattggccgatccctgaaagacgctgccatttcttttgctctctgggcatagctaggattttcaagaagctctttaatagtttcgatgagtgtgtctgcgttcaagtcgttggggtccaatactttagccattccggctaactgcactcgatgtatattattgaattggtcgaagaacagtggaagtcccagcatgggaaccccgttgtcaatcgcctccatcacgctctgcaagccgccgtgagtgataaaaagccggagattgggatgggccaacaccattcgctggggcactttatccattacgtatatgttttccgatttgttcgccagcatggacagctcgcttttccaaatcaccctttgtttcatctgaaggaagaccagcagcagctgtttctgcatattttccggcagatattttatcaggatatcctggcccattgagaagtagatggcgccgtgctccgcctcgtccaaatatttttgtagttctgcaccacatggctctgggggctcgctcagatgcactcctgccacctcaatgatatttggcacattggctcgtacccttcccatgctgaagtggctattaacaaggatgaccgagaatctggcccgtagctcatctagtttctccgccggatatccgaagaactttttaaacaatcgcacctgagcgggacggaaaacaagacgttccaggagcttctcctcggtgatataaatccaattggaccatctacttaagaacgtgttatcaagagcaaaaccgttaggggatatgggttcatatacactcggagccagatttcccgccaagtagtcgatatgccaagtcatgtgcatacatgaaattcccagaagggtggcgttatagaactcagctaatccgtaaagtgcatccaggtggctagcttctaccatgatcatgtcaaacctgatacttttatcacgcatcaacatctgaacaccattattgttcaggatagcatgggagacgttgtagaaaatcgtggagacgagaacaccctccctccatttatcacccaaagcgtcaaagaattggtcgtttttcataagatctgcaggaaaaccagtatccagtttaaagaacctatggcacggaacgtcgtattactcactctgcataagctggtttagcattggcactcgtatgtgacgtactccgtctattttagccggataatcagcgggtgtgaccatcgttaccttgtgccctcgctcaactagcgcctttatcaaaggtcgtaccatctgaaagggggagggaatgcggtacgggaacacgcccaggatgtttgccgcttgacccaattcgaggtaaagattcaggtgcaaaagcaggccgaaggccagccaagcatagccgagccgcatttttacgctgttcgtccgctcatgtcggatctctgttccaaagtaaacgcaatcttatctatactttaccgatcaaccgcaaaagttccagttcgtcggtgtaagagctataaaattggttgataacccatttgttcatgaatttgagaagtgatggctcatgttgatttttgttggctgtgcaaaatatactagatttggcgccattagggatatttaattcaaagccaccccttttgattatagtgtgttctctttcaattgggaatgtagtcatctccttctgaaaacgccacagtccgcatgcgctgaattggccatctatagggtttttttcccatttgctaatagggggagtattttgttttctaaattttaaccagatggcgatacaccaaaattttttgtttgtaccttgacttcatattttttatggatcttagacataattataggcaagatggagtgttttcctataaattaatgaggtgaaattattaccaaccaacctctgtattattggtgacaaattttgaggaaatatttacgtgaaattaaaataatacctattacttccttcttgttagtataaatagtttgaatactatgaatagttgtttagtctatgggcagctcaaaagtatatgatattgcgtaggaatattgcaatgtgcgcgagcaagcaaacagtttttgttgcatacttacagcctgcaaatggtatctttatagtgttgtgtggtctgtagtaaatcaacgcaagtggaataaaatattttaaataaatgataatatttcatgaaggcaatggccagactggcattcacatgaccccgcaagaatgtgagaaaatgcagcatttattcttttacggcccccgcaggtgaaggtgtaaaatgccatcgctccccatttcgccgaacgcaggctatggcctcgtaaatgcaactgtgcgttttatattttgactataactcaaagtgcatttcaacggtgcctc

SEQ ID NO: 21527 - DNA, 1623 bp, DROSOPHILA
atgcggctcggctatgcttggctggccttcggcctgcttttgcacctgaatctttacctcgaattgggtcaagcggcaaacatcctgggcgtgttcccgtaccgcattccctccccctttcagatggtacgacctttgataaaggcgctagttgagcgagggcacaaggtaacgatggtcacacccgctgattatccggctaaaatagacggagtacgtcacatacgagtgccaatgctaaaccagcttatgcagaatcttatgaaaaacgaccaattctttgacgctttgggtgataaatggagggagggtgttctcgtctccacgattttctacaacgtctcccatgctatcctgaacaataatggtgttcagatgttgatgcgtgataaaagtatcaggtttgacatgatcatggtagaagctagccacctggatgcactttacggattagctgagttctataacgccacccttctgggaatttcatgtatgcacatgacttggcatatcgactacttggcgggaaatctggctccgagtgtatatgaacccatatcccctaacggttttgctcttgataacacgttcttaagtagatggtccaattggatttatatcaccgaggagaagctcctggaacgtcttgttttccgtcccgctcaggtgcgattgtttaaaaagttcttcggatatccggcggagaaactagatgagctacgggccagattctcggtcatccttgttaatagccacttcagcatgggaagggtacgagccaatgtgccaaatatcattgaggtggcaggagtgcatctgagcgagcccccagagccatgtggtgcagaactacaaaaatatttggacgaggcggagcacggcgccatctacttctcaatgggccaggatatcctgataaaatatctgccggaaaatatgcagaaacagctgctgctggtcttccttcagatgaaacaaagggtgatttggaaaagcgagctgtccatgctggcgaacaaatcggaaaacatatacgtaatggataaagtgccccagcgaatggtgttggcccatcccaatctccggctttttatcactcacggcggcttgcagagcgtgatggaggcgattgacaacggggttcccatgctgggacttccactgttcttcgaccaattcaataatatacatcgagtgcagttagccggaatggctaaagtattggaccccaacgacttgaacgcagacacactcatcgaaactattaaagagcttcttgaaaatcctagctatgcccagagagcaaaagaaatggcagcgtctttcagggatcggccaatgagtcctctggacactgccatctggtggacggagtacgctctacggaatcgggatacttcccatatgcgtctcaatgtggaggagattcctcttatgcgatactacagactcgacagcatactaacctttggagttcgccttggttgcgtctgtggatcgctgatctttttgggctggagattgtaccagaagaatcgcaataggcacacaagactccaagaaagggaaagagttattgcgcagatacaattgggcttgagcaattatgaagtagtatcctag

SEQ ID NO: 21528 - protein, 540 aa, DROSOPHILA
MRLGYAWLAFGLLLHLNLYLELGQAANILGVFPYRIPSPFQMVRPLIKALVERGHKVTMVTPADYPAKIDGVRHIRVPMLNQLMQNLMKNDQFFDALGDKWREGVLVSTIFYNVSHAILNNNGVQMLMRDKSIRFDMIMVEASHLDALYGLAEFYNATLLGISCMHMTWHIDYLAGNLAPSVYEPISPNGFALDNTFLSRWSNWIYITEEKLLERLVFRPAQVRLFKKFFGYPAEKLDELRARFSVILVNSHFSMGRVRANVPNIIEVAGVHLSEPPEPCGAELQKYLDEAEHGAIYFSMGQDILIKYLPENMQKQLLLVFLQMKQRVIWKSELSMLANKSENIYVMDKVPQRMVLAHPNLRLFITHGGLQSVMEAIDNGVPMLGLPLFFDQFNNIHRVQLAGMAKVLDPNDLNADTLIETIKELLENPSYAQRAKEMAASFRDRPMSPLDTAIWWTEYALRNRDTSHMRLNVEEIPLMRYYRLDSILTFGVRLGCVCGSLIFLGWRLYQKNRNRHTRLQERERVIAQIQLGLSNYEVVS

SEQ ID NO: 21529 - DNA, 3679 bp, DROSOPHILA
aactcgatcgtcaaggcattcagttgctatattagcggaacaattaaacgggggaatcttccactgattaatcgttctcggaggaggttggttggtgacctcgttgccgtttgttctcactccgatgctttgcagccaggtttaatatttagccaagcgcagatcgtaaacaaaagaatgccgccgcactgtgcaaataaaccccgaaatggaaaattaaaaacacactgaatacaaccacaataatatacgattctgttcatgaattcatattttgtgcattctgtcagcggtttgaatgtctgttgttctggccttaaactatgccaccatttgtcgttattgtttggcccaaatatttggcaatgcctcagttaccatgacttacgaaaattacagcagaaatatcttgagtagagtttactactgttgaagccagatcgggaagtctggcctataggatgggaagatttacagttagcgatgctggtgaaaggcggaacctgcggtggattctctgaggatgctcaatatcaaggacaactacaggtttttttttactactgacgtcaataagttcgtctcaaaatacgtcattacaggtgtagaatctcaagaaaccagttaagatgggaaacatatgttttttagaataggaatttaattaagtataattaatactaaggtagcggtttcaattcattaaattttttcaataagataaaaaacatttttaaagtaataactttaaaattgtaaaacaactgtaattaaaaaaagaagagaaaatcggttaacgacatgttggatataattcaaattagcgcacaccatttgtacatgccaactgaacttatgctacaagtcgatgttaactagtaattttgcaagcacacttttgagatcgacttatatattaacaggtagctagttaacagagctattgcagcagtaactgtaaaataataaaaataatacgtgttaacacaataaacataacttattgtgtttgcgatcttcgatcaagcaagctaggatgttgagaaacagttcctgtcacttgaaatggccttcgcctcgcactagttttttgaaataacttgtagaccaagtagatcacagacccaaagacaataccaaagcggagacctaaaaggagcccccaatcccattcgtagtaaagaggaacatcctccgtgttaaggcgcatatgtgaggcgtccttattccgcagggcgtattccgtccaccaaactgctgtgtccaaaggactcatgggtcgatccctgaaggattgcgacattttcttggctttcagagcatatcttgggttctccagcagcttccgaatagttgaggtcagaatttctaaggtcatctcattggcgtccaagacctcggccatgccacgcagattaacatttcgcagattaataaactgatcgaagaacacaggcaatcccaagatcggcactccactgtaaacagcctccattacacttagcagacccccgtttgtgatgaatagccgagtattgggatgggccagaaccgctcgctgaggaggttgttcgatcacatatacgttgtccgatttgtttggcatattataaagttcggttttccaaacgaccctctgcttgaattggtctaaagatttcataaggttttgctgcatgtcctcaggcaaaaactgcaccattatctcctgtcccatggagaagtagataacaccgtgctccgcgtcgtccataaatttctgcagtttcgaatcgcacggctcagctggctcggtgaggtgcagtcctccgacttctatgatgttcggtacgttagatcgtaccctgcccatactgatgtggttgttgaccaaaatcactgagtacttttcccgcatgttgtaaaatttctgctccgaaaagttaaaaaacttcttaaagatgcgcagttgagatggtcgaaagatcaggtgcttcagcaacttttcctctgtgatatgcacccagttgtaaattttgctaaggagcgaattgcttcgggaatagcctagcgatgagatcggatcattgatgcttggtgcgaagtttccagcgacttcttcggtactccagttgacattaccaccggaaaaacccatcagtgtggcattatagtgctctacgacgccataaagcgcttccagggcagacggttctagcataactaggtcaaagcgttcatttctgttttgcaacatcttttgaacccctttgtcgctcagtatatccgaagacatattgtagagcattgacacaaccatcaggcttgctatccatttgcttccaaagaagtccaagatttggtcaccctcgatcatttctgcgttgaaacccaaattgaatataagttaatatactaaaaattacgaaatgactcaccctggacgcgctgatttagcttgggaacgcgtatatgtcgaactccttcgatgtcggtcggcattccaactggtgtgatcaacgtgacattgtgtccccgtttaactagagcctttgccaatggacgcacaactagattgtgagagctgaagtggtaggaaaatatgcctaggatgttggcagcctgcaccgagtcctggtacagatccttttgcaggaacaggcagaacaagacagccagccaataaaactcgaggtgcatttccacagttcagtccgctcatgtcggagctctgtccacaaatgaacacaatctaatctaaggtgtcggcagaaagcttaactgatatcgtaatagttttgaatccaggtggtgtaagtatttgtgaattattatcggttattagttgcttgtctgatagataacgccatagccatagcgtagaacggtcggaaatttaatcgcaatgtcattaaaatgaacataaggaatgctgaagaggatgtggtattggtgactaagaattgctcctatcttaagtgaatttaaagacataacacaattaattgtcataaataaacattttcgagtctccggatatagtgtattatcatggatgcaatcgtcttagtctgatacgatatttcagaaacagggtgtagaccaaaaagatcagcgatgcagcgactaatccaaatcgtagactgaatgctaaaatactgtcaattctatagtactcaatcagtggaatctcctccaagttaaggcgcatccgagtaatattccggtttcgtaaggcgtactcagtccaccaaaccgccgtatccaatggactcatgggacgatccttgaaaaattgcgatatttccttcgctttcagataatagctgttatttgcaagcatatgctttatggtttcggttagagtatctttgttcagagagttgatatccataacctcagccattccagataattgcacccaacgcatattaccaaattggtcgaaaaacatcggtagtccaagcattggaactccactgtctacggcctcaatcacactcagtaatcccccgtttgtgatgaaaagtcggacatttggatggttcaatatatgtcgctgaggggcttgttcaacaacatatacattatccgatttgtcaggcatatataatagttcgctcttccaaataatactttcatttagcgtagcaaaagtctgcagcagtagctcctgaatgttttcaggaagaaacttaat

SEQ ID NO: 21530 - DNA, 1620 bp, DROSOPHILA
atgcacctcgagttttattggctggctgtcttgttctgcctgttcctgcaaaaggatctgtaccaggactcggtgcaggctgccaacatcctaggcatattttcctaccacttcagctctcacaatctagttgtgcgtccattggcaaaggctctagttaaacggggacacaatgtcacgttgatcacaccagttggaatgccgaccgacatcgaaggagttcgacatatacgcgttcccaagctaaatcagcgcgtccaggaaatgatcgagggtgaccaaatcttggacttctttggaagcaaatggatagcaagcctgatggttgtgtcaatgctctacaatatgtcttcggatatactgagcgacaaaggggttcaaaagatgttgcaaaacagaaatgaacgctttgacctagttatgctagaaccgtctgccctggaagcgctttatggcgtcgtagagcactataatgccacactgatgggtttttccggtggtaatgtcaactggagtaccgaagaagtcgctggaaacttcgcaccaagcatcaatgatccgatctcatcgctaggctattcccgaagcaattcgctccttagcaaaatttacaactgggtgcatatcacagaggaaaagttgctgaagcacctgatctttcgaccatctcaactgcgcatctttaagaagttttttaacttttcggagcagaaattttacaacatgcgggaaaagtactcagtgattttggtcaacaaccacatcagtatgggcagggtacgatctaacgtaccgaacatcatagaagtcggaggactgcacctcaccgagccagctgagccgtgcgattcgaaactgcagaaatttatggacgacgcggagcacggtgttatctacttctccatgggacaggagataatggtgcagtttttgcctgaggacatgcagcaaaaccttatgaaatctttagaccaattcaagcagagggtcgtttggaaaaccgaactttataatatgccaaacaaatcggacaacgtatatgtgatcgaacaacctcctcagcgagcggttctggcccatcccaatactcggctattcatcacaaacgggggtctgctaagtgtaatggaggctgtttacagtggagtgccgatcttgggattgcctgtgttcttcgatcagtttattaatctgcgaaatgttaatctgcgtggcatggccgaggtcttggacgccaatgagatgaccttagaaattctgacctcaactattcggaagctgctggagaacccaagatatgctctgaaagccaagaaaatgtcgcaatccttcagggatcgacccatgagtcctttggacacagcagtttggtggacggaatacgccctgcggaataaggacgcctcacatatgcgccttaacacggaggatgttcctctttactacgaatgggattgggggctccttttaggtctccgctttggtattgtctttgggtctgtgatctacttggtctacaagttatttcaaaaaactagtgcgaggcgaaggccatttcaagtgacaggaactgtttctcaacatcctagcttgcttgatcgaagatcgcaaacacaataa

SEQ ID NO: 21531 - protein, 539 aa, DROSOPHILA
MHLEFYWLAVLFCLFLQKDLYQDSVQAANILGIFSYHFSSHNLVVRPLAKALVKRGHNVTLITPVGMPTDIEGVRHIRVPKLNQRVQEMIEGDQILDFFGSKWIASLMVVSMLYNMSSDILSDKGVQKMLQNRNERFDLVMLEPSALEALYGVVEHYNATLMGFSGGNVNWSTEEVAGNFAPSINDPISSLGYSRSNSLLSKIYNWVHITEEKLLKHLIFRPSQLRIFKKFFNFSEQKFYNMREKYSVILVNNHISMGRVRSNVPNIIEVGGLHLTEPAEPCDSKLQKFMDDAEHGVIYFSMGQEIMVQFLPEDMQQNLMKSLDQFKQRVVWKTELYNMPNKSDNVYVIEQPPQRAVLAHPNTRLFITNGGLLSVMEAVYSGVPILGLPVFFDQFINLRNVNLRGMAEVLDANEMTLEILTSTIRKLLENPRYALKAKKMSQSFRDRPMSPLDTAVWWTEYALRNKDASHMRLNTEDVPLYYEWDWGLLLGLRFGIVFGSVIYLVYKLFQKTSARRRPFQVTGTVSQHPSLLDRRSQTQ

SEQ ID NO: 21532 - DNA, 7505 bp, DROSOPHILA
tgccactttttgatagatccttcaattattcgcacttgcttcagataaaagttaaatattgtccgcagattgtaaccgcttgagcgcccaagcgcgactgacttcccatcttccatgagcatccatttaaatttgctgcgtacatatatcgcaccgttcgggttcaaattctaattgacctttctcttggggtaggttcgaagagacttgattgatcaaggaaagagtgtcagtgggaaatgtcgtcaaatactccgcactgtctcttatataaacaaaaaagatagattgaagtctgctttgctaagtgatggattttatttcaaggtataactataagaagtgatttcttcatctgtacaaaggacacatttgcatacattttctacattcacatgcagcggattataattacagcatacaaacttaggcacttatttatctgtacttgtaaagatacaaaatctagctggataacaatcgcatatcacatactgtgttggtttacaagtatttacactgcctacacgagatagagattcattaaaaagttattcaaagattcaaacgcttagcttatatggcaagtgccaaaacaataagtcaatttcctattaactaagatagttatatacaatgctattcgcagttccacgcgtttcgtaatatttgttcaatatttactagaattttcttgagctggtcttatgaagtaaaaagggtttgaagaaattggaattattaaattttagttaaacatttaaattgaatttaagttaaactcgatatgagactatctgatctgctgcttgaattgctaataaaaaagtgattacttgacttcgaggataaaatccttgcaataatctttctttttcaggctactaataatatcatttttagtggttctgggtggcacaatgccattgcatcttaaacctaattacgtggctcgaattccgatcaagtcttaactaatctaatccgactgataataatgtcagacgtacacctctccggtcttttgttccggcttgtgtttggccagagttgagggggccgaggatcctccgacttcgcccgtttccaggcctccgctcctctgaggaattggcatcgtgcctgagttgtccactgtgcccgtgggacccgctgacctcatcgaggatcgttgctgcggatcctgcagattgaggctcaggttgaaactgttgtttcgcgaaatgttctggtttccattgaggggcttaacggacagcagtgccgtagtggtgataccgccattgccattgctcgacccactgttgctatatccatcctggacatctgcaccggtcagctccacaatggaaagtgctgacggcgatcgctggatggacaaggacaccggtatcgtggtgatcacatcgttaggatcgtagccacttgccgtcgtcgttatcgtgggcagctgggcattcgccgaaatgggcaggatgctcagtgtcccagtgggcatcgtttccccaccggtgctggtcacgctgaaggggaacgacagagtggtgatgtttgtggcagctggaatacctgcaggttatcagaggaaacaataagtgagaaaagaatataaatatttaatccattaagcttttaatatcctcttaagagtatgtattgaactcatcattaactattcagaggcattaaaaacttctagatcttggatatttccacttactgctcggcgtgaatccctccttcatgctggctgccaaagctgcggtagccggatgacctggaatcagagtgttattggacgatgagctatccatctctttgatgggcgagagcagcagcgtgcccagcacctgaccgctctcctggtgcagtagtgtgtcgggtgcgtaagaggaggggtacatgcccggtggtgcgctggtggtgctcagctgctgtggtgccattaggaccgagctggtggctacatgggagtggtgtgaattgtacaaaaagttgcaggttttgtgcgggatttgtgggttgttactcacctggattcgtgttgccatccttggccacctcgggtgtgggaatgcgcggtctggtcttggccacattgacattcaagccatttaatttggagtcttaaacatagaaataattttaaatttaaagcatactcttgggggtttaaagaaattgtgattactaccaaaaaaattagtttgatttttattaatattaatattttatttaaaaatgtttatttctattgttttttacttactttgcttgataagttggcgttgtgctctcaacgatttacgatgcacaaactttccatagagacttgatttacttggctgcgatccggcttgctgctgctgatgcgcctgctgtaattgctgctgctgcaggatggtcagtggcaagccggactcgggactagagtagacggagttgaggcggttccggttgaatggcattccgccggaggagtaggccgtcgactggctcctcatggaacccattcgggagagctggcgaaccagccagttgtttttcctcctttccaccattggcgtgtccacgctttcctgtttgtggttagtaataatattaaaatgtgactcttgacatgaaaaagtcagcttcaaaaatatatgtaaattcgtctgcattaaattatgatagattaccaataaatgtgacaataacttaagcatgagaaatattttatagccttttaagttgaagttgttaaccctaaaaacgttatgtttgctggaaatatatctcacaaaacgcaactaatgtctaagttacagcaataaaacgtttgctttcaatgactgttaatataaatgttaggagaatctatgtgttgaatgcaactacgttgggagaaatgtatgaagatactcacatagtccgcgtagacatcgtcgctgagcatcctcttgccgccgcctggcattatgttggcgtacatggcgtcctccttcttgaccttgtacttctcggcggagcccttgggctcgtctttccggtagtgttcggatgccaccgtatagggcagatccttgggcaccacacactcccagtactgatcccgcagcagctcggggtgctcctcgtgcatctcgtccacgatcatgtaggcagcctgaaagcgggtttatcaaaagtggatcagtcgagggctgttcaaaatcgaaacgtgttcgccatttgcgattttttgggccatttcgaggaggcactaaacccaattacgtcacaataattcaaccgtggctactgtcccacatcgaaacaaaagaaaaagtgaaattgtttacaagtttttaattattccataacaaaaatcagcgcacagcccactacagaaaattgcaaaaacaaaaagaggaaaagaaataacaataaaagtataagcaatactcatttgcttaatcattttgccgcactctgttttcaatttgccatttatgagcgactgagccaagagtcacgtctggtcgtgtggagtgcagttgaaatgggccagaaaacctggcattagctccccgctgataaccgggctaaaagcgaccgcttgagatgcatttccgaattcgagcaaacccagcgcgctggggtgaccataaaaacacacacacacacacacatatacgaaacattcaatgataaagctctacaaaagaggtttcaatgttttcagctcgtatgttttttttcacgattttctcattttttgaacaaaaacctgttttcaatttacttttgctgctgctgctgctaacttttgtaaataattgcaagcaacggcaggccccagacacagatacacacacacgcactgcacacatgcaaaaatcgcttctaacacacacaagcatcgacttcccaaagcccaagtccaaaacttcaatcagcatcagcagcagaaggaaagccgaatagagataccctcatctaaatcgaaatcgtaagtttgactttggcgggtaaatttgaatttcaccagaagtaattaaaattccctttcgaagatttatctacttttataaatggaacgcttttctaagtcgcatttatttaatattttaatagagtctactgagacagcttcaagtaaaatgtatctaattacacagaatgcaagttcataaataaagatttattaagttcgactttcagtcacatgtaaatttgtaagacctacttataatgcactccgacttttcttagctagcatctactgatttcataattcaacaattacacatatttcttgttttgttttggtacattcttttttttagggtactctgcagttcgttttgttacacattgcatttggctcctcagtcttttgttggctatgtagagaatgcctgttatttttagcacgtggcagacagacatgttcttttcctttcagtagcaatccaagaagtggctgactcaagcgattatcgccttaagagtgcaaaatctttacttagttagcacgctaacccaattagcgaattcagattttagcagtcataatacttggaaacctttggaattatgattatgcatattatccccttgaacagatacgtatagataagtatcttgcggatgtgggcatcccaaagtttgatttaaaagctggaaaattaagtttggaagtgggtatttcgatacaaaagccatctgttccgaatttggtactaatttaatttggaaattcgtgtatatatgtatctacaccatgctaaatgaaattaattggaaatcattcaggtttttttgtgtgaacttcaaaagggggatctttttcgcaactctaacgcaaaatgattgttttatggttgtatggaccgcaggaattattgccaccacttattaacaatgtttaacggatggctggcgtatagacaatgtgccacatcgaattacgtcaagattgtgcgaattatctgcactgatgactcaccttgatgtgtcggtcaattagccagttcagctcgatatcatcgtcatcttcgccaaagggattgattagcacctcggccaccttcagccagcccacgtagaaaacaaactgcaaagattaattgaatgcgattggattttggttaattatatcatgaaaaacagagtcggacaatttcagcagaacttgggaataatgtgagagggtaagccagggaaagcttggcaattccattcactttttgcggcttcaaattatacggcatgaacattaacagttaataatgatagctaaacacttgtcacagatttatatcgcggagaaacacaaaccagaccagagctcggcaaaatgccaatttattacggggaacgtgaccgcgaatcgttttacataaggcacttgaaatgtgtccccagcggagaaccgcagaaaccaaaacggaaaacagcaaacagttgtaactggccatatcatgatatagcccaatatatatatagtgcatccgagcggcgtatcgctaacaaggtatagccattacattcggccactcagtttggcggaaaaattggcaaaaacaattgcgaacaacaaaaaaccgcaacaagtttttaaacttttacaaaacgacgagacgtgcaaaattgactttgatttatagtaaataaggcggaacgtgcaaattaagataacttctaagctgtcttaaatcaagcgagaaaaattaatgaattcattatatatggagcaattggaatcacctgcaatacggtaaacagggggaagaacagatcgggatcttcgcgtccacttctgtccagaacgttgggcaacatttgacggcccaaaagggcagctatgaaataggtgtacagcaccagggtgactacctgaaaataaagttttataattaatattcaattaaagaagggaaggttggaatatgctagaaatattgaataaaactcacctgagtgtagaccaaaggaacacagaccgtgtcgtatccaataagaccacctaaacgtctacgaatatccgagagctctaccagtatggtttgcacaatatgatccgaggcgattaggccatcctttctggcccggtttatgatgttggtagcccaaacgagaggcatccagtatttggacatgggactcttctgattcagtgcctcaaagattttcatctccgattcgtgcatcagacccgcatccacgagatgttgggttgtgggaaaacgacgttttacacgaagggaaattcgctgaagggtaatcacataggccaagaccatatagcgcatgatattacgacgcatcaggcgacccgtttcattctgtattaagaatttttatagattattgttgggttatttgaaaaaaattattttcttacatttacaccgccatttgagttgggaatagccgcgcttatgaacagggccaacgtatctggccagggcaaaagcctatattgctcccaccaacgtttcaccaccagattcacatagaagcccagcacaaaggacatgggtatactttcactctgctgcccaaaataaaggcgaatttttttaaaaatgctgaaaatatattagtattatattatatattatgttaccattttataaccctattcatacttacgcttgctgactttctgtcagaccaaatctgtagataacatttatggtatagtataaacacagatacgcaactaattcgcgccaaatcaatttgtaaacgctgcctcgccatctattaaaaaagggaagggatttgaattaagtaacttataggtagtcgaggaatttatggctttaatctgtaactaactggtttttgttttcttatacaaacgatttcctcattcagactttcaatcatttcccccatcgcatttcagattaggttttcgtttctaatgagtcgccagttctgcaagattttttatgggggtattccaatcttgcatgtcagttccaatgaattcaaatgtcttaaagtgtgatttgatacattataaaaaatatatatatgtatattgattggcataaccgcttcgaaactggtactattcaggtggggtctttgttctgtttgttttgatcaaggtttcgcttaccttcttctcttcaaaaatttaggttgggctctgacattataagcaaaaagtaactaactcgaggctcccatgaaaaacaataagttgttagccttttttcacatttttccagtcctaaaagtatctttcaattagtgagttcattactgaacgtgtgataagctacaactgaattttcagagcttcggcgttttggctaccaattattcttctttctggtttgaatggcaaaaactggaactgtgcaacagtaactggaactggaattgctattctaactgcccagttacgagtgactgcacttgggaaacaattaaagcgaactggggttaaaaataaacacactctaaaaacaaaatagcctgaaaccagatgttgtcgccgctgagatgtcactgtatggtgg

SEQ ID NO: 21533 - DNA, 2196 bp, DROSOPHILA
atgtcctttgtgctgggcttctatgtgaatctggtggtgaaacgttggtgggagcaatataggcttttgccctggccagatacgttggccctgttcataagcgcggctattcccaactcaaatggcggtgtaaataatgaaacgggtcgcctgatgcgtcgtaatatcatgcgctatatggtcttggcctatgtgattacccttcagcgaatttcccttcgtgtaaaacgtcgttttcccacaacccaacatctcgtggatgcgggtctgatgcacgaatcggagatgaaaatctttgaggcactgaatcagaagagtcccatgtccaaatactggatgcctctcgtttgggctaccaacatcataaaccgggccagaaaggatggcctaatcgcctcggatcatattgtgcaaaccatactggtagagctctcggatattcgtagacgtttaggtggtcttattggatacgacacggtctgtgttcctttggtctacactcaggtagtcaccctggtgctgtacacctatttcatagctgcccttttgggccgtcaaatgttgcccaacgttctggacagaagtggacgcgaagatcccgatctgttcttccccctgtttaccgtattgcagtttgttttctacgtgggctggctgaaggtggccgaggtgctaatcaatccctttggcgaagatgacgatgatatcgagctgaactggctaattgaccgacacatcaaggctgcctacatgatcgtggacgagatgcacgaggagcaccccgagctgctgcgggatcagtactgggagtgtgtggtgcccaaggatctgccctatacggtggcatccgaacactaccggaaagacgagcccaagggctccgccgagaagtacaaggtcaagaaggaggacgccatgtacgccaacataatgccaggcggcggcaagaggatgctcagcgacgatgtctacgcggactatgaaagcgtggacacgccaatggtggaaaggaggaaaaacaactggctggttcgccagctctcccgaatgggttccatgaggagccagtcgacggcctactcctccggcggaatgccattcaaccggaaccgcctcaactccgtctactctagtcccgagtccggcttgccactgaccatcctgcagcagcagcaattacagcaggcgcatcagcagcagcaagccggatcgcagccaagtaaatcaagtctctatggaaagtttgtgcatcgtaaatcgttgagagcacaacgccaacttatcaagcaaaactccaaattaaatggcttgaatgtcaatgtggccaagaccagaccgcgcattcccacacccgaggtggccaaggatggcaacacgaatccagccaccagctcggtcctaatggcaccacagcagctgagcaccaccagcgcaccaccgggcatgtacccctcctcttacgcacccgacacactactgcaccaggagagcggtcaggtgctgggcacgctgctgctctcgcccatcaaagagatggatagctcatcgtccaataacactctgattccaggtcatccggctaccgcagctttggcagccagcatgaaggagggattcacgccgagcagtattccagctgccacaaacatcaccactctgtcgttccccttcagcgtgaccagcaccggtggggaaacgatgcccactgggacactgagcatcctgcccatttcggcgaatgcccagctgcccacgataacgacgacggcaagtggctacgatcctaacgatgtgatcaccacgataccggtgtccttgtccatccagcgatcgccgtcagcactttccattgtggagctgaccggtgcagatgtccaggatggatatagcaacagtgggtcgagcaatggcaatggcggtatcaccactacggcactgctgtccgttaagcccctcaatggaaaccagaacatttcgcgaaacaacagtttcaacctgagcctcaatctgcaggatccgcagcaacgatcctcgatgaggtcagcgggtcccacgggcacagtggacaactcaggcacgatgccaattcctcagaggagcggaggcctggaaacgggcgaagtcggaggatcctcggccccctcaactctggccaaacacaagccggaacaaaagaccggagaggtgtacgtctga

SEQ ID NO: 21534 - protein, 731 aa, DROSOPHILA
MSFVLGFYVNLVVKRWWEQYRLLPWPDTLALFISAAIPNSNGGVNNETGRLMRRNIMRYMVLAYVITLQRISLRVKRRFPTTQHLVDAGLMHESEMKIFEALNQKSPMSKYWMPLVWATNIINRARKDGLIASDHIVQTILVELSDIRRRLGGLIGYDTVCVPLVYTQVVTLVLYTYFIAALLGRQMLPNVLDRSGREDPDLFFPLFTVLQFVFYVGWLKVAEVLINPFGEDDDDIELNWLIDRHIKAAYMIVDEMHEEHPELLRDQYWECVVPKDLPYTVASEHYRKDEPKGSAEKYKVKKEDAMYANIMPGGGKRMLSDDVYADYESVDTPMVERRKNNWLVRQLSRMGSMRSQSTAYSSGGMPFNRNRLNSVYSSPESGLPLTILQQQQLQQAHQQQQAGSQPSKSSLYGKFVHRKSLRAQRQLIKQNSKLNGLNVNVAKTRPRIPTPEVAKDGNTNPATSSVLMAPQQLSTTSAPPGMYPSSYAPDTLLHQESGQVLGTLLLSPIKEMDSSSSNNTLIPGHPATAALAASMKEGFTPSSIPAATNITTLSFPFSVTSTGGETMPTGTLSILPISANAQLPTITTTASGYDPNDVITTIPVSLSIQRSPSALSIVELTGADVQDGYSNSGSSNGNGGITTTALLSVKPLNGNQNISRNNSFNLSLNLQDPQQRSSMRSAGPTGTVDNSGTMPIPQRSGGLETGEVGGSSAPSTLAKHKPEQKTGEVYV

SEQ ID NO: 21535 - DNA, 4679 bp, DROSOPHILA
atatatctcatatacataacgattttattggattatttataggcgtcagattatgaatttcagcaatgcgttttctcacaagtcttttcttctattcttttatttctatagtctatttttttcgtgcacgccctaaaagtaaactcacaaaaattcaggaaaaattttattttccttcttaaaacttttaataatgctaacatttgtcctgttctaaatattctaaattgtaatttgaaattacctccccttcgtggtaattgcatgtattctttcagcattctttctccccatcctgataactaaggaagtcggtctttgttatcctgatttttaaggataagtattgatatgtaaaatcgggatagcatacatataaaagaatgtgtagaatgcaatgggttcttgtatcggctaacttttttgatagattgtacataactctgattttttacatgtttgtattctacatgtataaggaatgtaagttacaagttgattgtgtattagaatttataaatttacgtgaacttacgttggattaattttgagagacgataactacgcttgttgaaattgtaacttccccaaattaaaataatttacaacaaattcaaagacaacagctaaaatataatatgtttaatttacattaacatcgtgttttggatgtttgcattagatagactctgactatttacacctggttattgtggatacacgtgtagtaaggaaaggcatctcaacgttgggttatgaaagtgaataggtgttggtgtgaataaatgctggaacacttacaaaatagttgctaacaatatagctaaaaatatagctaacaatttctacgagctacgaaaattgtacaatgaattttgcatttaaatattctgggtttcgtgcgatctttcacaaaatggcaatacgaaaatagagtgtgtgagggtgagtgtgtgtggtgtgtgtgtgtgtggttttgtgagggtatttggatgtctttttacatggcagccccattgtaatgctgatacatctcatcccagaatctctgacgctccggctcgggattggttttcatcgccagattggctgagatatccatatagttgagactgttcatcacattggtgggatcgattggtgcccacttggtggtcagcataggatcctcggaatcaggcgtaggagagctgtaattagcattggttaaattttatgaaaagttttcaatcgtactgactactaacccatatttcgcgaaattcgtccacatgcgcaccattcgattcttgacctgtacctccatcgacttgggatccaagctcaaattgaagaaaccgaacttgaacagataacccagctcatcgccatggcaaacaccaggtcggggaatacccagcatccgtttgtagagccccaaagatccgtcgaaggagaagcggtacatgtagacaggtgcatttccaaacttggcatgatttcgggctgtgcgacggatgccctgaaggaacatgagatccgtgaggagctgtcaaagatacaaagtcaaatattatctatagttatctatagtacactgaaaatctcacttaccgcaatcatctcgtccactgattcaatgcccacatgcttgcttcccaagtagaaggatcttatctcgcgggtcaccctatcatgagattcagtcacattcaaatcttgcggaaccaggcggccaaaatcgttctcaatgatgctcagcaactggggattcttgcgaagtcctggtaaattatttagaaggcattaaagtgataattgagatgtccttagaatttgtcttacttcttatgaacagcatggcctcgtgtgtattgtaacccgtcatataggccacatcgctgttaaaattctgcgaatgatacatgtcgctagggtgctgagtaaggaatggctcctcgtagaactgttcctcctgagagtcctgattccaatatccctccaccacgggcacaaatggcaaaccaatgttattccgctgatcctccgccgtgattgttgtgggcgcggcttcaaccaatttcatggctggaacccttctaagaaagtcgaggatatcctctgttttattggcccccacgtaacccaagttggctgccagccgagcagctctctggctcgaactggcggacatggaccatggatttagggccgatccactttgggaaatcgctcggtggaaaagtcccttggcctgggaggacaggaggagcaactggacggacgaagctccagctgactctccgaaaatggtaacctgattgggatctccaccaaatgcggctatgttatcccgcacccactttagtgccagtacctgatccttgagaccctggttacctggagcgtcaggtcctgcggtaagaaaacccagtggacctagtcggtagttcagtgtgaccaagacaatatcctcagccactagatagtccggtccgtagaggaaagagttgccggagccaaaggagaaacctcctccatgcagccaaaccataacaggaagctttggctgctctgcagactcatcatccttgggcatttgggttgtgaacacattgacgaacaggcaatcctcgtctcccttgaaagtgtccaggatcatgttcttatgcggacagctctgaccttcccgagaagcatcacggattccagaccacggcttctccggctccgcagcacggaatcttgaatgaaagatcttgttagtatccagcttataattcttgtacttggacctaccttcttgctcctgtaggcggagctccatatcgcattcctttgaaactatagtagcctcctcgctctccggatcgatacttctgatagcgacccctgacttttcccaacgaggtagtggccacaatctcacgctctttctgtgaatgattttagcaaacaatgttagtctatgtatagcaccaatgataacttcagttgtaaaattcagttttaactgaagaattcaattcaaggcccacgaatttggctgccacttgcgaatgcaaaaaatctgagttgcgcaaccaatttgcatcgaagtgcgaactcgaatagaaccggcgcaaagaagtatgccatgtgcctggccaaagttgcgcaagcgcctcggtcaatttccataaagccagtttcccgcctccgatcacctgccaagttcttgactcactggccatctagggggtgtgtgcatatgccagcctctttctttgctattgagtcgacctcagccccaaagtgcacctgcatccatgtttggccagctgtccatgttcacgtccaagttgaaaattgattggccaccactttacaattcggcaatcaaaagcggctgtaaacgcttggcatttgctgcggccatggttcaaggccgaagaagactcacccgcagagatcttaccacctcctggaccactcgcatggccctcgatggcaacagttggacaagcgagttcggatgcgatgtcagggtcttccatgccgtcgtctcctgcaattgaaaattccgaaaagttttagtatgcacagggaaaaaactgttagaagatataaggaggaaaaaaccagttgccttaaatatgtatgtataatttccgaaaatagttttccccatctgatttaccactaagattattgtactcatggttttgatacgaaatatgaaaccatgtttatgccgatgacaacaatcttttttgccgcaatttaaaaaacatgcaaaagcccatgcccagtccaagttcatcgggcgcgatgacatttttttggggctgtccgatttgtaaagcggcgttaactgtcaacgggcaaccttcaccgactgcgccgcttaattgaaataccatttgcataactcaaatgctcggtttgcggcaattaggcagcggtattagcatggctaacaccaacaactgaagtcacgtgctgccggaggaaacgtcaatctcgatgtgactgttgttcccaggccgaactgggcgtgtgtcccgggctaaaatgggcttatatttgcctgtgattcatggcacaattgggcgtcagttggtggctgtggagcaccgagattcaagttcacctctaacactgttgttatgctaattacttatgccatataccctaacttggtggatattcgtcggactataaggcacagccatggcatcgagttcaattgctggcaaggtattcggaaatcgatttctttagtttttcgacatttttgtgtgtggtctgggggctatgctaatgtgggtgtagctggtttataacagtttcctatcgagatccgatcgatgttggctttaattataactgtttaatgcgctcgttggacagacaggctgtgcgttcgataaccaaacacactttggcttaaaaggcgcttaagaagtgggtcattgttcaacgctcaaagcgcttgagagtgctgggaaaataattaaagtcttccgatcaatcttttgcttttgattcggcttttgggggttcggctgctctaatatgtaaatgagtgagagccggacaagcagacagccaataacaacatctctggttgcattgcgaatctcgcataataatattttcaccgcttacaatgcaaacattatgcaatgggtgccgctttcacgcttacacgctcgaaa

SEQ ID NO: 21536 - DNA, 1731 bp, DROSOPHILA
atgagtacaataatcttagtggagacgacggcatggaagaccctgacatcgcatccgaactcgcttgtccaactgttgccatcgagggccatgcgagtggtccaggaggtggtaagatctctgcggaaagagcgtgagattgtggccactacctcgttgggaaaagtcaggggtcgctatcagaagtatcgatccggagagcgaggaggctactatagtttcaaaggaatgcgatatggagctccgcctacaggagcaagaagattccgtgctgcggagccggagaagccgtggtctggaatccgtgatgcttctcgggaaggtcagagctgtccgcataagaacatgatcctggacactttcaagggagacgaggattgcctgttcgtcaatgtgttcacaacccaaatgcccaaggatgatgagtctgcagagcagccaaagcttcctgttatggtttggctgcatggaggaggtttctcctttggctccggcaactctttcctctacggaccggactatctagtggctgaggatattgtcttggtcacactgaactaccgactaggtccactgggttttcttaccgcaggacctgacgctccaggtaaccagggtctcaaggatcaggtactggcactaaagtgggtgcgggataacatagccgcatttggtggagatcccaatcaggttaccattttcggagagtcagctggagcttcgtccgtccagttgctcctcctgtcctcccaggccaagggacttttccaccgagcgatttcccaaagtggatcggccctaaatccatggtccatgtccgccagttcgagccagagagctgctcggctggcagccaacttggaagccgcgcccacaacaatcacggcggaggatcagcggaataacattggtttgccatttgtgcccgtggtggagggatattggaatcaggactctcaggaggaacagttctacgaggagccattccttactcagcaccctagcgacatgtatcattcgcagaattttaacagcgatgtggcctatatgacgggttacaatacacacgaggccatgctgttcataagaagacttcgcaagaatccccagttgctgagcatcattgagaacgattttggccgcctggttccgcaagatttgaatgtgactgaatctcatgatagggtgacccgcgagataagatccttctacttgggaagcaagcatgtgggcattgaatcagtggacgagatgattgcgctcctcacggatctcatgttccttcagggcatccgtcgcacagcccgaaatcatgccaagtttggaaatgcacctgtctacatgtaccgcttctccttcgacggatctttggggctctacaaacggatgctgggtattccccgacctggtgtttgccatggcgatgagctgggttatctgttcaagttcggtttcttcaatttgagcttggatcccaagtcgatggaggtacaggtcaagaatcgaatggtgcgcatgtggacgaatttcgcgaaatatggctctcctacgcctgattccgaggatcctatgctgaccaccaagtgggcaccaatcgatcccaccaatgtgatgaacagtctcaactatatggatatctcagccaatctggcgatgaaaaccaatcccgagccggagcgtcagagattctgggatgagatgtatcagcattacaatggggctgccatgtaa

SEQ ID NO: 21537 - protein, 576 aa, DROSOPHILA
MSTIILVETTAWKTLTSHPNSLVQLLPSRAMRVVQEVVRSLRKEREIVATTSLGKVRGRYQKYRSGERGGYYSFKGMRYGAPPTGARRFRAAEPEKPWSGIRDASREGQSCPHKNMILDTFKGDEDCLFVNVFTTQMPKDDESAEQPKLPVMVWLHGGGFSFGSGNSFLYGPDYLVAEDIVLVTLNYRLGPLGFLTAGPDAPGNQGLKDQVLALKWVRDNIAAFGGDPNQVTIFGESAGASSVQLLLLSSQAKGLFHRAISQSGSALNPWSMSASSSQRAARLAANLEAAPTTITAEDQRNNIGLPFVPVVEGYWNQDSQEEQFYEEPFLTQHPSDMYHSQNFNSDVAYMTGYNTHEAMLFIRRLRKNPQLLSIIENDFGRLVPQDLNVTESHDRVTREIRSFYLGSKHVGIESVDEMIALLTDLMFLQGIRRTARNHAKFGNAPVYMYRFSFDGSLGLYKRMLGIPRPGVCHGDELGYLFKFGFFNLSLDPKSMEVQVKNRMVRMWTNFAKYGSPTPDSEDPMLTTKWAPIDPTNVMNSLNYMDISANLAMKTNPEPERQRFWDEMYQHYNGAAM

SEQ ID NO: 21538 - DNA, 3380 bp, DROSOPHILA
tgacacccttaaatcgagattttgttagatctccattgttttgcaaaagagcctcaacaaacttttggcactttatgatggcatgttgcgaactgataataggcacaatgttttagtttcacaagctccgtttcgttatgttttgccgacgcgtgtcgttccagaaatgagatgatctgaggactggagatcagagggcactcagagccacagagcaactgtcacagcgaatctacggatccgcaagtccgaccaatggattaaatgacggccgactgaaagaacatttttccaactaaacaaaacttgtgaacagaaagcggtgagctgtaagtgacacacacatacatgttcaggaagagagaaaattacacagtgcacatcgacgatgctctcacagatactgttaccgaaagatacaacttgcggctgtgccgcggaaaaagttcaattgaaatgattcgtaaattgaaagcgaagcggaagataagtgcgataagctcatcttatcaacgaaatcagaaggcagagacacttctcaatgcaagcgaccttgagtcgaagtcggggaaggggtggcgcctgcttgatattctgtgggcccccgtgtggtgtcgcaatatcgataggttagcccagagagttctgatttatcagatacgactgtcactgaatctccctgtttaaatagacagcgcaaacaatggctttcgtttgtattttggctcggattcgagtacaaggtgtcgtatacgtaatatctcagtgtttaccatcgactcacgcgcattttggctgcattgtgcaaacataaataataaataaattgtgacgttaataacaaatatatatgtccatacaagcatcgctgtgcagtcaacggtatggtcatgcgtagttaattttgacggcattaagccaattaaaagcgttcactgccaccataaatcttgggctattgtaatggcctcacttgaacctatttaaatttattgaaattctaaaaaatccgataatactggaaattttgaacaacgctatagggccaagaactggaacttgtcgagctcagcgatgggaacacgatagctggggtcgctcacaagcagtccgtcgatcaactgggtagcctctggactcatgacactttccatatccttgggatacgtgggtccaccgctcatgatcgctgcatagatctcctttgaatttttacaggcactagcaaagggcattttaccgcagagcatataaaacagagtaacacccagcgaccaggagtccacctgataatcgtatcccgacattgcgatcatctcgggtgccatgtagcatggagtgccgcaacggacgtacaacttgctgccacgatagtaagtggccaagtcaaagttcgccactttgaccattttaaagttccacttgccggatgaagagcaaaccagcagattctccggcttgatgtcccgatgaatcacctgaagttggtgcatatgcgccagtgccgataccgtgcatctcatcaccgatctggcatctgcctccgacaagataccgcgcttctgaattactttctgcatgttacagtccaggtgctctaaaaccgtgtacatatagcgctcatcctcaaccgtgtacatcagctcgatgatgtttggatgcgactgaagctgtcgcagcacctctgcctccatataggtatctccgcggtcgttgctttgagtctgcttgttcaccatctttacggtgcacttcgtcctgttggccctggtttgcccgcgatatatcagcgtccttgtgttgtgctcaacgggctctatagtctctatgtaaagctgtatggcctcgggcaggtcgtgggacttcatggactccagggttccactgtctaaatgatgttggccccaacgtttacaagagtccaccattcgctggaagtccttgttgatgctgtacttgacacaaattatttcttcgttcttacagcagcaaatcacaatgtcggtttcgcggaaacaactcagcgatgttaaatgcgatccgtcagtccggcggaagtgcgcgattgctgatctcaaaagcacatggcgttttaaagactcggtgactccttgcagaagagccggaaagtccttgaagtgggctcgagagatgaccaaattaacgcccttgaagtgtctatctccgttccgcaggaagcacacccgcagagcttttttgtgaagtggaggacctaccctcctggagccaagagaagttgattgctctgacataacgcgctaaaacgttaaaaatcttgtaaaactaatgtagtgtaaaaaaatatacgaaagaatgctgagcttctaagaaaaatctgaaattgtgctgtgtaacctggcttagcttcccaagtttgtgaaggcgattgcttggccatctcggtttccatgcggtagaaacaggcttgtttctctcaatgctcttccgcaattccctgccctggaataatttatgatccactaaattgtgaatggcagcgactcgacgcggatgaagagcgccaaagccgttggaataattgaataatcagcgttgtcgcccagtgtgtgtgcgacccccgatacttggatgaactcgcagctgccccctgacaatccgttggcggccacttaaatcgcgtcaagtgcaaatttgtagtccatcagagtgccacatggggatcctgaggtgtaatttgttttaaaattcacgcaacggctatttctgtaatagtcaacaaatcgattcggttgactttctcaattaaccacctgttgagaaatttgtatatttattgctaaaatgatgcgaagttggacgtcaggccactggtttttatctggatcacgtttgatttatgcacagcattttgcttctcagggcatatatctcatatacataacgattttattggattatttataggcgtcagattatgaatttcagcaatgcgttttctcacaagtcttttcttctattcttttatttctatagtctatttttttcgtgcacgccctaaaagtaaactcacaaaaattcaggaaaaattttattttccttcttaaaacttttaataatgctaacatttgtcctgttctaaatattctaaattgtaatttgaaattacctccccttcgtggtaattgcatgtattctttcagcattctttctccccatcctgataactaaggaagtcggtctttgttatcctgatttttaaggataagtattgatatgtaaaatcgggatagcatacatataaaagaatgtgtagaatgcaatgggttcttgtatcggctaacttttttgatagattgtacataactctgattttttacatgtttgtattctacatgtat

SEQ ID NO: 21539 - DNA, 1380 bp, DROSOPHILA
ccaggttacacagcacaatttcagatttttcttagaagctcagcattctttcgtatatttttttacactacattagttttacaagatttttaacgttttagcgcgttatgtcagagcaatcaacttctcttggctccaggagggtaggtcctccacttcacaaaaaagctctgcgggtgtgcttcctgcggaacggagatagacacttcaagggcgttaatttggtcatctctcgagcccacttcaaggactttccggctcttctgcaaggagtcaccgagtctttaaaacgccatgtgcttttgagatcagcaatcgcgcacttccgccggactgacggatcgcatttaacatcgctgagttgtttccgcgaaaccgacattgtgatttgctgctgtaagaacgaagaaataatttgtgtcaagtacagcatcaacaaggacttccagcgaatggtggactcttgtaaacgttggggccaacatcatttagacagtggaaccctggagtccatgaagtcccacgacctgcccgaggccatacagctttacatagagactatagagcccgttgagcacaacacaaggacgctgatatatcgcgggcaaaccagggccaacaggacgaagtgcaccgtaaagatggtgaacaagcagactcaaagcaacgaccgcggagatacctatatggaggcagaggtgctgcgacagcttcagtcgcatccaaacatcatcgagctgatgtacacggttgaggatgagcgctatatgtacacggttttagagcacctggactgtaacatgcagaaagtaattcagaagcgcggtatcttgtcggaggcagatgccagatcggtgatgagatgcacggtatcggcactggcgcatatgcaccaacttcaggtgattcatcgggacatcaagccggagaatctgctggtttgctcttcatccggcaagtggaactttaaaatggtcaaagtggcgaactttgacttggccacttactatcgtggcagcaagttgtacgtccgttgcggcactccatgctacatggcacccgagatgatcgcaatgtcgggatacgattatcaggtggactcctggtcgctgggtgttactctgttttatatgctctgcggtaaaatgccctttgctagtgcctgtaaaaattcaaaggagatctatgcagcgatcatgagcggtggacccacgtatcccaaggatatggaaagtgtcatgagtccagaggctacccagttgatcgacggactgcttgtgagcgaccccagctatcgtgttcccatcgctgagctcgacaagttccagttcttggccctatagcgttgttcaaaatttccagtattatcggattttttag

SEQ ID NO: 21540 - protein, 411 aa, DROSOPHILA
MSEQSTSLGSRRVGPPLHKKALRVCFLRNGDRHFKGVNLVISRAHFKDFPALLQGVTESLKRHVLLRSAIAHFRRTDGSHLTSLSCFRETDIVICCCKNEEIICVKYSINKDFQRMVDSCKRWGQHHLDSGTLESMKSHDLPEAIQLYIETIEPVEHNTRTLIYRGQTRANRTKCTVKMVNKQTQSNDRGDTYMEAEVLRQLQSHPNIIELMYTVEDERYMYTVLEHLDCNMQKVIQKRGILSEADARSVMRCTVSALAHMHQLQVIHRDIKPENLLVCSSSGKWNFKMVKVANFDLATYYRGSKLYVRCGTPCYMAPEMIAMSGYDYQVDSWSLGVTLFYMLCGKMPFASACKNSKEIYAAIMSGGPTYPKDMESVMSPEATQLIDGLLVSDPSYRVPIAELDKFQFLAL

SEQ ID NO: 21541 - DNA, 3980 bp, DROSOPHILA
tccttcttctcctcgaagctgtcgccgtacttgtgctccttcttgtacttcttgtggtcctcgtcgtggtgacccttcttgtagtgtccgtggtgcttcttgtgacccttctttttgccgccctcgtgcttttcgcccttcttgtgctcgccgtgctcctcggcatgatgatggtgctcctttccatacttcttatgatgtccgcccttgtgctcatcatcgtagaacttcttctccttgatgtactcgtcctttttgaacttcttgtggtattctaattccttgtgacccttcttgtgcttctttttgtgatgatgtttgccgcccttcttgtgagcgccgtgttcatgcttctcaccatgctcatccttctcatcgtagtgtttcttcttcttcgatcccttgtcgccgtggtggtgctcgtggtcttccacctcgtggtgcttcttctcgtcctcttcccattccttgtgctccttgtgtccgtgctcacccttgtgctcctcgtcaccgaacttcttcttctcgtacttgtcgccaccctcctcctcctcggatgatgaggcctccttcttcttggctgccgcgtaagtcagcaggagtcccaggaccagcagcaacttaaaatgaccatgcatctcgcatagttttctcgttcaaatggcaccagttgcaatcgcatttatataccacgccgttgaccacaaaatggtcaaaatgactgggcctggcatcatgatgcaagcaattggggctgacgtaaaaactttctgctccattggtccctttaccgcagtcaaacgtactttttacctcgcagcgagtgacggattggcctccaaaattgggagctgcttttgaaatatgttgctaagcttcgcagacaagaactgaatgcctaagaggtagcttagttcttaaaatcaaaggacattaaacaattgcaattgctttcttaagaattaagtatatcaaaaccaatacgaataacatattaacatttgtattttgttatgcaaatattacattttatttctaatgtacaccggaaactttaatcgttttggtaattataaaatcctatactttacagtaaggtaacctatgatgctaaaacttaaggcctactaactagtcaaggtgggaaattactcctggtgctttgactttttctttttctttgctggtgttggctgatcctcgggctctggtgctgccgcctcctcaacggcctccacctcttcgtccttctgcttcttcttctttttcttcttcttctcggacttgacctccgcctcctcctcagcaggttcctccttcttaacaggcgtctgctgttcggactcggagtgcttgcgcttcttcttcacgttcaaggtgttgtcggcctctggttggtaggtgaacacctcgctaaaaagttaagaaataaattaaatacactgaacaatcgagagatagcctgattgtaaacccaatttcgctcagacagccaaggtttatcgtcatcttaatcggatacatgcgaaaccttttgggtatcatcactggaaatctgtttactcttatataattgacagctaaaacatacctcttggcctggtacttctcgaacttggccttggccttgccggtgccggagagtttgcgcaggttgccctcctccaggagtcgcagccgagactccagtttaaccttgtgagccgctcctagctcaaaggtagcctcttcgccaaaggcatcaacacgcgtggcaagcgacgctttggcggccagtgaacgcgacattttgcccttgttcttctggcttgcctgtcccaccaactgggcgtgatagatcaaaccgtactttggagtatccttcttggtcttcagcgcacggaagagtgctttctcggcgcccagaatttgtacagtagatgagggatgcttggccaggttaatcagcgagccagcatgggcaatcagtcgagcgccgacggtgtcgcccacgagcactgtcaaattcggagccatggccatcattctggccttcaagtagtcgtacaagtgggtgcggtaatcgttgatcgatatgatctcgtcgcacagacactgaatgttcagcacatcctcctcggagatttcggtacccatagagatctcagctgcctccttgaccttttcctccacatcttctggcagaatgtcggacagatcgcttgtggccatattatccctggtgcccaccaacttgatggtcttcacgaaggcaatgttgtcggtaataatcttgcccagctcgggaaagtgccaaccgtaccactcgcgtgcacgcatcatgtagttgttcaactccttgtccaggtcatccagcaagcactgggcctgcacaatcattgtgtcgatcttgtcgggcgagaacttaagcttgtagcgcgacaaggagtgggcaagacccagggccatggcggtcatctcacgcttgggcagaccaccaagcagactgtccgcctgctggcgaatacagcgcatcagctcctggacgccagtgttgcagacacactgtaccgacagtttgtccttgatggctgtgcccagtttggcatcggcaaccaagagcgaagactgcacgtcgtcaacgagcagcttcttgagtgtctttttcagcggcttggctaccttgccctccaccgccgccgttgcagcggccagcgcctctgtggtgtcattgaatttctcaaagtgcttcagcttcagcagcttgttggccttctccggagtctcaaactcctggtacagattgtccacctgctccagtttcttttcgtccagcagcttgaaaatcgcgtagcccgccggcgtttcgtagagcacaaacatcgcgttacgctctgctcatttagtttcaattttaattcaatttaaaaccaccgaaactctcggcagccagcagcaacttaaccttcttttccgtatgccgcgtgtaaaagaaaaatccaaaatgaagtgcaagcacgtgtgccttcggtctacggcgttgccacttggttcgcgcataacagcaccactgtaattaattcaccacgaacgtaaaagcgcggggaaaatagcgtaggagggtgtcttgcagccgcctgctacccttttgtttaccacttattttaatttgtctatttctaatcaaatcaatcaaactttaatatcaatattaaatatattagaggacttcgctaaatcattgtcacgtaactatttgtaagcttttgtgcaatttacggacaaattcttgtgctcaagagtataaaatatatatattttatatatttattaatcacgaaagtgtttacatttttacaatatattagacttataatagtctatataatagacttaaaaacaaaattctgttattactatctgaatagataactactgttgtcaagcatgattttgttagacaattgtagaagctatatacttctcatatcgatattaatgggtatgccacccgagcacgtgtgcgtgctgttatggtacagaactacttcatgcgctgggattaacagcactcattgcgcataacagcacgctgttagttttaacaggcgacagaggtgcccaaacaaactcaacatttttgcatgcgcatacacacaagcatgcatgtatgtatgtatgcgtttgtttgtatgtatgcctttctctcgccatgttacaaaaagcaagaagtttttggcaacgacaatgaatgaaaaattgaaatggcgaattgcaaatgcgaattgcgcttacctgcgtcgctgcctggccttcctttcgcgacagtggcgagcgaaatgcccccgtccgccgcactcgtagcacttatcgtccccacgaccaccgccgcctcggtcgcgtcctccgagtcctccaccaccaccgcctccaccacctccgccaccaccaccgccggacctagcatactttccggtggacaattccacacgggctcggcg

SEQ ID NO: 21542 - DNA, 1802 bp, DROSOPHILA
ggatttttcttttacacgcggcatacggaaaagaaggttaagttgctgctggctgccgagagtttcggtggttttaaattgaattaaaattgaaactaaatgagcagagcgtaacgcgatgtttgtgctctacgaaacgccggcgggctacgcgattttcaagctgctggacgaaaagaaactggagcaggtggacaatctgtaccaggagtttgagactccggagaaggccaacaagctgctgaagctgaagcactttgagaaattcaatgacaccacagaggcgctggccgctgcaacggcggcggtggagggcaaggtagccaagccgctgaaaaagacactcaagaagctgctcgttgacgacgtgcagtcttcgctcttggttgccgatgccaaactgggcacagccatcaaggacaaactgtcggtacagtgtgtctgcaacactggcgtccaggagctgatgcgctgtattcgccagcaggcggacagtctgcttggtggtctgcccaagcgtgagatgaccgccatggccctgggtcttgcccactccttgtcgcgctacaagcttaagttctcgcccgacaagatcgacacaatgattgtgcaggcccagtgcttgctggatgacctggacaaggagttgaacaactacatgatgcgtgcacgcgagtggtacggttggcactttcccgagctgggcaagattattaccgacaacattgccttcgtgaagaccatcaagttggtgggcaccagggataatatggccacaagcgatctgtccgacattctgccagaagatgtggaggaaaaggtcaaggaggcagctgagatctctatgggtaccgaaatctccgaggaggatgtgctgaacattcagtgtctgtgcgacgagatcatatcgatcaacgattaccgcacccacttgtacgactacttgaaggccagaatgatggccatggctccgaatttgacagtgctcgtgggcgacaccgtcggcgctcgactgattgcccatgctggctcgctgattaacctggccaagcatccctcatctactgtacaaattctgggcgccgagaaagcactcttccgtgcgctgaagaccaagaaggatactccaaagtacggtttgatctatcacgcccagttggtgggacaggcaagccagaagaacaagggcaaaatgtcgcgttcactggccgccaaagcgtcgcttgccacgcgtgttgatgcctttggcgaagaggctacctttgagctaggagcggctcacaaggttaaactggagtctcggctgcgactcctggaggagggcaacctgcgcaaactctccggcaccggcaaggccaaggccaagttcgagaagtaccaggccaagagcgaggtgttcacctaccaaccagaggccgacaacaccttgaacgtgaagaagaagcgcaagcactccgagtccgaacagcagacgcctgttaagaaggaggaacctgctgaggaggaggcggaggtcaagtccgagaagaagaagaaaaagaagaagaagcagaaggacgaagaggtggaggccgttgaggaggcggcagcaccagagcccgaggatcagccaacaccagcaaagaaaaagaaaaagtcaaagcaccaggagtaatttcccaccttgactagttagtaggccttaagttttagcatcataggttaccttactgtaaagtataggattttataattaccaaaacgattaaagtttccggtgtacattagaaataaaatgtaatatttgcataacaaaatacaaa

SEQ ID NO: 21543 - protein, 511 aa, DROSOPHILA
MFVLYETPAGYAIFKLLDEKKLEQVDNLYQEFETPEKANKLLKLKHFEKFNDTTEALAAATAAVEGKVAKPLKKTLKKLLVDDVQSSLLVADAKLGTAIKDKLSVQCVCNTGVQELMRCIRQQADSLLGGLPKREMTAMALGLAHSLSRYKLKFSPDKIDTMIVQAQCLLDDLDKELNNYMMRAREWYGWHFPELGKIITDNIAFVKTIKLVGTRDNMATSDLSDILPEDVEEKVKEAAEISMGTEISEEDVLNIQCLCDEIISINDYRTHLYDYLKARMMAMAPNLTVLVGDTVGARLIAHAGSLINLAKHPSSTVQILGAEKALFRALKTKKDTPKYGLIYHAQLVGQASQKNKGKMSRSLAAKASLATRVDAFGEEATFELGAAHKVKLESRLRLLEEGNLRKLSGTGKAKAKFEKYQAKSEVFTYQPEADNTLNVKKKRKHSESEQQTPVKKEEPAEEEAEVKSEKKKKKKKKQKDEEVEAVEEAAAPEPEDQPTPAKKKKKSKHQE

SEQ ID NO: 21544 - DNA, 7879 bp, DROSOPHILA
attattagattgctaataagactaagctgggatgggttaaagtggagtgcaaattaaagcaacgaactggaaattgatacctttatttaattaaaatatcaaaagcgagaaacgttttaaacttactatctggcgtgaaggggttcacatttgccgtgtcctgggtgggcagtttgcggttgtgcagtggcagagatcgcgggcgctctgacaggcggaagaggtcgtcgctgcgcctggaggcattcactgccgctgctgccgccgacagatggttgctgcactgcgtcgtcgacttctgcaggatggtctttggagtggccggtgtgctaaagagtcgcagggcccgcaccttttggcatggcggcgacatggacacgtccccgtcgccgccttctttgcctatcttactgtccagctgctgctcctcaccggaggatagcttcggccgctgctgaaggggatgctgcggactcgctccctcgggcgtgtccttgtcaaagtcatcatcggcgaagcggagcttgcgcggattgaagacctgcggcgatggcgaacgcgatctcagttcgacgcttgaatcgagtgaggtgacgctcatctcgtgctccgactggcggaatgccattgttgctgtagctgtccagctgaccacgttgaaagacgattctgttcgttatttctgatttcagaactatttgtatggaagccggcggcagtaaagtaaaggcaatagttaaaaaaaatgcaaaacaaaacacaaaacaaaatttaactggaggaatgctagtctaataatgtggccgtacccgatgcgcaataaaataccagctctgactgaaaaaatactaagtaactggaagtgcagagttaccaaacaaacaaaatactaaacatctggcaaaaataccaatttaaataatgcgcacctacttctaaactgagtgaccagacttgttcaagaccgcataaagcccgccaaattcaaatggaaaacaactaattttggcatttaatttattgattgaatatctgtattttagtgttcagcgcatttgctacataattcaaacacacatctcaagaatccatacatatgtatttttttaatacttaactatgacatcaatgtatgaataattattatgcactgttgcaatacttaattattacgaatatagaaacacatcatacagagattggagtcaaataatcaagttgttgtgttgcataaattgaaaattgtgtaaaattgacatgaaaatggtggcgatgcttcgtcctctgcacattcgagtataattccagggtaagcaaaataaaatccaaggcaaatcaatttacatagcaatcctgactagatcgttaatctgcggctgccgatacatttctatatcttaaatttccttccgtcaaatgattttccgaagcgctctcctttgttctgcgtgtgcttgtatttgttgttgtgttggaacattagaatacctaaatatgcaaactcgagttccactataaattaaaacccttaactaatatggttttggacaactaaaaaccttagatggatactgcatgaaaaagtatttgggaatctgtcttgttacacgtgaggttgtttcttttgggaatgaggattagagtccagtgcgtggagagcccatctcgccggattcatcggggggttgcagctccggccctcatcatcgcatgtcgggctccgtctgcatccgttcgctgtcgctagtcccttgaaacggatcgtgaggcggacgagtcaccacgacgcctgggcggcgatccacggcgcaccgctggcgacgccgatcgagatcgggaacgcgaccgcggcgatcccctaacccggtcatcgtcctcatcctcatagcgccgttttggcggcggcggtgaatctaccgctccactgccgttgcgctcgtggtcgctgtacctcgacgccgatccgttctcgtcccgtccgttcgagcggccggagcgacggcccaccgagccggcggagcgactgcgggatcgagttccggacttggagcgagtgcgcctgcgtcgcgatgtgctccgagatctgctgaatgagttgcttctggaaatgaaatgggataaatcgtcgtgattagctatcaggcttttcaaaaaacgtaacaatttaagctaccttatatatgtatatactaatatactaatacatttaaatatattatagtgtgctatattatttgaaacattgtaagtatcaaaactagcttttagcagattaagttttaacagcttattgaataaaacacaagacagtataatattctagaacctctcccagttttaattctgcatttcacataaagatcacatgtataatatagcttgctcaatgcttgccgcccttctttttgtagtgcttgtggccgtgcttcttggagcccttctcgccgtgctccttcttctcctcgaagctgtcgccgtacttgtgctccttcttgtacttcttgtggtcctcgtcgtggtgacccttcttgtagtgtccgtggtgcttcttgtgacccttctttttgccgccctcgtgcttttcgcccttcttgtgctcgccgtgctcctcggcatgatgatggtgctcctttccatacttcttatgatgtccgcccttgtgctcatcatcgtagaacttcttctccttgatgtactcgtcctttttgaacttcttgtggtattctaattccttgtgacccttcttgtgcttctttttgtgatgatgtttgccgcccttcttgtgagcgccgtgttcatgcttctcaccatgctcatccttctcatcgtagtgtttcttcttcttcgatcccttgtcgccgtggtggtgctcgtggtcttccacctcgtggtgcttcttctcgtcctcttcccattccttgtgctccttgtgtccgtgctcacccttgtgctcctcgtcaccgaacttcttcttctcgtacttgtcgccaccctcctcctcctcggatgatgaggcctccttcttcttggctgccgcgtaagtcagcaggagtcccaggaccagcagcaacttaaaatgaccatgcatctcgcatagttttctcgttcaaatggcaccagttgcaatcgcatttatataccacgccgttgaccacaaaatggtcaaaatgactgggcctggcatcatgatgcaagcaattggggctgacgtaaaaactttctgctccattggtccctttaccgcagtcaaacgtactttttacctcgcagcgagtgacggattggcctccaaaattgggagctgcttttgaaatatgttgctaagcttcgcagacaagaactgaatgcctaagaggtagcttagttcttaaaatcaaaggacattaaacaattgcaattgctttcttaagaattaagtatatcaaaaccaatacgaataacatattaacatttgtattttgttatgcaaatattacattttatttctaatgtacaccggaaactttaatcgttttggtaattataaaatcctatactttacagtaaggtaacctatgatgctaaaacttaaggcctactaactagtcaaggtgggaaattactcctggtgctttgactttttctttttctttgctggtgttggctgatcctcgggctctggtgctgccgcctcctcaacggcctccacctcttcgtccttctgcttcttcttctttttcttcttcttctcggacttgacctccgcctcctcctcagcaggttcctccttcttaacaggcgtctgctgttcggactcggagtgcttgcgcttcttcttcacgttcaaggtgttgtcggcctctggttggtaggtgaacacctcgctaaaaagttaagaaataaattaaatacactgaacaatcgagagatagcctgattgtaaacccaatttcgctcagacagccaaggtttatcgtcatcttaatcggatacatgcgaaaccttttgggtatcatcactggaaatctgtttactcttatataattgacagctaaaacatacctcttggcctggtacttctcgaacttggccttggccttgccggtgccggagagtttgcgcaggttgccctcctccaggagtcgcagccgagactccagtttaaccttgtgagccgctcctagctcaaaggtagcctcttcgccaaaggcatcaacacgcgtggcaagcgacgctttggcggccagtgaacgcgacattttgcccttgttcttctggcttgcctgtcccaccaactgggcgtgatagatcaaaccgtactttggagtatccttcttggtcttcagcgcacggaagagtgctttctcggcgcccagaatttgtacagtagatgagggatgcttggccaggttaatcagcgagccagcatgggcaatcagtcgagcgccgacggtgtcgcccacgagcactgtcaaattcggagccatggccatcattctggccttcaagtagtcgtacaagtgggtgcggtaatcgttgatcgatatgatctcgtcgcacagacactgaatgttcagcacatcctcctcggagatttcggtacccatagagatctcagctgcctccttgaccttttcctccacatcttctggcagaatgtcggacagatcgcttgtggccatattatccctggtgcccaccaacttgatggtcttcacgaaggcaatgttgtcggtaataatcttgcccagctcgggaaagtgccaaccgtaccactcgcgtgcacgcatcatgtagttgttcaactccttgtccaggtcatccagcaagcactgggcctgcacaatcattgtgtcgatcttgtcgggcgagaacttaagcttgtagcgcgacaaggagtgggcaagacccagggccatggcggtcatctcacgcttgggcagaccaccaagcagactgtccgcctgctggcgaatacagcgcatcagctcctggacgccagtgttgcagacacactgtaccgacagtttgtccttgatggctgtgcccagtttggcatcggcaaccaagagcgaagactgcacgtcgtcaacgagcagcttcttgagtgtctttttcagcggcttggctaccttgccctccaccgccgccgttgcagcggccagcgcctctgtggtgtcattgaatttctcaaagtgcttcagcttcagcagcttgttggccttctccggagtctcaaactcctggtacagattgtccacctgctccagtttcttttcgtccagcagcttgaaaatcgcgtagcccgccggcgtttcgtagagcacaaacatcgcgttacgctctgctcatttagtttcaattttaattcaatttaaaaccaccgaaactctcggcagccagcagcaacttaaccttcttttccgtatgccgcgtgtaaaagaaaaatccaaaatgaagtgcaagcacgtgtgccttcggtctacggcgttgccacttggttcgcgcataacagcaccactgtaattaattcaccacgaacgtaaaagcgcggggaaaatagcgtaggagggtgtcttgcagccgcctgctacccttttgtttaccacttattttaatttgtctatttctaatcaaatcaatcaaactttaatatcaatattaaatatattagaggacttcgctaaatcattgtcacgtaactatttgtaagcttttgtgcaatttacggacaaattcttgtgctcaagagtataaaatatatatattttatatatttattaatcacgaaagtgtttacatttttacaatatattagacttataatagtctatataatagacttaaaaacaaaattctgttattactatctgaatagataactactgttgtcaagcatgattttgttagacaattgtagaagctatatacttctcatatcgatattaatgggtatgccacccgagcacgtgtgcgtgctgttatggtacagaactacttcatgcgctgggattaacagcactcattgcgcataacagcacgctgttagttttaacaggcgacagaggtgcccaaacaaactcaacatttttgcatgcgcatacacacaagcatgcatgtatgtatgtatgcgtttgtttgtatgtatgcctttctctcgccatgttacaaaaagcaagaagtttttggcaacgacaatgaatgaaaaattgaaatggcgaattgcaaatgcgaattgcgcttacctgcgtcgctgcctggccttcctttcgcgacagtggcgagcgaaatgcccccgtccgccgcactcgtagcacttatcgtccccacgaccaccgccgcctcggtcgcgtcctccgagtcctccaccaccaccgcctccaccacctccgccaccaccaccgccggacctagcatactttccggtggacaattccacacgggctcggcgcccgcaaaccgtccgtccgtccaatccgcgcaccgcatccgccgcatcgcgggcactctcaaactccacgaaggcgaagcccggcggattgcgggctatccagacgctgcgcaaactgccgtacgctccaaatacatactccaggtcgttcttccgggcattgttgcccagatcgcccacgtacacctttctatcgctcggatggcgcgacatttctgtttatttcgcttttccccgggcccaaattaatgtggcagcagcgcagaaaaaaatcgatgatgggttggaatcacttgccaccgccttcctgggcactttggtcggtcaatcgcgcactggcgaacacttttagtcacttaacacggtcggcagatgcgaatttttgtgtttattttctatttaatgcagcgcaaaactcattttaccgggtagcaaacagagtgaccgtggacagaccattaaaagaaactgcggactcgctaaaaatataccaaaagttatgctcaatccgcgggtaacggtcagcaaaaggcgggagtgtctggcaacaataacttccagggccgaaaaatgaaaatctaaatatttccttttcaactcctacgaaaaaaatactcaaaattattttttcctttcaaaacattccatccgcctaaagaaagcgactataaaaccttttttagtatagtacatacaaatcatatacacacatcttattacatttttcacctttaagatattattgtactgcacaattacattttaatgtaaataatttataatacatttttttaaccagtcccctttaacttcctttatatttagccttcgtgttaaaagatagatataaattcgtaatttaaatttgttttctagtatctgttagattcagaatatatgtggagtatgttttagtatattccgtgcaacttgaggtattttttttggctggcggcggtcacacagcattaaacgtggcggcgatttatcatataagttaggttataatatcgtatgcatcaaaatcatacaattatttataagctagttttttaaggaaaaaacacttaaatttagtgaatttgcagtgcgaaatctttaaaaaaccacagacgaacacttggcacaaacggtaagaacgaaaagcgaccgaaaatcgcatttacataacaattacagtgctttaacaaaatgcctgcctagcctttcctttccaaaaaaaacgcctgaatacttgacgcagctgccattgctcggtgtgcgcgtgtgtttgtgtgtggggtaaaattggctcgattcgttcgaatcgtttcttcgccttttcggatttctcgacaaacagaggtttgtgcaattttcagcgatttttcgtgccactttcggcactctatttccacccatcaaagtggaaaatttcatatttttatacatacatacgaaaaaatgcta

SEQ ID NO: 21545 - DNA, 1756 bp, DROSOPHILA
cacggtcactctgtttgctacccggtaaaatgagttttgcgctgcattaaatagaaaataaacacaaaaattcgcatctgccgaccgtgttaagtgactaaaagtgttcgccagtgcgcgattgaccgaccaaagtgcccaggaaggcggtggcaagtgattccaacccatcatcgatttttttctgcgctgctgccacattaatttgggcccggggaaaagcgaaataaacagaaatgtcgcgccatccgagcgatagaaaggtgtacgtgggcgatctgggcaacaatgcccggaagaacgacctggagtatgtatttggagcgtacggcagtttgcgcagcgtctggatagcccgcaatccgccgggcttcgccttcgtggagtttgagagtgcccgcgatgcggcggatgcggtgcgcggattggacggacggacggtttgcgggcgccgagcccgtgtggaattgtccaccggaaagtatgctaggtccggcggtggtggtggcggaggtggtggaggcggtggtggtggaggactcggaggacgcgaccgaggcggcggtggtcgtggggacgataagtgctacgagtgcggcggacgggggcatttcgctcgccactgtcgcgaaaggaaggccaggcagcgacgcagaagcaactcattcagcagatctcggagcacatcgcgacgcaggcgcactcgctccaagtccggaactcgatcccgcagtcgctccgccggctcggtgggccgtcgctccggccgctcgaacggacgggacgagaacggatcggcgtcgaggtacagcgaccacgagcgcaacggcagtggagcggtagattcaccgccgccgccaaaacggcgctatgaggatgaggacgatgaccgggttaggggatcgccgcggtcgcgttcccgatctcgatcggcgtcgccagcggtgcgccgtggatcgccgcccaggcgtcgtggtgactcgtccgcctcacgatccgtttcaagggactagcgacagcgaacggatgcagacggagcccgacatgcgatgatgagggccggagctgcaaccccccgatgaatccggcgagatgggctctccacgcactggactctaatcctcattcccaaaagaaacaacctcacgtgtaacaagacagattcccaaatactttttcatgcagtatccatctaaggtttttagttgtccaaaaccatattagttaagggttttaatttatagtggaactcgagtttgcatatttaggtattctaatgttccaacacaacaacaaatacaagcacacgcagaacaaaggagagcgcttcggaaaatcatttgacggaaggaaatttaagatatagaaatgtatcggcagccgcagattaacgatctagtcaggattgctatgtaaattgatttgccttggattttattttgcttaccctggaattatactcgaatgtgcagaggacgaagcatcgccaccattttcatgtcaattttacacaattttcaatttatgcaacacaacaacttgattatttgactccaatctctgtatgatgtgtttctatattcgtaataattaagtattgcaacagtgcataataattattcatacattgatgtcatagttaagtattaaaaaaatacatatgtatggattcttgagatgtgtgtttgaattatgtagcaaatgcgctgaacactaaaatacagatattcaatcaataaattaaatgccaaaatta

SEQ ID NO: 21546 - protein, 258 aa, DROSOPHILA
MSRHPSDRKVYVGDLGNNARKNDLEYVFGAYGSLRSVWIARNPPGFAFVEFESARDAADAVRGLDGRTVCGRRARVELSTGKYARSGGGGGGGGGGGGGGGLGGRDRGGGGRGDDKCYECGGRGHFARHCRERKARQRRRSNSFSRSRSTSRRRRTRSKSGTRSRSRSAGSVGRRSGRSNGRDENGSASRYSDHERNGSGAVDSPPPPKRRYEDEDDDRVRGSPRSRSRSRSASPAVRRGSPPRRRGDSSASRSVSRD

SEQ ID NO: 21547 - DNA, 7223 bp, DROSOPHILA
cttctccttggtcttcttcttcttctgggccgccggcgtggcctcatccgcatccgcagcaggaacatcttcgcgggtctccgtcattgtcatcactgcaacctatcgcctctatacaccaaactcattgaccggcggggtcaattaatagttaagaaagcaagcgtgcagggcgaaactaaaaatcgaaacgcccgcagttccactggtccagtggacctccgcccccaacgaatggatatgtgtatgtacggagatggtctcgaatgggttcttggctctgggtaattaactccgtctctgacggagattgtcgtgctacgccagatgcactgccgatgaggctgatctgcctgggatcgtgtttagctttaattgttttgcattccgcgttttcacaaatacaaaatcgttggctactacagccagcttttttctttctttcttgcgatgctattgctatccggagcaaaatgttccacgtctgttccgttgggactgtagaaagcgactgacggttctggcggctatggcgtcagttttcgacaaattcggtttctattagagaagcgaacccctttatggtcttttttattaatatcaattgaattgatttttctcaaggttcacgatgactggtggaaaatcgtagaccatcttacctcttggcaaggtgtgcacccatctatcgcggaaatgggtcaactgagtactgaaatttggcgtaatttgcattccaggcagttaaacttatgatcttccctgtttaattgcgaactgttatcatttcacaacggcaaatcaagtttgcatgccattgacaatgaatacaaacaacagtcgtgtgggtgcttggcgttatagacatgccgcaaagattgcactcttatcagttagataagtttgatggtggatcttacaacttatagccctaataattatacacattgcaaacagagttacctaaaactcatctccgcccattatttataaacaagtctttaatggataaaaagttgatggagtttatttagtttttggtggcaagtgtattttggcttttggtgagatttatataaatgtttagataatattcaatgatccttttgggtcttgtgtagcttggcgtaaatgccgccctgtgaaatcaactgcatgtggttaccctgctccaccacctgaccattttgaatcacacagatcacatcggcattctggacagttgacaatcgatgggctatgacaatacaggtgcgtcccgagcaggcggtatccaaggcctgttggaccaactgttcgctttgcaagtccaaagctgaggtggcttcgtcgagtagcaggatcttgggattcctcaccagcgctctggcaatggcgattcgctgtttctgtccaccagatagctgagtacctctggctcccatccgagtatcatagccatttggtagagaaatgataaaactatgagcattggcactcttggctgctgcaataatctccaccatggaaacagatcgccgattgtcgccataggctatattttcggctatagagcgctcgaagagagtgggttcttgagagactatgcccaatttggtccttactccatcgagggtcagatcgtgttggatatcatcgtgatctatatgctgtatgaagagtggattacgtttgatatacatagcggcaatatttgtttaatggcttacaatagtgccctcatcgggatcatagtaacgctgaagtagctgaacgcaagtggattttccacacccggaatgacccaccaaggccaccgtttgacccttgagcacctcaagatccaagccattcagaatctttgcatcaggtcgtgtagggtaccggaattgaatacctcgatagcgcacaccctcgaaaagatttaattgcttggcgagagtatttttaatggtgcccatgggtgactgaatctttggcttgcgatccagtatttggaataggcgatgacccgcgatcagagcggcggagaaggccggcgtaaaggctagagattgagcgagcatcatggaaccatacagcaatgtttctgataccctacaaatattatttaaaatggttaattgcttcaagattgaattctatatggatttccatacttgataatatcttggaatggcagctgaccctcggacaccaaaacacctccgtaacaaagagccactgcatacgcgaagaaagctgatgcctgcatggtggagttgaggactcctcgccatctaagcttctggcggatgagcacctccacccgctggatctcctctgtgtactcccggataacatccgcctcccttcgcagaccggcaacagtgcgtatgttggtaatggattcggtggcaatgcgacaggcttcctcaatcacctgcttttccctcactacagcgttagacatcatcctgaaataatcgtagtcgtaagaaaaagaagtataatctctaacattttaactcacttagcttctaggattacagatcccactataatgggacaattggccaaacataaaagggccaacttccagttgtagtacatggctacgctgacacttgaaatgaagttggacaacgcttgaatcatgccactcaagggatatcctatggctccttggatatcaactgcctcgccggataagcgagcggatagagctcccaccgagttattctcgtcgtcgaaccatccaacttcctgattcaccatcgcattgaaggtcatggctcgcattctggtggtaagccaaatgcccgcgtagttaaacaaataggtctgaaggaagcaaaccaatccggtcaagaatgccaggcccaagcaggcccaggatagaacagcagtacgacgcagtgcgtcctccggatccttttcagccaaagcagcatagaattctccgaagatgaccgcgaaagctggatacaaaaatcccactgctacagcacttatagttccaagaatcaggtagcaccattcctgtttggcaagctgaaggatcctagagaaagtgcggaagaagttcggtttctccggcggagcctcagctgactgggcatttgtatccttgatgagtgcctttattataggttcctcaaactggacactgttcttttgacctttctcgaagtttaatggactcgtctcaaaggatttctcaaacagagccaggcttttttctaaaaagtattaaaaatttaattcgctttaattactttaaacaagtattaattacgtttggtgtcctcaatgctgtcctctttttctacctcatcgggcatgttgatatcgccggcacgaaccatgttgtagtatgcaccttccagcgccattaaatcatcatgggaaccttcctccagaaccttaccatcatgaataaagacaatcttatctgcacctcgaatagctgacaatcgatgagagaccacaatggttgtacgacctttactggccaagtccaaggcctgttgaacctgtttctcggattggtaatccagtgcagaggtggcttcatccagcagcaggatcttcggattctggataagggctcgagcgatggctatgcgttgtttctgacctccagagagctgggatccccgctctccaatcatactgcgataactctataaattttagatggggaattatttttttttgcttagagatcttttctatctaatcttgtatctaacctctggcagattggtaatgaattcatgtgcacccgcctgagtggcagctgcttcgatctctttttgcgtggctcctggcttaccatagctaatgttttgagctgttaaagaaatattattataagctttataattttgggtttgtatgcacatacctattgtgcccaaaaatagcactggttcctgacccacaacggcaatattcgatctcaaccattggatattgtactttcttatgtccaaatcatccaaaagaactgatccaaacacaggatcgtagaacctctgcagcaattggacacaggtggactttccacagccagaagaaccaaccaaggccactgtttgaccagctctaatcctaatgtttaggcccctgtgtacaatcacctccggacgagagggatatcgaaagaagacatcctggaactccacatcaccacgtaggccgtagttcaaaagtttaccgtctgtagataggggatcgatcttggatgtcagatcgatgaccttgaagaggttggtggcacagccgcgtgcggtggcaaaagactccaggaaaggagctgttctggctatgttgtccgcaccaacaatgataccaaagaaggcctggaaaaattgccaactataatatttttataataatattattcccttttatagcttacaatcatcagaatagccggtgtatactccttgttttccacatttcgatcatcgataataagattgacaccataccaaaatgctccggcgcatgacagatacaacatggacttcaaaaccgcatcgctgagccccgagaaggctcctttccattgacttgcctttcgagctgggaccaagaaattctcatagcgctgcacctctgatttttctccaccaaacgagaccacagtgcgtatggaactcagaatttcctctgccaaatttccagctcccgcataggattcttgttctcgggcagtcagcttgccttgaaactaaaaaagatagttataaactctaaattattcatccggtatatatatcccttttcttaccttagctacgtaataatttaataagatcaccagaggtatataagagctcacagctaaggtaagtttccagccgtagctaaatgaaatggccacagttatgataaatccaactacaaggtatacaaagtgaccaactttctctgagatgccatctcgaatcttttccacgtcgctgaaaacaagatttagatagtatcatcgctatatccttcttaaatacttactccaccatgctttgggtaaagttttgcttgctggccagatcatgccaaccgatgtcttgacgaatcacggatgaaaacagttttattcgcatccttgtgacctgacgcagcgccaccatattgaagacatccacagagaaaattcctgagatgaacatcaccacggatgcaatggtcagaagaattccatacgatatggaatcatcgtataaggcttcattgttttcctcccgagaggcatttgttctggaagtttattaaattagtaaaaaaagtatgattataaataacgtaatttaataaccctatatttttaaaattaaatcaaaaattcttttttagtacatttttcaagaagcttttatgtaatggcgtaattgataataaatcaattggtcaatgaacttacttttttattggcccaccctgcgtatgagtgatatattataaagtcatgattttccaaacagttccccttctacagttttcttatgatcatatttacttttgtgagtacttacagtgttttaccacctccgaaaagtggcagggcatgaacatttgaactggtgccaaactgcatggcgcggtccaccaacatggacgtgaactcactgtagataatgaccacggcaggaagggtcagtgccttaatgcagcacattatgaagccgaagaacagccagccaatctccccgtaggtggagaatcgaaaaagtttcaggaatgcaataggctctgtgggctccaaaccctccgccatgggcgcctcctcctgtgatttgccctcgctgctcgaggtggacacctcatctcgctccatggtgatgtttagtcggcactgacgaaatgacaattaaatgggctttattaaacaatacgccatcgatccgtggtcaatatttcttcactcaaagcggccacaagttcgaaccagaccagacaaaaggttaatttaattaagtaacactctgcgttcgcatgcaagtttgtttctttggccacatagttgtgattgacccgcgaggttaacgagtaatagaacatatattattggacacattccttcacaaattgaagagcaactatttacattcttcttctgcagtctaaaatcggttcctttgcatattttttgcggtatattcaccttttaattgccactttttgatagatccttcaattattcgcacttgcttcagataaaagttaaatattgtccgcagattgtaaccgcttgagcgcccaagcgcgactgacttcccatcttccatgagcatccatttaaatttgctgcgtacatatatcgcaccgttcgggttcaaattctaattgacctttctcttggggtaggttcgaagagacttgattgatcaaggaaagagtgtcagtgggaaatgtcgtcaaatactccgcactgtctcttatataaacaaaaaagatagattgaagtctgctttgctaagtgatggattttatttcaaggtataactataagaagtgatttcttcatctgtacaaaggacacatttgcatacattttctacattcacatgcagcggattataattacagcatacaaacttaggcacttatttatctgtacttgtaaagatacaaaatctagctggataacaatcgcatatcacatactgtgttggtttacaagtatttacactgcctacacgagatagagattcattaaaaagttattcaaagattcaaacgcttagcttatatggcaagtgccaaaacaataagtcaatttcctattaactaagatagttatatacaatgctattcgcagttccacgcgtttcgtaatatttgttcaatatttactagaattttcttgagctggtcttatgaagtaaaaagggtttgaagaaattggaattattaaattttagttaaacatttaaattgaatttaagttaaactcgatatgagactatctgatctgctgcttgaattgctaataaaaaagtgattacttgacttcgaggataaaatccttgcaataatctttctttttcaggctactaataatatcatttttagtggttctgggtggcacaatgccattgcatcttaaacctaattacgtggctcgaattccgatcaagtcttaactaatctaatccgactgataataatgtcagacgtacacctctccggtcttttgttccggcttgtgtttggccagagttgagggggccgaggatcctccgacttcgccc

SEQ ID NO: 21548 - DNA, 4111 bp, DROSOPHILA
caagcggttacaatctgcggacaatatttaacttttatctgaagcaagtgcgaataattgaaggatctatcaaaaagtggcaattaaaagtgccgactaaacatcaccatggagcgagatgaggtgtccacctcgagcagcgagggcaaatcacaggaggaggcgcccatggcggagggtttggagcccacagagcctattgcattcctgaaactttttcgattctccacctacggggagattggctggctgttcttcggcttcataatgtgctgcattaaggcactgacccttcctgccgtggtcattatctacagtgagttcacgtccatgttggtggaccgcgccatgcagtttggcaccagttcaaatgttcatgccctgccacttttcggaggtggtaaaacactaacaaatgcctctcgggaggaaaacaatgaagccttatacgatgattccatatcgtatggaattcttctgaccattgcatccgtggtgatgttcatctcaggaattttctctgtggatgtcttcaatatggtggcgctgcgtcaggtcacaaggatgcgaataaaactgttttcatccgtgattcgtcaagacatcggttggcatgatctggccagcaagcaaaactttacccaaagcatggtggacgacgtggaaaagattcgagatggcatctcagagaaagttggtcactttgtataccttgtagttggatttatcataactgtggccatttcatttagctacggctggaaacttaccttagctgtgagctcttatatacctctggtgatcttattaaattattacgtagctaagtttcaaggcaagctgactgcccgagaacaagaatcctatgcgggagctggaaatttggcagaggaaattctgagttccatacgcactgtggtctcgtttggtggagaaaaatcagaggtgcagcgctatgagaatttcttggtcccagctcgaaaggcaagtcaatggaaaggagccttctcggggctcagcgatgcggttttgaagtccatgttgtatctgtcatgcgccggagcattttggtatggtgtcaatcttattatcgatgatcgaaatgtggaaaacaaggagtatacaccggctattctgatgattgccttctttggtatcattgttggtgcggacaacatagccagaacagctcctttcctggagtcttttgccaccgcacgcggctgtgccaccaacctcttcaaggtcatcgatctgacatccaagatcgatcccctatctacagacggtaaacttttgaactacggcctacgtggtgatgtggagttccaggatgtcttctttcgatatccctctcgtccggaggtgattgtacacaggggcctaaacattaggattagagctggtcaaacagtggccttggttggttcttctggctgtggaaagtccacctgtgtccaattgctgcagaggttctacgatcctgtgtttggatcagttcttttggatgatttggacataagaaagtacaatatccaatggttgagatcgaatattgccgttgtgggtcaggaaccagtgctatttttgggcacaatagctcaaaacattagctatggtaagccaggagccacgcaaaaagagatcgaagcagctgccactcaggcgggtgcacatgaattcattaccaatctgccagagagttatcgcagtatgattggagagcggggatcccagctctctggaggtcagaaacaacgcatagccatcgctcgagcccttatccagaatccgaagatcctgctgctggatgaagccacctctgcactggattaccaatccgagaaacaggttcaacaggccttggacttggccagtaaaggtcgtacaaccattgtggtctctcatcgattgtcagctattcgaggtgcagataagattgtctttattcatgatggtaaggttctggaggaaggttcccatgatgatttaatggcgctggaaggtgcatactacaacatggttcgtgccggcgatatcaacatgcccgatgaggtagaaaaagaggacagcattgaggacaccaaacaaaaaagcctggctctgtttgagaaatcctttgagacgagtccattaaacttcgagaaaggtcaaaagaacagtgtccagtttgaggaacctataataaaggcactcatcaaggatacaaatgcccagtcagctgaggctccgccggagaaaccgaacttcttccgcactttctctaggatccttcagcttgccaaacaggaatggtgctacctgattcttggaactataagtgctgtagcagtgggatttttgtatccagctttcgcggtcatcttcggagaattctatgctgctttggctgaaaaggatccggaggacgcactgcgtcgtactgctgttctatcctgggcctgcttgggcctggcattcttgaccggattggtttgcttccttcagacctatttgtttaactacgcgggcatttggcttaccaccagaatgcgagccatgaccttcaatgcgatggtgaatcaggaagttggatggttcgacgacgagaataactcggtgggagctctatccgctcgcttatccggcgaggcagttgatatccaaggagccataggatatcccttgagtggcatgattcaagcgttgtccaacttcatttcaagtgtcagcgtagccatgtactacaactggaagttggcccttttatgtttggccaattgtcccattatagtgggatctgtaatcctagaagctaagatgatgtctaacgctgtagtgagggaaaagcaggtgattgaggaagcctgtcgcattgccaccgaatccattaccaacatacgcactgttgccggtctgcgaagggaggcggatgttatccgggagtacacagaggagatccagcgggtggaggtgctcatccgccagaagcttagatggcgaggagtcctcaactccaccatgcaggcatcagctttcttcgcgtatgcagtggctctttgttacggaggtgttttggtgtccgagggtcagctgccattccaagatattatcaaggtatcagaaacattgctgtatggttccatgatgctcgctcaatctctagcctttacgccggccttctccgccgctctgatcgcgggtcatcgcctattccaaatactggatcgcaagccaaagattcagtcacccatgggcaccattaaaaatactctcgccaagcaattaaatcttttcgagggtgtgcgctatcgaggtattcaattccggtaccctacacgacctgatgcaaagattctgaatggcttggatcttgaggtgctcaagggtcaaacggtggccttggtgggtcattccgggtgtggaaaatccacttgcgttcagctacttcagcgttactatgatcccgatgagggcactattcatatagatcacgatgatatccaacacgatctgaccctcgatggagtaaggaccaaattgggcatagtctctcaagaacccactctcttcgagcgctctatagccgaaaatatagcctatggcgacaatcggcgatctgtttccatggtggagattattgcagcagccaagagtgccaatgctcatagttttatcatttctctaccaaatggctatgatactcggatgggagccagaggtactcagctatctggtggacagaaacagcgaatcgccattgccagagcgctggtgaggaatcccaagatcctgctactcgacgaagccacctcagctttggacttgcaaagcgaacagttggtccaacaggccttggataccgcctgctcgggacgcacctgtattgtcatagcccatcgattgtcaactgtccagaatgccgatgtgatctgtgtgattcaaaatggtcaggtggtggagcagggtaaccacatgcagttgatttcacagggcggcatttacgccaagctacacaagacccaaaaggatcattgaatattatctaaacatttatataaatctcaccaaaagccaaaatacacttgccaccaaaaactaaataaactccatcaactttttatccattaaa

SEQ ID NO: 21549 - protein, 1302 aa, DROSOPHILA
MERDEVSTSSSEGKSQEEAPMAEGLEPTEPIAFLKLFRFSTYGEIGWLFFGFIMCCIKALTLPAVVIIYSEFTSMLVDRAMQFGTSSNVHALPLFGGGKTLTNASREENNEALYDDSISYGILLTIASVVMFISGIFSVDVFNMVALRQVTRMRIKLFSSVIRQDIGWHDLASKQNFTQSMVDDVEKIRDGISEKVGHFVYLVVGFIITVAISFSYGWKLTLAVSSYIPLVILLNYYVAKFQGKLTAREQESYAGAGNLAEEILSSIRTVVSFGGEKSEVQRYENFLVPARKASQWKGAFSGLSDAVLKSMLYLSCAGAFWYGVNLIIDDRNVENKEYTPAILMIAFFGIIVGADNIARTAPFLESFATARGCATNLFKVIDLTSKIDPLSTDGKLLNYGLRGDVEFQDVFFRYPSRPEVIVHRGLNIRIRAGQTVALVGSSGCGKSTCVQLLQRFYDPVFGSVLLDDLDIRKYNIQWLRSNIAVVGQEPVLFLGTIAQNISYGKPGATQKEIEAAATQAGAHEFITNLPESYRSMIGERGSQLSGGQKQRIAIARALIQNPKILLLDEATSALDYQSEKQVQQALDLASKGRTTIVVSHRLSAIRGADKIVFIHDGKVLEEGSHDDLMALEGAYYNMVRAGDINMPDEVEKEDSIEDTKQKSLALFEKSFETSPLNFEKGQKNSVQFEEPIIKALIKDTNAQSAEAPPEKPNFFRTFSRILQLAKQEWCYLILGTISAVAVGFLYPAFAVIFGEFYAALAEKDPEDALRRTAVLSWACLGLAFLTGLVCFLQTYLFNYAGIWLTTRMRAMTFNAMVNQEVGWFDDENNSVGALSARLSGEAVDIQGAIGYPLSGMIQALSNFISSVSVAMYYNWKLALLCLANCPIIVGSVILEAKMMSNAVVREKQVIEEACRIATESITNIRTVAGLRREADVIREYTEEIQRVEVLIRQKLRWRGVLNSTMQASAFFAYAVALCYGGVLVSEGQLPFQDIIKVSETLLYGSMMLAQSLAFTPAFSAALIAGHRLFQILDRKPKIQSPMGTIKNTLAKQLNLFEGVRYRGIQFRYPTRPDAKILNGLDLEVLKGQTVALVGHSGCGKSTCVQLLQRYYDPDEGTIHIDHDDIQHDLTLDGVRTKLGIVSQEPTLFERSIAENIAYGDNRRSVSMVEIIAAAKSANAHSFIISLPNGYDTRMGARGTQLSGGQKQRIAIARALVRNPKILLLDEATSALDLQSEQLVQQALDTACSGRTCIVIAHRLSTVQNADVICVIQNGQVVEQGNHMQLISQGGIYAKLHKTQKDH

SEQ ID NO: 21550 - DNA, 4588 bp, DROSOPHILA
ttcatttgaattcagtgtcatttccttatagtgtgtactcaaagcttgttaatgacatttttttgggttaccattacttttcaataacattttcagaatattatttttttattataaaaataaaaaaaacttatttgaccagtatgtttgacctatgtttgaggatttgggatcgcatcactgtcaccgaaaaaagggtgttaaggctccatctgacatgttccatattccacatgggcctccatgtgccggcagcggtgtcaatgtggtgcacattaagcttaacgccgcttaaacgcgagtaccgccaaaatgccactttaaggcgctgcctgtaatggccgccaactcagtctcattcgcgttctcattctcattcggtattcgacgggggcgccgcgtaataatgttaaatgtcaggtgcattgcagctgtccctgccgcaatcgaagtggatgtgcaagtggaagtggaaatggaaacgggagtcgaacccgacccggggtcgaagcgcaccagcaggcactaattaagttgcccgccagccgcgtaactgccataaaatatgcgcagtgggaattcgaattcggatccggagccagatcgctttgccggcccaggcccagaaccctgacttcagttgcaattggagttgaagttgcaacggcagtcgtacgtagtttatggcatcgggctaagcgaagtcgacgcgagtcaagaagttctccatttgttttcaggcttaaatttacacggggcatgcaaccagataagtggcggggtggggtggggtcctggtgtgggtctagccccatcagtcggaagcgtaggagtcgtagataaatgtcttactcaggcaggagctggccaaccactaaccggctttaggaaaatgaattaaacaaccgtgttgcttggtaaaaaaataatgttcatttatttacttacattaaagatataaattacttagactattaggaatgcaggatcgttgttacaactaattttcagcaggtgttggagtcgttactttgagctcctcaaggttattgtgtccgttgtcatctatctgggatttctgtttaaccagagggggagttttttgttttggcctcaggaagtaatcgagaccaccaaaaggcgcctcaattaccaagtgcatcacataagcaaacagcacggcaaatccaaatgtggaccagaagttgagcatctaagaaagattatggttacagtttaaggtatccactattagcccaaaatgaacacttgaacacttacaatggtgtagttcgagaaatatgaattggttctcatacttctgatattgatttcctggaagaacatgtgccacatgtagacggaataggatagtctagagagcggttgccaaagcggggaggagagaaaactattggccagtcctccgtatccattcatgcaggcgaagatcacccagcagagggccatgcaccagccgacacgagtgagcgtgtagtaggaagcctccgcaaaggtggacagatctggacccgtccacttggcgtaggggtagagggcaaagatcgaggtgaagatcatggccaggcaaaggatccatcctgaccacgcaactaccttgctaagctggaacttctttcccctgttcaagtgcagactgtagccaaagagaaatcctgtcagccaaggcgtagcatgggtatgtgtagcaaaatacaaatccttctgtgcatccattgaaaaattcctagacaaatatatatagtttgcaaactgggttaccgaaatgaaccaagatctacatacttaagcaccaaggagtacttgttcaccattatggtggcgaagagacagccggaaagtaaaacgattaggacaaaaatgcctgcagctgctttctttccccacttgtagagcgcgatcagcatgatcggcgatagaatgaacagctgcatgtccaccgacagataccaagtatgacccagacactgaagtccaaagattagatattacttatgattgagattagcacaaatcaggacctaccttttcttcggtgtagttattcacgaagagcaaagtccaataccaaccattttcgcaatccactgttcccgagtacccactgccaaatcgaggtccgtcagctacgatgggcatgagtttcaaatacatcacaatggctatcgccaaaaggggaactatgcggatcaagcgatgtaggtacatcaaaggcacgttcagtttacctttggttctgtgaatttaattcaatatcatcatagtgtgtcgaaatcaaagtaaaatagtcatcgtacctatccatcatacgcaacggaatgagagccactaatagaccgccgaggacgaaaaacgaatccacggagaaaaagccgtgcagaataaaactggcatagggtgtctcctcccactaaaaaaaaataatttatttatttttaaatgaaatttaaatttaattaagtttatattttcttaccgatatggcatggaaaatgttgatatttgaggcaagagctgccataacatattgatggcagaagacaacccacatgagcgacaggcacctaattccatgaaggcaatcaatcacatttggactagagttgacctctacaatgcgaaatagagcacgagagttgaccctggccgaaaacacctttacaatggtgggaagctggtctggaaagtttactaattgttgtgaaatttgaatcggatcgataagattttgtttattcaccctgattctttcccagacagtagtcccacaaggtaaacaaagccactaaagagcccatcaccgataagatcactctgtaatcagaagaataagccgaaagctgattaaaatatctgcgcacttacatcataaaaatggtgagtccgtcccatggtacactttcacttgtttggcaactggattcgctgatactcattaccgagctgggaatactgacgttaagcagttgtttcgtcaccatacccataaacgtgttcatataagttgccgagcaggatgccggtaggcaagtggcagttttaaaatggccgatgatcgaactctggactcccagcgcctgggcaagagacactgaaagaaaacagtactttccctggatagttctgcccaggctgactccatgattgatgttgaggcactcgtcgaagtttcccaggtcgtacatgtttcccgttagtagaccagatggtattgaaccccaggaatcgaacactggcgtaatacagataatacggccattaaatgagaacttggtttcggttcaaagttcacttacttttcagtgcccagtactggccactttgaagtccagtcgtaagcgcagtcaaatcgcttagacacagcatatcctcctgacttggcactcgggtttccagggtgctcaactcctccacatcaaaatcctttacttgaccaacaaaatcaagggcaagtcctttgagttggctgacgcgttgcaaatctgacagaacatcctcgtcattcaagcgtccggcactgatgaggccaagaccgcagaggaaaactactccgactatgttaaccatgctggcttaactcttactaatgatttctcaccgaacttggaaccccttttatatacgaattaaaatgagataagcaccgtctacgaacaccatcagtgacattagtcatttcttaacaagttcaatggaaaacgcctgataagctaatctttgcaggtaactttaatcaattcttttaaaacatagtaccaatagatacttggtaagattaagcatacgaaatctctgttatttaaatcaaccttatcgtacacgtgacaatagctttaaataaaggtaaggcacgcggattaaagagtcacatggttttcggaatttgaatcaataaagatatttattgctgattttattgagacttttcagcgagttggtcagcacttgagtcattaccttccagttctctttggttgcttaagtcaacatcatgtccatggccttcgcccactcggtctgagttcgtcatcggcttattctctgctggtgctttcttttttgggcgtaaaaggcggtcaagtccaccaataggcgcctcaattagcaagtacaggagataggaaaaaagcacagtgaatcccatggttgaccagaaattaagcatctgaaaaataataataagatcaaaataatcattatcaatatgaaaatacctgttgacttaccacttgataattcgaaaagtacgtatttgttctaacaattcgtttgtttatttcctggatgaaactgtgccatatatagatggaatatgataatttggaaataggttgccacagcggagaggagagaaaagtattggccatcccgccgtatccttgcatacaggcaaagaccacccaaccaactgccatgggccagcccacacgggtaagggtgtaataagatgacacttcgagggtggtcattagccaaggctttcccgactcaagtttcggatagagtgcgaagatcgaggtaaagagcatagccaggcaaagaatccatcccgaccagaccgctatcc

SEQ ID NO: 21551 - DNA, 1959 bp, DROSOPHILA
atggttaacatagtcggagtagttttcctctgcggtcttggcctcatcagtgccggacgcttgaatgacgaggatgttctgtcagatttgcaacgcgtcagccaactcaaaggacttgcccttgattttgttggtcaagtaaaggattttgatgtggaggagttgagcaccctggaaacccgagtgccaagtcaggaggatatgctgtgtctaagcgatttgactgcgcttacgactggacttcaaagtggccagtactgggcactgaaaatgtctcttgcccaggcgctgggagtccagagttcgatcatcggccattttaaaactgccacttgcctaccggcatcctgctcggcaacttatatgaacacgtttatgggtatggtgacgaaacaactgcttaacgtcagtattcccagctcggtaatgagtatcagcgaatccagttgccaaacaagtgaaagtgtaccatgggacggactcaccatttttatgatagtgatcttatcggtgatgggctctttagtggctttgtttaccttgtgggactactgtctgggaaagaatcaggaccagcttcccaccattgtaaaggtgttttcggccagggtcaactctcgtgctctatttcgcattgtagaggtcaactctagtccaaatgtgattgattgccttcatggaattaggtgcctgtcgctcatgtgggttgtcttctgccatcaatatgttatggcagctcttgcctcaaatatcaacattttccatgccatatcgtgggaggagacaccctatgccagttttattctgcacggctttttctccgtggattcgtttttcgtcctcggcggtctattagtggctctcattccgttgcgtatgatggatagaaccaaaggtaaactgaacgtgcctttgatgtacctacatcgcttgatccgcatagttccccttttggcgatagccattgtgatgtatttgaaactcatgcccatcgtagctgacggacctcgatttggcagtgggtactcgggaacagtggattgcgaaaatggttggtattggactttgctcttcgtgaataactacaccgaagaaaagtgtctgggtcatacttggtatctgtcggtggacatgcagctgttcattctatcgccgatcatgctgatcgcgctctacaagtggggaaagaaagcagctgcaggcatttttgtcctaatcgttttactttccggctgtctcttcgccaccataatggtgaacaagtactccttggtgcttaagaatttttcaatggatgcacagaaggatttgtattttgctacacatacccatgctacgccttggctgacaggatttctctttggctacagtctgcacttgaacaggggaaagaagttccagcttagcaaggtagttgcgtggtcaggatggatcctttgcctggccatgatcttcacctcgatctttgccctctacccctacgccaagtggacgggtccagatctgtccacctttgcggaggcttcctactacacgctcactcgtgtcggctggtgcatggccctctgctgggtgatcttcgcctgcatgaatggatacggaggactggccaatagttttctctcctccccgctttggcaaccgctctctagactatcctattccgtctacatgtggcacatgttcttccaggaaatcaatatcagaagtatgagaaccaattcatatttctcgaactacaccattatgctcaacttctggtccacatttggatttgccgtgctgtttgcttatgtgatgcacttggtaattgaggcgccttttggtggtctcgattacttcctgaggccaaaacaaaaaactccccctctggttaaacagaaatcccagatagatgacaacggacacaataaccttgaggagctcaaagtaacgactccaacacctgctgaaaattag

SEQ ID NO: 21552 - protein, 652 aa, DROSOPHILA
MVNIVGVVFLCGLGLISAGRLNDEDVLSDLQRVSQLKGLALDFVGQVKDFDVEELSTLETRVPSQEDMLCLSDLTALTTGLQSGQYWALKMSLAQALGVQSSIIGHFKTATCLPASCSATYMNTFMGMVTKQLLNVSIPSSVMSISESSCQTSESVPWDGLTIFMIVILSVMGSLVALFTLWDYCLGKNQDQLPTIVKVFSARVNSRALFRIVEVNSSPNVIDCLHGIRCLSLMWVVFCHQYVMAALASNINIFHAISWEETPYASFILHGFFSVDSFFVLGGLLVALIPLRMMDRTKGKLNVPLMYLHRLIRIVPLLAIAIVMYLKLMPIVADGPRFGSGYSGTVDCENGWYWTLLFVNNYTEEKCLGHTWYLSVDMQLFILSPIMLIALYKWGKKAAAGIFVLIVLLSGCLFATIMVNKYSLVLKNFSMDAQKDLYFATHTHATPWLTGFLFGYSLHLNRGKKFQLSKVVAWSGWILCLAMIFTSIFALYPYAKWTGPDLSTFAEASYYTLTRVGWCMALCWVIFACMNGYGGLANSFLSSPLWQPLSRLSYSVYMWHMFFQEINIRSMRTNSYFSNYTIMLNFWSTFGFAVLFAYVMHLVIEAPFGGLDYFLRPKQKTPPLVKQKSQIDDNGHNNLEELKVTTPTPAEN

SEQ ID NO: 21553 - DNA, 5337 bp, DROSOPHILA
ttgataacgttatttatcgaactatctctatgtagttgccgtatcttgtcgtatctaattaaagccattacgtaaatgtattattacacacaatattctgcactgcatagttctgaatgaacagcaaagtccagaaccatccatttaaacaatactccatgccatggtaaccgtttttgagcattggaccaccactgactacagtcatcattgtcatatagattagtatggcgattgcaacgacaggcaaaatgcgaagtatccggtgcagatacatcaaaactgggttcagtcttccaccggatctattgagagctaacatataaattccgtttttaaatgacactcgatatatacatacttttccatagaacgcagggaaatcatagataccaaaagacctcctaggacgaaaaaagagtcaactgcaaagtatccgtgtagcacaaaactggaaaatggttttacggtccactaaaatatatacattattacaaaacctatcaacgtctgtttgttatgtatccttacagtatataaatctaaccggttaaggtttggcgatgtcagaaaaaatatgaattcatggcagtagataacccagaaaagtgtcatgcagcggatgccgtggaaacactcgatcacatttggattacttttatttgggacgatgcggaaaagtgcgcgagagttggctctagccgaaaaagtcttaaccacagctggaatactccctagaatattggcattggtgttaagaacttcattgggaggtaatgcatttaaatacttactgggatcatcacacaggaagtaatcaaatatcgtaacagaaatcacaataacgcacatcaaggataggataactctgaaatcaaaatgtttaagacaacccttctgagggaaatgtaagttatcatacatggtgaaaatagtcagtccattccatggctcaatttcacttgtttggcaactcgccccactgatcctcatttttaagctagagctgtttaagtttatcaatgccatcagttgctccacaaatgtttccatttgcgtggacgagcatgaagccgggaagcaagtcgcgatccttgcactgttggccagaaggaaacaaaactttcctcgtattctcttaccaccgaccactttttcaatggaaaggcattcatcaaagttaccaagatcgaataaattgccagtcagaagtccgttgggaatagaaccccatgcatcgatcactaaaagatagcttgaaaatagtattcgtattgcaggccaattgaatttggattgacttactctttaaagcccaagtttctcttaacgagatgccattcattactgccgccaattccaccgaacataactcatcctccgcactggccaacttggagtcggatacgcccaggctctccagagtcacatttttgaagaactccgcgaattccaatcctaatggccgcaactgacttatgtattcatatgttttcgaaacatcaggatccgtaagctccaaggcacaggtggccaccagtccgtagaacaataaaacaccaactacattaaccattttaattgacttgcgattgagagcattgagggaatcgaccgtgattttatatggcaaatcagaagcgataagcgttatctgctaatatgacaaccgattagtaagtaagcgtttttggggtaacgtttatatactgcaaccaagtattatttacaacaaaatgtcaattttcgcgattaattagttagtaagaaaaacttcatgaaaataattcgataaactatacttacttaattggggtacacttttacattaacttcattaaatacttattagtatcaaacagcttatctatgttcgggttcatcaccattacgttgattcacaacaaaagttaatacaggccgtactacctctggcgactttgtacatccagttcgactccaaagtgaatgcagaccgcctataggagcctcaataataagatataaaacataggacataatcagactgatgccaaagtcagaccagaagttgagcatctgcaagataccaatataaattacgaaattaaaatgttcgaaaggtgcattacataccacagtgtaggaagaaaagtaagtgctcgttctcacattccggctgtttatctcctggacgaacatgtgccaaatgaagacggaataggacaaccttgagagtggttgccacaggggggtggagaggaaactgttagccagaccacaatagccctgaatacagacgaataccacccagcacatggccaatggccaaccaacccgagtgagagtgtagtacagagattcatccaaggtagatagcggaggagcactccacttcgcagacggataggttgcaaagatcgaggtgaagatcatcgccaggctgatgaaccaaccagaccacaggaccagccagctcagctggaactttctgccacgattcatgtgcagaaagtatccgaacaggaatccaatcagccaaggagttgcatgtgtgtgcgtggcaaggtacagctttgagttggcttcatcatcgccaccaccatttctgcaaaataacaggcgtaaataaagtgactgcatagcggtaaaaggacatacttaatactcattgagtaatgattgaccatttgggtggcaaacaggcaacctgaaagcaaaaccacaatgccaacaatggcccacgctgccttcttgccccatttgtaaaggccaaacaggagtaaaggggagaggatgtacagctgcatgtccaccgctaaataccacgactgatcaagacactaaaagatgaaattgttaggaaggaaacaagggcctagccttagtgtggagcttacaactgttttcgttgcatagttctggatgaagagcaggtcccagtaccagccattcacacactcctctttgccatgaaacccacttttgaaaaggggtccgccgctcacaaccggcattagttttacgtagatcaagattgccatggccagaacgggcaggatgcgaataatgcgatgcacatacatcctagggatatttagctttccattggtcctgaagccaatttactaattaaattaccaattaatatgattaaagatttgtactcacttttccatggttcgcagagctgtcaaggataccagtaggccaccaataaatagaaacgtatccaccgagaaatagccatgtatgaagaagcttgaggtcggtttctctagccactgtaaatgtatttaaatatttaatttaaagtgtgttgtccttgcaaatacttcatcacacacttaccgcaagcgcataggtaaaattgatatttggggatatcagggaatacatatgctcatgcagaaaaaccacccagatgagggacatgcacctaattccatgaaggcaatcaatgacattcgaattggaattgccaacctcaagacggaaaagagctcgggaattcgctctagccgatataatctttatcaaggcaggtgtttgttgagttgtgcaaagaaaatagtcgtaaagtgttgagctaaccactattaaagtaagcactgacaaaataacactgtaaattacatttgtaattagaaataagttataaacatgcttcaattgtattatacttacactgtaaaaatggtgagaccatcccaaggaacaggatcgcttgtctggcaaccgtcctcatcgatgctgatattaaaactcatgcttgagttgaccttattttgatataattgcccagcaaacgtctcgatttgagttgccgaacaggaggccggaaaacaggtggcaatcttgatttgcatgccttccaaggattcgattccggtatcaagaacatctcttaggggcacagccatgaaacaatattttcctttaatcgtttggctactgctgatctcctgatttatattgaggcactcatcgaagttgcccaaatcgtaaaaggttccgtacaataggcccgagggaaaggaaccccaggaatcgagcactgaaatatttcataacattttacataaaattcgcaattaacttattgattttaacttacttttgagtgcccagtagctgccagttttcagccctgcaaataactccttcatatccaccaggcattgggtatcacttgtactagaaggtcgagtgtctatgatttcgtggttaatatcctggaatagtgactccttgaatctgcttaagcggtggtgaaccaagtgaagttcctcctttaaatggctcgcatggatgtgacccagtccgcaaagcaataaaatggctattccgttgaccatgttaattcgattgtgtttgattgcttttggcccggtctcaaatgcttatataccacatctctcttggcgtaatcttccgataagcgttatcaacgggtatcccaatgtttgtcgattgtaggaaaaccctgactgtactcatgggaacatccctcaaaatacgccatcgtttatttacagaaagccatacctcattttctgtctaagtggtaatgttttggggttccccgaaggcttgcccacttcgtaagtacattttgtcccaataaaaaattaattaaactaagcatttaatttaattatttaaatttcatgcatatattttatagcttttgatttatgaaaggttggttttaggaatgctaatatgacatctccaagctttaaagaatattttcttcccttttagccaagttgtctcactttctctacccattcgagccgtcccttattttttgttcgcagcttgagctcgacgtaaacctattaaatattttttcccaataattttcaaagcattagctcatcatcaatttgctgctttgtgaaattggcagcaatcacgttatgctcacccagccacgcccccaacaaacacacacatcgaagcggggaaagaggaaaaatagggaaaagcaaatacacatactgtgcatacacatacacacacacacacaccgcacctatacttaagcacatttgcttaattttcgaaatgagttcgcatgacttacaaccacacaccaccccgcatctatcatccagtatcctttatggccgtctcttctttcgcctttgacgctgggtctgagtcattcgtttgctttctcgttgattaaatacggaaattgtttgactttagttaggcgcatgcaattaattaaattagagcacccgaaaaatcatcgaacaagcgggacattcgatgaaaggagttcaaagtaaatttcgcacacatcgaaagcatattgcaagcatggcgtcgttctaaataaattgt

SEQ ID NO: 21554 - DNA, 2034 bp, DROSOPHILA
atggtcaacggaatagccattttattgctttgcggactgggtcacatccatgcgagccatttaaaggaggaacttcacttggttcaccaccgcttaagcagattcaaggagtcactattccaggatattaaccacgaaatcatagacactcgaccttctagtacaagtgatacccaatgcctggtggatatgaaggagttatttgcagggctgaaaactggcagctactgggcactcaaaatgctcgattcctggggttcctttccctcgggcctattgtacggaaccttttacgatttgggcaacttcgatgagtgcctcaatataaatcaggagatcagcagtagccaaacgattaaaggaaaatattgtttcatggctgtgcccctaagagatgttcttgataccggaatcgaatccttggaaggcatgcaaatcaagattgccacctgttttccggcctcctgttcggcaactcaaatcgagacgtttgctgggcaattatatcaaaataaggtcaactcaagcatgagttttaatatcagcatcgatgaggacggttgccagacaagcgatcctgttccttgggatggtctcaccatttttacagtgaccaatggaaagctaaatatccctaggatgtatgtgcatcgcattattcgcatcctgcccgttctggccatggcaatcttgatctacgtaaaactaatgccggttgtgagcggcggaccccttttcaaaagtgggtttcatggcaaagaggagtgtgtgaatggctggtactgggacctgctcttcatccagaactatgcaacgaaaacagtttgtcttgatcagtcgtggtatttagcggtggacatgcagctgtacatcctctcccctttactcctgtttggcctttacaaatggggcaagaaggcagcaaatggtggtggcgatgatgaagccaactcaaagctgtaccttgccacgcacacacatgcaactccttggctgattggattcctgttcggatactttctgcacatgaatcgtggcagaaagttccagctgagctggctggtcctgtggtctggttggttcatcagcctggcgatgatcttcacctcgatctttgcaacctatccgtctgcgaagtggagtgctcctccgctatctaccttggatgaatctctgtactacactctcactcgggttggttggccattggccatgtgctgggtggtattcgtctgtattcagggctattgtggtctggctaacagtttcctctccacccccctgtggcaaccactctcaaggttgtcctattccgtcttcatttggcacatgttcgtccaggagataaacagccggaatatgctcaacttctggtctgactttggcatcagtctgattatgtcctatgttttatatcttattattgaggctcctataggcggtctgcattcactttggagtcgaactggatgtacaaagtcgccagaggtaataacgcttatcgcttctgatttgccatataaaatcacggtcgattccctcaatgctctcaatcgcaagtcaattaaaatggttaatgtagttggtgttttattgttctacggactggtggccacctgtgccttggagcttacggatcctgatgtttcgaaaacatatgaatacataagtcagttgcggccattaggattggaattcgcggagttcttcaaaaatgtgactctggagagcctgggcgtatccgactccaagttggccagtgcggaggatgagttatgttcggtggaattggcggcagtaatgaatggcatctcgttaagagaaacttgggctttaaagatgatcgatgcatggggttctattcccaacggacttctgactggcaatttattcgatcttggtaactttgatgaatgcctttccattgaaaaagtgtgcaaggatcgcgacttgcttcccggcttcatgctcgtccacgcaaatggaaacatttgtggagcaactgatggcattgataaacttaaacagctctag

SEQ ID NO: 21555 - protein, 677 aa, DROSOPHILA
MVNGIAILLLCGLGHIHASHLKEELHLVHHRLSRFKESLFQDINHEIIDTRPSSTSDTQCLVDMKELFAGLKTGSYWALKMLDSWGSFPSGLLYGTFYDLGNFDECLNINQEISSSQTIKGKYCFMAVPLRDVLDTGIESLEGMQIKIATCFPASCSATQIETFAGQLYQNKVNSSMSFNISIDEDGCQTSDPVPWDGLTIFTVTNGKLNIPRMYVHRIIRILPVLAMAILIYVKLMPVVSGGPLFKSGFHGKEECVNGWYWDLLFIQNYATKTVCLDQSWYLAVDMQLYILSPLLLFGLYKWGKKAANGGGDDEANSKLYLATHTHATPWLIGFLFGYFLHMNRGRKFQLSWLVLWSGWFISLAMIFTSIFATYPSAKWSAPPLSTLDESLYYTLTRVGWPLAMCWVVFVCIQGYCGLANSFLSTPLWQPLSRLSYSVFIWHMFVQEINSRNMLNFWSDFGISLIMSYVLYLIIEAPIGGLHSLWSRTGCTKSPEVITLIASDLPYKITVDSLNALNRKSIKMVNVVGVLLFYGLVATCALELTDPDVSKTYEYISQLRPLGLEFAEFFKNVTLESLGVSDSKLASAEDELCSVELAAVMNGISLRETWALKMIDAWGSIPNGLLTGNLFDLGNFDECLSIEKVCKDRDLLPGFMLVHANGNICGATDGIDKLKQL

SEQ ID NO: 21556 - DNA, 7161 bp, DROSOPHILA
ctcttatttatacgctgttttctttccccttttctggttgttgaaattaaaccaaaacatttcaatcatgcgggactaatttcatattatgtaaaaatactctagaaatgagaaaaaaatttaatttgaaaacagataaattctgttatataagcgtaatgcagcaaattttcgcactttcaattagaattaattctcatgcccgaagaaaatggtccagcgttcgtatgtgggtgaaatctcacagagatacgattccattgagcaatattcctcattaaagtcggtgaaatctgaaatgaaataatttaataatatgcgagattaaagtttaataatcggacttactttttccttcatggcaaaatgctatatccaaatgacacttggatggaaattttcgtatacaacccatttcctcatccaatccgcaaatggaacttgtctcattcaccgtaccacaatttgtttccacttggcacggttttggaggaatattcgctccaagggaacatgctgtttttagaaaggacatctttacaaagtcactacttactataacttaaaaaatctcacccagacatattatgaaaatgccaactgcgttcattctggaaaactaatacctttcgctatgaaatgaaaaatagcaatgcggcaactaattaagatcggcgtgaataaaaataaacggttaggcttactatcctatcttatcacaaatttaaacaacgatgaacgaattttgccatattaaaagataagataaaacacaagcaccgtaaattgaattaaggtaccgatacatgtcacaataatttgtgatatagattgatcccacacctcaaacttttgttttgccatcctgctaaagtgaaaaagtttaagataattctttatctatatgttcatttatttaacaactattttgcttatggccaaattagattggtttttgtcccaactaacagctaagaaaaattcactgcatactttcgtgcctcattgtggtactagaaaaatgttttccaacttaattttaatgatttcttttggtctttccgtagtcttttcaagaggctttcgtctgacagcgatagagcttggaataaatgccattcttggccagaagttgggagtgagatccctgctccactatctttccggcttgaattacacaaatcacattggcattttggatggtggacaggcgatgggcgattacaatacatgttcgtcctgaacatgccgagtccaaagcttgttgaaccacctgaaaaggggatacaaatatttgatgaaaattgtagtaatttaagttatagtttcttaccctttcactttggaagtccagcgcagaggtggcttcatccagcagaaggatcttgggattccttaccatcgctcgagcaattgcaattctttgcttttgcccaccggataattgggtgcccttggaacccaaaaccgtatcatactgagcaggcagagacataatgaactcatgagcattggccattttggccgcctcaattatttgctgcatgggcacctgtcgcgaggtatctccatagccaatattatcggcgatagacttctcgaaaagtgaaggttcctgggacacaatgcccaggcgacgacgcagagtttttaggtccatgtcgtggtgaatgctctcttgatctatgagctgaaaaggaaagaaaagttaatatcaaatataatgcctaatttgatataacttctttttaaaactacttacaatcttgccctcatcgggatcatagtaccgcatcaatagctgaacgcatgtggattttcccgatcccgacgcacccaccagtgcaaccgtctgaccctgattaatatccaaattaaagttctgcagaactttaatatggggtcttgagggataggaaaagttgagaccacgatagctgactccttgctgtacgacattggttttgtaagccgttccattgccattctgttggatctcaaaggattcgggtgattggatctgtggcttgcggtcaataatctcatacatccgatttgcggaaagaagagcagcattgaaggcgggagtgaaggccagagattgggccagaataaatagaccatacagcatcgtgttggatattctgaaaaattaaatatttaacagatgatttagtcttgcttttcgcgataacccacttcataatcgtctcaaatttgattttgccatcagcacacatgtgtccaccatatgtcaaggtcactgcgtagccgaagaacataagggatttgcctagggaattgaccagtcctcgccatttcagtcgactgaggatctgatgccgatatcgctccacctccttgtcatatatctttatcagctcctcctctcgacgaagtccagctactgtccgaatttgggtaatagtttcggtggcaatgcgactggtttcctccagtacctccttctccttcaacgccgacttctccccaaatcgcgcctcgaacacaatggatgcaaccatgaagggcgaggtgctcaggcatattaatgccaattcccaggagtagggaaaggcaatcgcaatactgcagataaagttggtgaacgcctggatgatgttgctcagcggaaaaccaatggctccttgaacactggccgcatcgccggatagtcgggcagaaagggctccaatgctgttctctttgcgatcgaaccatcccatctcctggttcatgatgcatctaaaggtcttggagctgtgcaaaaataaatatgaaatatgagataaaacataccattaagtactcaccgcattcgcgtagtaagccagacaccagccagattaaagaaaaatgtctggatgtagcagaccacgccagctgcgattccaatcactagggagattatggccatggacgcactttgctcgagtacttcctcgtccgttggtttggccaatgatccatacagctccgctagaactacggaaaacaccggcatggtgactccataaagtccagcacatatggcgccaatgatgagaaaactccactcgggtcgagcccaacccaaaatgcgaaagaaggtgctgataaaatttgcggatggaactctcggatcatctatttcctgattcatagttatgttggccagaccatttaggttcttcatctgaaactctgcattcttctccagtgacacaatagagtttcgtgtgcccagttgataaggttcaacttcataagacatttttctctccttaatctcggccacttcttccagttcatttagtagctcctcggcggaatcgtcatacgaatgcacggtgaccattttgtgatagaatccctccagtttcatcaactcctcatgggtgccttgttctacggctttgccattttcaatataaacaattcgatgagcgtgtctgatggccgaaagtcgatgggacaccaccaaggttgttctacccttgcaggccttgtccagcgccgcctgtaccaacttctcggaatggtaatccaatgcggaggtggcctcatccaaaagcaggattttgggctgctgaatcagagctctggcgatggcaatacgctgacgctggcctccagaaagctgaacgcccttctcgctgatgtcggtatcataacccttaaagttgattgaattttatagtactttcttaaaaacagagtacttaagactaaccttatgtaaagctataataaaatcgtgagcattggcggctttagctgcgtcttcgacttccttttgtgtggcttctggttttccatgccggatattttctccaattgatccttgaaatagcactggttcctgacccaccacggcaatgtttgaacgcagccacttgatgttgtacttccgcacatcctcgccatccaatagaacttgcccaaaaacaggatcatagaatcgttgcaacagctgtatgcacgtggacttgccacatcctgaaggacccaccagggccacggtttgtccttcctcgacgactacattcagacctcgcagaacaatgacatcttctctggcaggatagcggaagaatacatctcgaaactcgacggcgccttttaggccatagttcaggattttcccagccttggagagtggatcaatcaaggaggtgcgatctatcacatccaatatggccgaagccgatcctcgtgccatggcgaatgtctccaaaaacggagaggttcgggatatttgattggcactcacgattatacccgatatcacaatcatcacaaccgccggtgtgtattccctctcgtcaatgggtatgctaggatcgcggtagtagagaatcaagttagctccataccagaaagatcccgctcctgtgataaacaacatggctttcatcaccgtgtcactcagtccggagaaggctcctttccattttcccgccttgagagcgggttttagtagactatcatagcgcaaggactcgcttcgttctcctccaaatgcaaccacagtcctaatggctccaattacttcttcaactacagaactggctcgcacataggaactttgctcctggcccgtcagtttaccttggtactgcaaacagattaataaatggtttaacataaacaattaaaaggaagtatttatcaagtactgttgctatattgtgcacaatatgtgtatatactatgtttatatttgtttcctcactcattcatgcgtgagaaagaaaagatacttgttctattttggatgatctattttaggataagccaaaataattgccaagttcaccagaagcttttgagcacaaatatttggttctagaaaacgtgttctctttaagattagttaaatcaaaattaaattgacttacatgggccactgctgagttgactaccaatgttaggggtatataaaagactattgccagagctaatttccatccgtagataaaggagagaactacactgattatgacatcacacatgatctccacatagtgacctaagttttcagctatgccactgcgtattttctccatgttgctaaatagaaagcggcttaataaatatgctcatatagctattcaaatccactcactcagttatgcgaacggcaaagttttgatccttggccatgtcatgccatccgatctcctgtctcaaagtggccttgaagaattcccttcgcatacggactgtgagtttcagagccaatcgattgaaggcatccacgtagtagactccggagaagagcattagtagagtattcagggtcatgagtattccgaaggatacgctgtcctttcgcagctcctgcatattctcctcgtaagaggcatttgtgctgaagaaatattaaataaataattataaatttatcaattaattaactgaattagtattaacagcttgccaaatagatttatcattgctaaagaaatcctacaacatcattacttttcggagaatttgttttacagcaacgtccttgaatgtttggcattgtttcagagacctttctgtttttgcttaaaaggtttttattgaaatcactgcaaaaaagcttttcgcggaccgtaaatcgtagaacacgtccgtttgcgttgaaagtttgcgaagaattgattcattcttttaaaatctaaatataaatgcatacacgctccaaatgaaacagtcattatctcaatacacattttttaaattattttatgtatggactagaaaatttggcataagtaatgaaattaattaacctttggcatatagaataagtaataatttgctgttaaatgcgttaaaagagaatatatttattgcttaacctaaacttacagtatctttccgccaccgaagagggacaatccgatggtgaccgaactggttccctgacccagagttctttcgatgaacatggccaccagttcgctgtacaccacaatggcaatgggaaagacgagggattggaggaatgcagctacgaaacccgacaggagcacaagataatcccatccagcgatataacgaaagagctctgtgtagctaaccatgggctgggccttctccttggtcttcttcttcttctgggccgccggcgtggcctcatccgcatccgcagcaggaacatcttcgcgggtctccgtcattgtcatcactgcaacctatcgcctctatacaccaaactcattgaccggcggggtcaattaatagttaagaaagcaagcgtgcagggcgaaactaaaaatcgaaacgcccgcagttccactggtccagtggacctccgcccccaacgaatggatatgtgtatgtacggagatggtctcgaatgggttcttggctctgggtaattaactccgtctctgacggagattgtcgtgctacgccagatgcactgccgatgaggctgatctgcctgggatcgtgtttagctttaattgttttgcattccgcgttttcacaaatacaaaatcgttggctactacagccagcttttttctttctttcttgcgatgctattgctatccggagcaaaatgttccacgtctgttccgttgggactgtagaaagcgactgacggttctggcggctatggcgtcagttttcgacaaattcggtttctattagagaagcgaacccctttatggtcttttttattaatatcaattgaattgatttttctcaaggttcacgatgactggtggaaaatcgtagaccatcttacctcttggcaaggtgtgcacccatctatcgcggaaatgggtcaactgagtactgaaatttggcgtaatttgcattccaggcagttaaacttatgatcttccctgtttaattgcgaactgttatcatttcacaacggcaaatcaagtttgcatgccattgacaatgaatacaaacaacagtcgtgtgggtgcttggcgttatagacatgccgcaaagattgcactcttatcagttagataagtttgatggtggatcttacaacttatagccctaataattatacacattgcaaacagagttacctaaaactcatctccgcccattatttataaacaagtctttaatggataaaaagttgatggagtttatttagtttttggtggcaagtgtattttggcttttggtgagatttatataaatgtttagataata

SEQ ID NO: 21557 - DNA, 4035 bp, DROSOPHILA
atgacaatgacggagacccgcgaagatgttcctgctgcggatgcggatgaggccacgccggcggcccagaagaagaagaagaccaaggagaaggcccagcccatggttagctacacagagctctttcgttatatcgctggatgggattatcttgtgctcctgtcgggtttcgtagctgcattcctccaatccctcgtctttcccattgccattgtggtgtacagcgaactggtggccatgttcatcgaaagaactctgggtcagggaaccagttcggtcaccatcggattgtccctcttcggtggcggaaagatactcacaaatgcctcttacgaggagaatatgcaggagctgcgaaaggacagcgtatccttcggaatactcatgaccctgaatactctactaatgctcttctccggagtctactacgtggatgccttcaatcgattggctctgaaactcacagtccgtatgcgaagggaattcttcaaggccactttgagacaggagatcggatggcatgacatggccaaggatcaaaactttgccgttcgcataactgacaacatggagaaaatacgcagtggcatagctgaaaacttaggtcactatgtggagatcatgtgtgatgtcataatcagtgtagttctctcctttatctacggatggaaattagctctggcaatagtcttttatatacccctaacattggtagtcaactcagcagtggcccattaccaaggtaaactgacgggccaggagcaaagttcctatgtgcgagccagttctgtagttgaagaagtaattggagccattaggactgtggttgcatttggaggagaacgaagcgagtccttgcgctatgatagtctactaaaacccgctctcaaggcgggaaaatggaaaggagccttctccggactgagtgacacggtgatgaaagccatgttgtttatcacaggagcgggatctttctggtatggagctaacttgattctctactaccgcgatcctagcatacccattgacgagagggaatacacaccggcggttgtgatgattgtgatatcgggtataatcgtgagtgccaatcaaatatcccgaacctctccgtttttggagacattcgccatggcacgaggatcggcttcggccatattggatgtgatagatcgcacctccttgattgatccactctccaaggctgggaaaatcctgaactatggcctaaaaggcgccgtcgagtttcgagatgtattcttccgctatcctgccagagaagatgtcattgttctgcgaggtctgaatgtagtcgtcgaggaaggacaaaccgtggccctggtgggtccttcaggatgtggcaagtccacgtgcatacagctgttgcaacgattctatgatcctgtttttgggcaagttctattggatggcgaggatgtgcggaagtacaacatcaagtggctgcgttcaaacattgccgtggtgggtcaggaaccagtgctatttcaaggatcaattggagaaaatatccggcatggaaaaccagaagccacacaaaaggaagtcgaagacgcagctaaagccgccaatgctcacgattttattatagctttacataagggttatgataccgacatcagcgagaagggcgttcagctttctggaggccagcgtcagcgtattgccatcgccagagctctgattcagcagcccaaaatcctgcttttggatgaggccacctccgcattggattaccattccgagaagttggtacaggcggcgctggacaaggcctgcaagggtagaacaaccttggtggtgtcccatcgactttcggccatcagacacgctcatcgaattgtttatattgaaaatggcaaagccgtagaacaaggcacccatgaggagttgatgaaactggagggattctatcacaaaatggtcaccgtgcattcgtatgacgattccgccgaggagctactaaatgaactggaagaagtggccgagattaaggagagaaaaatgtcttatgaagttgaaccttatcaactgggcacacgaaactctattgtgtcactggagaagaatgcagagtttcagatgaagaacctaaatggtctggccaacataactatgaatcaggaaatagatgatccgagagttccatccgcaaattttatcagcaccttctttcgcattttgggttgggctcgacccgagtggagttttctcatcattggcgccatatgtgctggactttatggagtcaccatgccggtgttttccgtagttctagcggagctgtatggatcattggccaaaccaacggacgaggaagtactcgagcaaagtgcgtccatggccataatctccctagtgattggaatcgcagctggcgtggtctgctacatccagacatttttctttaatctggctggtgtctggcttactacgcgaatgcgctccaagacctttagatgcatcatgaaccaggagatgggatggttcgatcgcaaagagaacagcattggagccctttctgcccgactatccggcgatgcggccagtgttcaaggagccattggttttccgctgagcaacatcatccaggcgttcaccaactttatctgcagtattgcgattgcctttccctactcctgggaattggcattaatatgcctgagcacctcgcccttcatggttgcatccattgtgttcgaggcgcgatttggggagaagtcggcgttgaaggagaaggaggtactggaggaaaccagtcgcattgccaccgaaactattacccaaattcggacagtagctggacttcgtcgagaggaggagctgataaagatatatgacaaggaggtggagcgatatcggcatcagatcctcagtcgactgaaatggcgaggactggtcaattccctaggcaaatcccttatgttcttcggctacgcagtgaccttgacatatggtggacacatgtgtgctgatggcaaaatcaaatttgagacgattatgaaaatatccaacacgatgctgtatggtctatttattctggcccaatctctggccttcactcccgccttcaatgctgctcttctttccgcaaatcggatgtatgagattattgaccgcaagccacagatccaatcacccgaatcctttgagatccaacagaatggcaatggaacggcttacaaaaccaatgtcgtacagcaaggagtcagctatcgtggtctcaacttttcctatccctcaagaccccatattaaagttctgcagaactttaatttggatattaatcagggtcagacggttgcactggtgggtgcgtcgggatcgggaaaatccacatgcgttcagctattgatgcggtactatgatcccgatgagggcaagattctcatagatcaagagagcattcaccacgacatggacctaaaaactctgcgtcgtcgcctgggcattgtgtcccaggaaccttcacttttcgagaagtctatcgccgataatattggctatggagatacctcgcgacaggtgcccatgcagcaaataattgaggcggccaaaatggccaatgctcatgagttcattatgtctctgcctgctcagtatgatacggttttgggttccaagggcacccaattatccggtgggcaaaagcaaagaattgcaattgctcgagcgatggtaaggaatcccaagatccttctgctggatgaagccacctctgcgctggacttccaaagtgaaagggtggttcaacaagctttggactcggcatgttcaggacgaacatgtattgtaatcgcccatcgcctgtccaccatccaaaatgccaatgtgatttgtgtaattcaagccggaaagatagtggagcagggatctcactcccaacttctggccaagaatggcatttattccaagctctatcgctgtcagacgaaagcctcttgaaaagactacggaaagaccaaaagaaatcattaaaattaagttggaaaacatttttctagtaccacaatgagg

SEQ ID NO: 21558 - protein, 1320 aa, DROSOPHILA
MTMTETREDVPAADADEATPAAQKKKKTKEKAQPMVSYTELFRYIAGWDYLVLLSGFVAAFLQSLVFPIAIVVYSELVAMFIERTLGQGTSSVTIGLSLFGGGKILTNASYEENMQELRKDSVSFGILMTLNTLLMLFSGVYYVDAFNRLALKLTVRMRREFFKATLRQEIGWHDMAKDQNFAVRITDNMEKIRSGIAENLGHYVEIMCDVIISVVLSFIYGWKLALAIVFYIPLTLVVNSAVAHYQGKLTGQEQSSYVRASSVVEEVIGAIRTVVAFGGERSESLRYDSLLKPALKAGKWKGAFSGLSDTVMKAMLFITGAGSFWYGANLILYYRDPSIPIDEREYTPAVVMIVISGIIVSANQISRTSPFLETFAMARGSASAILDVIDRTSLIDPLSKAGKILNYGLKGAVEFRDVFFRYPAREDVIVLRGLNVVVEEGQTVALVGPSGCGKSTCIQLLQRFYDPVFGQVLLDGEDVRKYNIKWLRSNIAVVGQEPVLFQGSIGENIRHGKPEATQKEVEDAAKAANAHDFIIALHKGYDTDISEKGVQLSGGQRQRIAIARALIQQPKILLLDEATSALDYHSEKLVQAALDKACKGRTTLVVSHRLSAIRHAHRIVYIENGKAVEQGTHEELMKLEGFYHKMVTVHSYDDSAEELLNELEEVAEIKERKMSYEVEPYQLGTRNSIVSLEKNAEFQMKNLNGLANITMNQEIDDPRVPSANFISTFFRILGWARPEWSFLIIGAICAGLYGVTMPVFSVVLAELYGSLAKPTDEEVLEQSASMAIISLVIGIAAGVVCYIQTFFFNLAGVWLTTRMRSKTFRCIMNQEMGWFDRKENSIGALSARLSGDAASVQGAIGFPLSNIIQAFTNFICSIAIAFPYSWELALICLSTSPFMVASIVFEARFGEKSALKEKEVLEETSRIATETITQIRTVAGLRREEELIKIYDKEVERYRHQILSRLKWRGLVNSLGKSLMFFGYAVTLTYGGHMCADGKIKFETIMKISNTMLYGLFILAQSLAFTPAFNAALLSANRMYEIIDRKPQIQSPESFEIQQNGNGTAYKTNVVQQGVSYRGLNFSYPSRPHIKVLQNFNLDINQGQTVALVGASGSGKSTCVQLLMRYYDPDEGKILIDQESIHHDMDLKTLRRRLGIVSQEPSLFEKSIADNIGYGDTSRQVPMQQIIEAAKMANAHEFIMSLPAQYDTVLGSKGTQLSGGQKQRIAIARAMVRNPKILLLDEATSALDFQSERVVQQALDSACSGRTCIVIAHRLSTIQNANVICVIQAGKIVEQGSHSQLLAKNGIYSKLYRCQTKAS

SEQ ID NO: 21559 - DNA, 4871 bp, DROSOPHILA
agcaataccgcaaacacacattttcacacccagcgtcgcatgtctgggagctatttatagactgcccctcctctacccagctccctcgcacatcgtgttcccgtttcactcgcgcaaagctcgcatgcgtgtgcttttgggggtgagagtgaaaagtggctctttaatggggacattgcatactttcgggcacaactcgacttcgttgttgttgttccagtggtgcagttccgaaaaatcaaccttccataattacttgccatttgggcagatgacttttcgttacacattaatcccggccagaatctacggaggctcaaaatgcagacaaaggaccaactttggccgagtcaattcaatttcaatttatcaaatgcttcagcaatttctctaattgaatttcgtttcatttggcatagcataatttataaaatataacatttcaatgccgtgccccgccccctcgtatggctctgctattcactcagcccagctctctaatccattgtaagggaacacacagagaccctggatgccggtatccaatcattttgagcgcattccgccttcgccggcgataagtttgcttataaatcacaactgtccgatggctgcgaggatggagcactgggcactgcaggcttttaaatcgatgagcacatcgctggattgacaataatattttaaaaataattttattatttcattcagccgggcactcatgcagacacacaagggaaaacttctggggaaatggagcaggagtcggcggagcagcagcccaatgggcggtgggattggagcccggccggatgtccatcagcttcgacggaacgatgcccggtcatgcgtgaatgtaaacgcagctcggacccactcaaggggcaataatacaaatttgagatcttcttttgctccctctatgtctttaattaaacgacaaaatgcaaaatctaattgtgtttgtctttccagtaatattcaaaagaattacaaatgtctaggtcctgggaaattgcttgtcgtactggccgatgacgtacttcagcttcctgatggccaggtccacttgctcatcgtccacctgatggtagagcacaagtctcgcaaatgcccaatcccgggcactagccttcaccacgattccggctccgtttttgtccttcactccggcttccacttcaccagcatcaacgatgctcaaccgggtggagaactcactggccgtcagtttgggttgggttatctctaccagaaggatattgctctggacagacgacacgtgtacggtaatgttgggacttttcagttcatatatagctgaaaaggaaatagatatttataggtgtgcaattatgttagacgtcatgacaccaaccgttggcaattttattggtccgctcgtgatctttgctcagaagtggtaccacttcatccaaagctaccagtccagctgctgctaacactcccacctgccgcattccgcctcccaaagctttgcgcagtcgatgggctctatacgcagaaaggtatttgttattggctaacatcaaatataaaattatattatatgtaagtagtgtcaaataattccattactaagatacagttaccaataactaaaaatggactgcagctaagcaccaatttccgtaattatatcgaagtattggagtcaccggaacccggaaaagcaaatattagccggcaagcagcgtattagacactcatgccgtcatgccgggttaaactcactccgaaatgaaggccttggagccgactaacacggatcccacgggagccgataagcccttgctgaggcagatagataccgaatcgaaatcgcggcagatgcgctccactcccacgcccaaggcggtggccgcattaaagaccctcgctccgtccatgtgtagagcgatacgggcgttcccagtgcccacgcccggctgtcggaccagagcagctagctcatccaagaaggccagaggcaccactttgccaccgcagatattgtgggtctgctccaccaccaccagcgaggtgatgggctcgtggcagtcttcgtggcgtatcctgcggcgcagatcctgcagactaaaggtgccatcctgctcgttcttcagagtggctaattggactccggccaaatgcgaggcgccacctaaacgtgattaatgaaaacgctctggagtcgttgagtcctggcggagtgtttgctcttctcaccttgttcgtacagaaagatgtgcgataaatcgccgaccagggcctccgtgccacgacgatggcagtgaaccataactggggagattatcaagggaaacattggagtattcgcttggctcgggataatcaaggattcagccacaggcttttcggtttagctctgaactcatctttaatacaactactacagccttactaattgttactgatatcaatagcacttcttactttacaaaatttagctaatgattcttatcgtttaaaaatttgcattactcctgtaaagatttaatacctagtaatttaatagatatttaactagctttaagtgtgcataatctttctaagataaggtttattatgatttgataatgaacatagtaaactgaaatgccttttcccttattttcgagttcttaaatgaaatatcttaattaagaccaggaagtactcatataaatatcactcttttattgctgcataccaaatgagcaaccctcttgaaaaattatcacaatcacaagtatgagtgcagcagttttcttttgaataaaatgcaaacttcaaattccattagaaatattaatttgagcgaaagcataaattactccagattgcgatgcccaaagcggtagctccttgcaacttcgtcctttatccttcagtttttcttttcccttgctcgacctcgactgtgtggcacacgtccacgtctaatattaaagtctataaaaattaatgttatgtttatggctgcccttagcctttacgataatgtacctgatgcatgatatgagcactgctttcttgtttctttcaccttttcgctcggcccacgcccacgcaaccagccaccttttgtgtaatctgagactggcctcgctttaaactaataaacataagcgattccccactacggaaacccactaaagcagagacggaaaatgagccgggcttatttacgactcctggcagttgccactcacttgccagtagatttcccatggtgccgctgggcacaaagaggcccgcctccttgccgaaaatggccgctgttcgcgcctccagttcgttgacggtgggatcctcgccataaacgtcatccccgaccacggcggtggccatccgggcccgcatcttgtccgtcggctggctgacggtgtccgagcgcaggtcaacaacggaatgggtggtcattttctgcaagttgattagctgggatatttgcataaggtgggctatgttgattttccatctttatggccagcagcaaatcccccatggaatcgcgaactcattcatttacattgagacacgtcagttgtactgccttaaataattgatatgggcaatggggcgataggcggttgggggcccaacaccaaatgaaaacaatcacttctggacattcgaatggaattggaatatggtgtgttgagcgattgcataatcattattttacttttaacacttgatctcccggctgaactcgttcaacctttattcaactttaatagacataattcaatttgtcaaaaaaaaaaaaaaaacacgtaagtaaacaaaaaaacatcacagaactcacttggaaacctaattgataaaaaaactaagcgaaaaaaatcacacaacgtgctccgttcagagctagcgaaaaactgaccccaacagctgctaaatggccttctttataaggcaacctccgcaatgataatactgttcccaattgagcagcgatcgatcttcttcttttttttagtataagagatatctaaattctcttttaatatttttttctctttttatacaaattttcgaagagccgaacgccatgctctttaagccctgcccacactaagattctatttcaggaacggaatgtgatctgtaatagcactctattaaaacacacaagatttctttggtacttttttattaattacatcagaaattttcactaaaattttactatgtctaacacatttttgttgttcttttctcatagttttcacactcaattcacctgtcactttttcttttcttggccaatcaatgatctctatctcaaccactcaaggtacaattgaaaaacgttacaataataaaaacaaatttaacttagctatgtactcaataatagtatgaattagtttgttaacagtagttgtttcacgttttgttttgcttccgacatgatgaagtacatgattctcgctggaactgattggactaactaataagacgatccttgaatcggataaagctacgcctgatatcgatcataatgttaggtcaacttacgaactaaacttgcaacaacttttcttgagaatgggcgtgggaagtaggggcatcattgcatacgagaaaagtgtatgcaaaagtgtatatgtaaaagtcataaaatgtatgcaaaaattataaataaatatttagaaaatagtttcaattttttgtagttatcctttcagttttagttcttgttgtttatgttttatagtcttttgaacaagtttccttctggcgcacgctggcaaaatgtcaagatttgccctatattttagtttatactttcacattcaagttgtttgcacattgcgtcttcgtttacttttggcacccactgtaagcgtacgatagtg

SEQ ID NO: 21560 - DNA, 1212 bp, DROSOPHILA
aacggagcacgttgtgtgatttttttcgcttagtttttttatcaattaggtttccaaaaaatgaccacccattccgttgttgacctgcgctcggacaccgtcagccagccgacggacaagatgcgggcccggatggccaccgccgtggtcggggatgacgtttatggcgaggatcccaccgtcaacgaactggaggcgcgaacagcggccattttcggcaaggaggcgggcctctttgtgcccagcggcaccatgggaaatctactggcaattatggttcactgccatcgtcgtggcacggaggccctggtcggcgatttatcgcacatctttctgtacgaacaaggtggcgcctcgcatttggccggagtccaattagccactctgaagaacgagcaggatggcacctttagtctgcaggatctgcgccgcaggatacgccacgaagactgccacgagcccatcacctcgctggtggtggtggagcagacccacaatatctgcggtggcaaagtggtgcctctggccttcttggatgagctagctgctctggtccgacagccgggcgtgggcactgggaacgcccgtatcgctctacacatggacggagcgagggtctttaatgcggccaccgccttgggcgtgggagtggagcgcatctgccgcgatttcgattcggtatctatctgcctcagcaagggcttatcggctcccgtgggatccgtgttagtcggctccaaggccttcatttcggaagcccatcgactgcgcaaagctttgggaggcggaatgcggcaggtgggagtgttagcagcagctggactggtagctttggatgaagtggtaccacttctgagcaaagatcacgagcggaccaataaaattgccaacgctatatatgaactgaaaagtcccaacattaccgtacacgtgtcgtctgtccagagcaatatccttctggtagagataacccaacccaaactgacggccagtgagttctccacccggttgagcatcgttgatgctggtgaagtggaagccggagtgaaggacaaaaacggagccggaatcgtggtgaaggctagtgcccgggattgggcatttgcgagacttgtgctctaccatcaggtggacgatgagcaagtggacctggccatcaggaagctgaagtacgtcatcggccagtacgacaagcaatttcccaggacctag

SEQ ID NO: 21561 - protein, 383 aa, DROSOPHILA
MTTHSVVDLRSDTVSQPTDKMRARMATAVVGDDVYGEDPTVNELEARTAAIFGKEAGLFVPSGTMGNLLAIMVHCHRRGTEALVGDLSHIFLYEQGGASHLAGVQLATLKNEQDGTFSLQDLRRRIRHEDCHEPITSLVVVEQTHNICGGKVVPLAFLDELAALVRQPGVGTGNARIALHMDGARVFNAATALGVGVERICRDFDSVSICLSKGLSAPVGSVLVGSKAFISEAHRLRKALGGGMRQVGVLAAAGLVALDEVVPLLSKDHERTNKIANAIYELKSPNITVHVSSVQSNILLVEITQPKLTASEFSTRLSIVDAGEVEAGVKDKNGAGIVVKASARDWAFARLVLYHQVDDEQVDLAIRKLKYVIGQYDKQFPRT

SEQ ID NO: 21562 - DNA, 7385 bp, DROSOPHILA
gtacttttttattaattacatcagaaattttcactaaaattttactatgtctaacacatttttgttgttcttttctcatagttttcacactcaattcacctgtcactttttcttttcttggccaatcaatgatctctatctcaaccactcaaggtacaattgaaaaacgttacaataataaaaacaaatttaacttagctatgtactcaataatagtatgaattagtttgttaacagtagttgtttcacgttttgttttgcttccgacatgatgaagtacatgattctcgctggaactgattggactaactaataagacgatccttgaatcggataaagctacgcctgatatcgatcataatgttaggtcaacttacgaactaaacttgcaacaacttttcttgagaatgggcgtgggaagtaggggcatcattgcatacgagaaaagtgtatgcaaaagtgtatatgtaaaagtcataaaatgtatgcaaaaattataaataaatatttagaaaatagtttcaattttttgtagttatcctttcagttttagttcttgttgtttatgttttatagtcttttgaacaagtttccttctggcgcacgctggcaaaatgtcaagatttgccctatattttagtttatactttcacattcaagttgtttgcacattgcgtcttcgtttacttttggcacccactgtaagcgtacgatagtgctcggtttgatttgggcgtgtgcgattgggtgggaggtactcaaatttcattgccaatcaaagcattttccagcagcgcgacaaacaatctaggtgaaagtataaacttggagtgaattcatttccgccctcggctcttggccttcttttcggtttcttttctaatttccgttttttggtatgtgcagatggagcgacagggattccttcacttaggacgttgatctttttcaaagaccgattgccaccaacattaacgctaattgttttttttttttttttgtttcagtttcaacacacaggacacgcgactaacagctaggggatttaatctaatgctctaggatgttgtgtgggctcactccggtcgcctccttatcgctacgaggagacgtccgtctcggatccgtccacgtcgcccggcggattgcgctttatgcagtcgcgtatgctttgcaggatgatgccggtccggcggtccagcgcctccaggtgcggctgccagagcaccggactgacgggatcctggctcagggattcgctcatcagctgggacagcggcttgggaccattgtggaagctatcagataaataaaatagttcatttaaatattgcttttaatcagcgttataagcttaacacctcacttttgtgtttcaacttttggaaacattacataattgattgaaatgcaattacagataaattaagcttatgaagcacttggtatttaatcgttttcaatggctaaatttaattaaagcaaatcaatcccgaaatataattggtgataggataagtacattggtttctgttggcctaaattgtattaaatagcgtacaaatttcagacgcaactatttaagccgtactgttaagtagtttactttaaataagagtagcacttgttttactagaagcaaccgcttaaagcgtaattaagctaccaaaagttttcaattgaatattatgcatattaagtagtgcaattcaatgcgagcagcatgaactatgctgttgcatgcaatatatatatatatacatatatactcactctagcagcttgacgagcgtcgacttgcgtatcaggcagcactgcagcaccggcgccaggatggagagctcgtcgtggaagggccgcccgaaaccacggccgtggtccaaatgcagggggaaagtctcgttgccgtagaccctggaatgcaaacgaaaggcgggccaaattagagtgtattcggcaatcagccagggcaggtccttcgaaggcccttcctggacgcgattggcggaggggataattgcctagcagaagtgggtggcaaggtggccgagtggcatggaaagtcaggaatgaaccaggatggccaggtgttagctgggtgccagcgatgacatcgccgtaagcccaacaaacgcttttgcataacaaacaatttagcagcagcagcgcagccaagtcacctggcacctggtctccaaagacccggcgcatcgatgatgtgtgtggcgttggtgtggcggcttacaacctggagatgttttgcaaccttttgcaggcggtctgaaaatatctttccagctgctgcatctgcatctgtggccacggcatcggcattggcggctgcttggcatgcaggtgctggcatatccctggcaaatgcaggcgcttaggcgcacacagggcgcatacgtaacgtgccaaagtcagaccgaggaaccgatgaaggcaggaagccaacaaagccatgtgtgcggaaataaaccgatcgcattagttaccatgccaaggacatagatacacactgcacacccagacgcagacatagacagacgtgtggccccctccgcttggcttagccctatttagccaataccacccatactccaatactactcacttgaatgtctcgtaatgatgacgatccatgttgccagtgagaaaatcaaagacggccatgtccataaggtcgtacagtcgccttccatcgtcgtagggcggaatatcacggacctaagtgggcatcgtgcacagaagcgagttggtggaggagagaaaatgggaaaatcaaatgcaaaattaagctgcagctcggccagcgatgtcttaattaagtcagcagctccagtcagaagcgccgccctcccgctatgaccacaataaaaacatttgcatttcaatcgagtttaaatgcaaattaaataaaagaaaccgcagcacgagcacgggccgcacttggggtatacataccagggcacaataattggcatctgtctcccattgggccttcttccttttgtggtaggaccgtcgccagggatgccgccacagctgttgggtaaaaaaaaaagcaaaggacgaccggaaatcaattcgcattcttgcaggccgacagtaaaccgcttacgcaatcgcccgagtaatatctgtcttagagaaaggcatttggttctaattgcacggcaagaaatatagttttctaatattttaaagtaacatcttcaagttctgaatgtctcatttaaatgcctaaagatatcgcactttctaaaaatgaaaagtttatgtggcttttaaacgctacttttctgtttctctatgtaacccttaaattcaattaaaagtttttcatttataaattttttttggtttttaactttaagaacacaaaatttcagtttttccacgagtgtaaaactaataattttggtttatggctgctttgcccgtctttcttgcgaattcctccaactgcaactccaaattaattttgcttaaattaaattattcgcaccgaactgaaggtgggtaataaaactttagtctcgacccctgcgtttcctctgggccaccgcaacttaccttgcgtccctgtgttgcggggtcagggggtcaacaatagcgacaacaacaacgacaacaacagaatagaaacagcaacagcgacaaggagcaggatcgggaacaggagcggcagaaacaggagcgggagcagcaaaacaacaaattatatatgaaatatatatgtatataaaagaattaaaaataagaaggggaacagagcgcacaaaaatgcatcataaaagctcggcgcgttgggcattttatgctgagtgggcgtggcatcggcagagaatgtgtaatgaccggaagcggggaccaaaataggggcgcccattttggggtcggggttttcccgccgcttttcgcggggaagaatgcagcaggcggcgcgcaaagcaaagcaaggcaaacagaaagcggaaaatgcaaacttggggaaaagcaacaaactgctacgagaaaaaatatgtgaaaaaagccaaacataaagcgaaaaacccaggtaagttaacgctgccatggtgacagcggagcggggattctcatagcgctctttagctccactgttcaccttagcttagccaaaaggtagaaaaaaaaatatgcataaatcaagcaaaattaaattttataagagcagcgggaaatgggaaacgcgcaaaaaaacatagaatgtgaggcaagcaatttgcaatttttgttagcttcgcgttaaatggacttgataagtttgtgaacgccatgcagaagagctttaagatgcaatgacttttatggaaatgatggcccaaagtcagcggacttgcatggaatgcaattatcacagtcctattttattaaccgaataataaaagaatttaatttaaaatttgactcatttggatgaaatgaaatgcccacaaagtttttgttataatttaagttcatgtaagatgtatttgaaatgtatgcagatgaagttccaggcgaaaataagataagtagaaataataaattccctgaaaaacttagttagatgctattgaagcacctgtatttaagccaatttctgtgattaaagtcaactcctctcctcaattagacagaattcatttataaatgcttgagctccactttatcccagctataatctaatcaattgtttagttatcacgattatttttcccttttctttcggtccttgcaatttagttacccgtagatcccccttaaatgaattcccaaagcatttaacaagcgtgcaaatcaaatttgcaacttaattaaaattctgttcagttacaaaaatttcctcgttgtttacaacgaaggggaaacaaaacttagccaggccggaaaaggaaagtaggaaaaacctgaatagctcaaagggagggggacaaaaaaaaggaggaagaaatagggttgtgcaagaggagaaagaaaaatgatctcttgtgcataatttacagttttgccttacgccaaatctcaagtatacacttaaccattttctacttgtaaactgtttggagagcgagccgcaaaaaaaaagggggaaataaagagaattattcctttgaggcttcggggcagggattctaaaaaaaaatatatatacgtacatatatatatatatatctccgttcaaaatagactaaaaataaaatgcctgtgctgcggcaaatctgagggatgagtccagctgagctgaaccctttttatggccacagctccccaaccgagacagtcccgaagtcctgaagtggacaggactgggctttaatttttcggtaatttgcatttaaaagctgttgccattttcccttttttttttattcgcccaccgctcgtgtttttttacgttgatggagtggactctagaatttattaacgccaacgactgagtcctgggtccctgcattttatattccattttacgctttaccagtcgctgaagaactgatacaatatttctgctcttaattcaacggccaaacgaatgaatgaattgggcatggcaatgaagtggctcgctgggttgggtgaaaggtaaacgagtccggcattcgcacaaacaaaggataaaaggcatacgaacaacaaaaattatgcaaattaaaagtgagttcttttgctttttgggccagccagccaggcagccagctattaaaaattccctctaagccttaagtaagttgtatctctaagaactgaccaacacctagccatagtccatcgtccatagtccatagtccgtagtccatagctcacctgttgcgacacccaaacaaataaacagcttacgaactaagtaaataaagtgatttgttatttggccccaacggccaggcgcacgaatgtggtaatgaaagcgggcagagcataaattgtaatctggagcagtgttaaagctggccgtgcattaatcaaaaaccacttagccgggcccgcagacatgatacccataccatgtcatcctataccatcccatcccatcccatcccatttcaatccactgtcatgcgtgctggatgctggatgaggtagctgtgcgatgtgtacgctgatacaccagcgtgtctaggatacgatacataccttgcgattgcccgactcaaagttgggcagaaaggcggcgaaggagccctccaacatgtccggattgccgcaaatggcatgcgaggtgtcacaatagtacgagcacttgccatggaagcataaattcagcgatggcgaaacaaagaacgtcttcaataaattctcctcggccagttgataaatttcggtcgtaatgttcagcgtacgaccggcaacgggcatggcacgccggaatcccaggatcctgaaaccggagaggagagcagaaaagcggttaacaaaatgccaaaataaaaaaatacaggcgggcgaaaataaggcgaaggttggtgaattgaagatatcctgtaagcaaagtacttataaatatgagctatatgtttcttaccacaaaaaaatctaaataatattaaaataaaaaacatcatcacatacaagtgaaaatctttctattccctttgttgaattgagttacatgtcgaatataccccgtatgatctatgagtaccctgtattaactgaaacatcctacgagaaataagagctctgtgggtaaacttttttttaatggtttgtgggggcgaagcaaaacgactgcgtgtgaaccggaattcgtaatcaagaacgagaaaaatatttgtgggctgttgtcagggaaacggtagggagtaatataataaggaaaataattccttgtttatttaaggaaatcaagaccaagcacaacaattgtgctaatttagcgaaatccgagtctctttagctttattttcatcaatcaaattacgatggtagcagcgtaaaaagcagacctcatatcgaatctaataaatgaagttttcatcaatcttttcgcctagtcacggttaatctctttcgatcctaaagggttcgcatgggatttatggtggttggtaatgttggtggccagactgaccagaaaatattatcgaaattatttggcaacatgaagcatgtttcattgtctgggcgccatcgtcgggcattggcagccactgaggtcaaaatgggaaaatgccgtaaatttccatcacccacacggccctactccatcacacacatgcgactccattagagggctgtcagctcgagttgccagaagttggtccgtctaatcctccggagttttggccagccaatcgacaggagagtggagccaactcgattagaggatgtgtgcggcatgtgcgtgtggttggcagccacaacaattacacaagtta

SEQ ID NO: 21563 - DNA, 877 bp, DROSOPHILA
gatcctgggattccggcgtgccatgcccgttgccggtcgtacgctgaacattacgaccgaaatttatcaactggccgaggagaatttattgaagacgttctttgtttcgccatcgctgaatttatgcttccatggcaagtgctcgtactattgtgacacctcgcatgccatttgcggcaatccggacatgttggagggctccttcgccgcctttctgcccaactttgagtcgggcaatcgcaagctgtggcggcatccctggcgacggtcctaccacaaaaggaagaaggcccaatgggagacagatgccaattattgtgccctggtccgtgatattccgccctacgacgatggaaggcgactgtacgaccttatggacatggccgtctttgattttctcactggcaacatggatcgtcatcattacgagacattcaaggtctacggcaacgagactttccccctgcatttggaccacggccgtggtttcgggcggcccttccacgacgagctctccatcctggcgccggtgctgcagtgctgcctgatacgcaagtcgacgctcgtcaagctgctagacttccacaatggtcccaagccgctgtcccagctgatgagcgaatccctgagccaggatcccgtcagtccggtgctctggcagccgcacctggaggcgctggaccgccggaccggcatcatcctgcaaagcatacgcgactgcataaagcgcaatccgccgggcgacgtggacggatccgagacggacgtctcctcgtagcgataaggaggcgaccggagtgagcccacacaacatcctagagcattagattaaatcccctagctgttagtcgcgtgtcctgtgtgttgaaactgaaac

SEQ ID NO: 21564 - protein, 251 aa, DROSOPHILA
MPVAGRTLNITTEIYQLAEENLLKTFFVSPSLNLCFHGKCSYYCDTSHAICGNPDMLEGSFAAFLPNFESGNRKLWRHPWRRSYHKRKKAQWETDANYCALVRDIPPYDDGRRLYDLMDMAVFDFLTGNMDRHHYETFKVYGNETFPLHLDHGRGFGRPFHDELSILAPVLQCCLIRKSTLVKLLDFHNGPKPLSQLMSESLSQDPVSPVLWQPHLEALDRRTGIILQSIRDCIKRNPPGDVDGSETDVSS

SEQ ID NO: 21565 - DNA, 7285 bp, DROSOPHILA
ttttttagtatacgtacggtataattttttataaattaatattgttttaatttatttatatatatatttgatttaatatacgtgaaatttctgagtcaatcaagaagcctcagaattgagattggaaatacagatctgttaggaaaggagtaattttcgtatttgttttgagccattcgcatagaaaataggtaaatcaatgttggtagttctttataaaaaatcaaacaaaacgaagttcataatgctttgtactgaaaggtaaaataaacaaaattctgtttaaagtctagaaaagtatgctaagctacgcacctagttctataaatgaagtccgcaataattttaatgtttaacgaaatactgtgagtttacaaaaattaatagtccatatgtaaatatacataaatatatttctatacccagttcacattgggtaaggcattgtcagaatttgatttcttcaaaatatttttcggcatcgtaggttcagttttacatagttttgcaattttttttttgttttttttttttattcttttgatacgagtaatgtgtaaatatgtttatctgaattatgaccaagtcatacaaagggaataatctttagagttttttaaggaacgtgttgtgatacaaatgaaatggataagttttaggttcccaaagaaatctgtgtataaaaacaaaaaattttcatcacgtctgatctagtcatcgtgcaaactatgtgtttgcaaatcttaattttgccagatatattcctcgtatctaacaaacaaatgtgttagagagacaccccatgtgttgtaagattgacatgtgaaattttaaaatgatcgtttgggtattgtttttgacttcgacacctacgaccgcgcctagtctaaggaatggtttcaaacgatgttgccgtatggatcagtttgtggttggttgtttgcttcgttgtggttatttgtttctctgcaatccgatgggctggttaatgttttgtcagctacatctcctcgatgaaaccccgcagtttgtcaatgaatgggcgacggtaggctctcgaatgtgccatctctagcttataccacttgtcgaacgactccttgggtatcacctcgctctcgtacagaacgctgaacgtgctgcagattgtttcgccggcagccatgtcgtcctcgtactcggtcataaagtgttgctgcagagcgtccacagcctcgtctatgcaagcaatctccagcgcctcctgggcgtcgatacacagtcgcagtagtggagtgcaacagctacggaagctctcggtgttcagctgcagcggtttagagttgccgccgcttttgatgttgttgtgggtatttgtcatcacagtcagggcgaaatcacagcacaggaatctagtgagctgcctcacaaacttgtcattgatggccacgttagtgtttatgtagtcgatggccatgtcgcaagatattgctaacaggtgtctaatccgctctacatgttccaccggcgaacgtggagttgtgggcgccttaactttggcatgtccttgattttgtccgggtccgttgtccagaaagtaaaaactgtgcgactgtacaaactcccgatacttgcgcacgtcgctccagaaaagctggcctcgatcaagcttgtaatcgttgtgccacaacttgcgtgcataggcggctccgaattcctgaacaaagtagctaacaaaggcgtacacaaaacgctcggcaaagaaaaagtcatcaagccagcgccgctgccaaacatcttttaggtccaaatggcccgagtgaatgatgggccccaggaactcgaatacatagccccagccgtttggtacatccaccagcagatcaggaaaatcgtcgccaaaccgggagtaggcttcttcaaaaatctccttctccacggcatccttgtccattagataagcaaagatattgccgcaggcttgccggtgctgacgcttcaccgtagacttgtgcaaatagtccgtgagtaaatggaacaaagtcttcgactgttgcgagccgctatgcgaacgccatatacttaggacctccggttgccattcgcgcgtgttaagagcctcctcgactagctttgtaattagcccctgacattgcttgccatcgaatgcgtcatttacttccacattgctcttgttaccgccagcaggtgcattggcagtgcccgcaaccgccgaaggctgctgatacggcaagaatttgtagttttgccctggccgtttcaacaaggatgtaggcggaggcgcatttgatgcatttacttgcgttgaactgaccggacggttgccgacattgcgccactggtagtgcgaagagttgcctagcttagcaattgaatcgtcggtggcactactgttgctaaatcgcaatttgctgggatctatgcttagggtctgattttcgtgatgctgtttgtttggcatcttctgcatgaagtagtttccgccatcgtgaccgtgctgattatgcttttggtgctggtgatgagtcgacgactgctggtgctgattcattccccctccacgaccaccaccggtgctgtgggactgatccttggagtcatcgtgctgcttgtgtcgttgaccgcgtccgccctgctgtcctgactgatgggtggctggctgatcccagttgcgtagcctcaggtcgagcacatcttgcatcataaaccgcactcgactgctgatcttaatgtggacctgttggcggtgcgatgtacctcgggaacggtttataatgtcctggatgcggcggaatatcttttcaatgcgatccctcagctggtagtgctccggcagactagattccaacaaatgacccactgtggtcagtagcttgcacatatactccagtttctcctcacatccgtgttcgagtaacgactccacgcaattaagaactcgatcgttggtcagcgactgcagcttgaaaagctcgccgatgaaacgaacagtgccccaagcacgtcgtctgaactggtattccagatcctccatttcggcgcgcagttcggcttttttagctgggtccgagcactggttaatgcgctccattgttggctgcagcttcttggactttgcgttggcatcatttacatttgattcaaattcatgctgaatgcgggtgatcaacgagctggtaaaaagagacttgttttcggccttgatctcgtggaaaagtaccttgcagaagcgggcatatgtgggtgcaaagttcggttcactaattgtcttctcgaagatcagcagcatgacctgaaataaatatgtcgataccgtgttagttttcaagaaaaatattcaaatcgtatatcaaagtatttagattaatgcttatatgtacatacatatgcatttaagccaacttacatttgtcattttagcctcattgtccatcttgatactggacatctccttaagcagcacctcaaagttatccggcgtcagtttgttgagaataccgcgcacctttttcagcactccctcgacatcgtcatcttcatcctgaccaccggccattgaaacgcggcgcagagtacctggctgccacgcattttcgcactcggatagctttatctcctccttaagagatagctgcacgcggataatgtccatgtgccgctgactggagttcgaaattccacctcctccgccacttccactgcccataccactggaaccgcccatttgctgatgttggtcgtggtgcttcttgttgggtccgtgaccacgaccacgcttcccgggcacatagtccaatgattcgttaaagctcatatgctggtattgctggatgtgctggccatggtgctgctgcggttgctgctggcgcgatacgaacagctgtgagatgcagtcgcccttctggcagggcaccataggtggcttacgtgagtctcttcgcttggcaagctcacgtaaagtttcaatgctgtagcgatagtttttgggaacctgaggaactggaatcggactgggactcttcgacttcagctcttttgttttgggggaccccggtcctgagccagttgccttatgtaccggagagctcttcgtgctacttgcgctcttctcttcagaaatttgttcgacaaccttgggagcacaatccacattatctgcactcctgctgctttgcgatgagtcgtcctccgccgccttactgatcgtcgaacttgaccatgtggagctgcatatgaaacctgtgtcgttgcgtggatcctcatgaaaatcaccgaacttgatttcggcctcagcattctcctccgttttggtcactccttcagagatcaccggaactggctcatcttcctcacaaactgagctactactgttaaggaattgaagctgttgcgtctccgcgtgcacaacggatgtgtcggggctgtccttctgcaggaacttggccacaatctcttcgttggctaaatgcttctccgacttctctccggtaatgttcgacatgctgtcgtctttgatgtcagctgaaaaaaaaaatgtttttatttgactatcgttatcgttttataagataaattcttaggaaattcaattcctatgaaaagaattgcacagaaaataacaactagaagagctgtatgtataaagataggacgctcccatgctttgtcgtaactaattttaaaagactaatttttgtaaattaaataatttgtacttacattcaggatcgctttccaccttcgcttcgatgccatcctcattattattattgttgttgttgttgtggcttgtcaattgctccttgggattgagcatagtttttttgtctcttagaatagaacttactttagtattattactagttgcactaagcgtatcagtcgtcggttgcgccgtctccttgtcatcgacagccgccgtttcttgtttggttgtgggtgctgttgccgtggttgttgtggtcagtgtgctcattgatgttgtggtcactgtggcagcattgttgctatttgtgttaatttctagcgcggcgttgccattaccattgcccttgccattgttgttctgcccttgagtgcttgtagtgcttgttatcgaggatttctgttttttcttctccagctccctggcccgtttttgggcctgccgttgtttcttggacgagttggtagtggttgttatgttcgcggtgccggcaagcagggtaacagcggccgagattcgtgaagcagtcggtggtaatgctggagttgatacttttcctggaatctgctttccatgctgcagattgttaacaggctgctgtttaagcttactagatgcgtgggtcggtgttgaggctgtcgacgaagaggcacccgaactggtcgtagtcgaggtggcggcttgaatactcgacttcctgttgggtgaacccgttgttggcttaaccgacgcagctacagctgtggtaactatcgacttggtcgacttctgctgggcgacacgcgaaggtggcgggggtgtcgaggggccagctggtgttaccatcgactggcctctggacaggatggagacgcctgggcaaccgctggctgctgcctcagctacgtcattcgctatggatgctggcgtagctgtacctgtgagcaaacaatttagtcgacgttaatggattaattgtcacggaacatactttgtttgttggccaatttgggacgttgctttttggcttgctcttggaaaagcactggctgctggcacgtatcggttgtatcgggcaagtccgactgtactagcggcaggctattgtgggtctccgtgacattgtccactgcaagaggaatcattagactttgacacttgaagcccggctaacttcaattcaacatttcaacgatattgagatgcttcccttcgtttacaaatacaattctaaagaaaatttggacgtttttatgaactcaccgtcactatattgccagaagcttagatggtcttctgcgttgcccgagtgggctagtatgtcttttacaattacgctgatctgatctttatccgttgatttgggtggaggcgatgggtgtacgtcctgaccgacagcgtctttgcagtacaccgcttctggcaccttttccaaggaaacggactgcttaagggaactcgccggcttcacagtctgcatctgctgatctaccattgcgccagacaataacgatgaccccgagccagagtccatcagagtgggcgcctggtacaggcacaaggtactattgtcatccagagctgtgtccagatctgtgtgctgtgttagtgtcgagtttgagtccttttttataaaaaccgatcttttccatccatccatcacattctccatggtgtcaggatggatgatgggaatggcgtatttgcgcttgcataccttatcgctgttggcccccagttgcggtgctgttgttactgacggagttggaagcgaggtggttgaaaaaccactggccaccgcgggaactccagtcacacttgggacactaggtaaggtggtggcgctgttgctctgcaagtgcggagcaaatgtgtgcagcccgcctggtggttggggtggcggcgcctgcattccagccggagccaaaataggggtcgtcatcccggcgggcggtcccaatgccaaactgggaatgccaaagttgtgcggcagatgatgaaaagcagcagctccgttcagtgcaccgctgcgcgagttcatcattggagccacatttgtcggagcgggacgttgggcatttcctggggccatggtatatgcggtaaagtagttggtatgttgggcggtgggagtagatctttgccctccgcgcatattgccgcgatgtgtattggcaccactaaccacgttgtttccagcagagttttgagcgttcggcccaagttggtagtaagctagtgtcggcgtttgagcagctcccggtgccccgcctggaccttgttgttgagcagtgggaggaagctgtttctgttgtggaggaggtggcgcagccgcatagaatgaagctccagccgctccgttagtgggaaaggtcacagctggctgcatgcccatcagaggtccggtctgattaattggtatataggtggcggaaatgtagggtccacccgcatttccgccggcaggtgcgatcaggccagctgattgttgaaagtggggtggtagagttgggttgctcagggcacgaggcatgtttgaccccggcgccacgccatttgctccaccatggtgaccaccagtaagaggatgtcccaacgtgt

SEQ ID NO: 21566 - DNA, 5718 bp, DROSOPHILA
atgcctcgtgccctgagcaacccaactctaccaccccactttcaacaatcagctggcctgatcgcacctgccggcggaaatgcgggtggaccctacatttccgccacctatataccaattaatcagaccggacctctgatgggcatgcagccagctgtgacctttcccactaacggagcggctggagcttcattctatgcggctgcgccacctcctccacaacagaaacagcttcctcccactgctcaacaacaaggtccaggcggggcaccgggagctgctcaaacgccgacactagcttactaccaacttgggccgaacgctcaaaactctgctggaaacaacgtggttagtggtgccaatacacatcgcggcaatatgcgcggagggcaaagatctactcccaccgcccaacataccaactactttaccgcatataccatggccccaggaaatgcccaacgtcccgctccgacaaatgtggctccaatgatgaactcgcgcagcggtgcactgaacggagctgctgcttttcatcatctgccgcacaactttggcattcccagtttggcattgggaccgcccgccgggatgacgacccctattttggctccggctggaatgcaggcgccgccaccccaaccaccaggcgggctgcacacatttgctccgcacttgcagagcaacagcgccaccaccttacctagtgtcccaagtgtgactggagttcccgcggtggccagtggtttttcaaccacctcgcttccaactccgtcagtaacaacagcaccgcaactgggggccaacagcgataaggtatgcaagcgcaaatacgccattcccatcatccatcctgacaccatggagaatgtgatggatggatggaaaagatcggtttttataaaaaaggactcaaactcgacactaacacagcacacagatctggacacagctctggatgacaatagtaccttgtgcctgtaccaggcgcccactctgatggactctggctcggggtcatcgttattgtctggcgcaatggtagatcagcagatgcagactgtgaagccggcgagttcccttaagcagtccgtttccttggaaaaggtgccagaagcggtgtactgcaaagacgctgtcggtcaggacgtacacccatcgcctccacccaaatcaacggataaagatcagatcagcgtaattgtaaaagacatactagcccactcgggcaacgcagaagaccatctaagcttctggcaatatagtgacgtggacaatgtcacggagacccacaatagcctgccgctagtacagtcggacttgcccgatacaaccgatacgtgccagcagccagtgcttttccaagagcaagccaaaaagcaacgtcccaaattggccaacaaacaaagtacagctacgccagcatccatagcgaatgacgtagctgaggcagcagccagcggttgcccaggcgtctccatcctgtccagaggccagtcgatggtaacaccagctggcccctcgacacccccgccaccttcgcgtgtcgcccagcagaagtcgaccaagtcgatagttaccacagctgtagctgcgtcggttaagccaacaacgggttcacccaacaggaagtcgagtattcaagccgccacctcgactacgaccagttcgggtgcctcttcgtcgacagcctcaacaccgacccacgcatctagtaagcttaaacagcagcctgttaacaatctgcagcatggaaagcagattccaggaaaagtatcaactccagcattaccaccgactgcttcacgaatctcggccgctgttaccctgcttgccggcaccgcgaacataacaaccactaccaactcgtccaagaaacaacggcaggcccaaaaacgggccagggagctggagaagaaaaaacagaaatcctcgataacaagcactacaagcactcaagggcagaacaacaatggcaagggcaatggtaatggcaacgccgcgctagaaattaacacaaatagcaacaatgctgccacagtgaccacaacatcaatgagcacactgaccacaacaaccacggcaacagcacccacaaccaaacaagaaacggcggctgtcgatgacaaggagacggcgcaaccgacgactgatacgcttagtgcaactagtaataatactaaagtaagttctattctaagagacaaaaaaactatgctcaatcccaaggagcaattgacaagccacaacaacaacaacaataataataatgaggatggcatcgaagcgaaggtggaaagcgatcctgaatctgacatcaaagacgacagcatgtcgaacattaccggagagaagtcggagaagcatttagccaacgaagagattgtggccaagttcctgcagaaggacagccccgacacatccgttgtgcacgcggagacgcaacagcttcaattccttaacagtagtagctcagtttgtgaggaagatgagccagttccggtgatctctgaaggagtgaccaaaacggaggagaatgctgaggccgaaatcaagttcggtgattttcatgaggatccacgcaacgacacaggtttcatatgcagctccacatggtcaagttcgacgatcagtaaggcggcggaggacgactcatcgcaaagcagcaggagtgcagataatgtggattgtgctcccaaggttgtcgaacaaatttctgaagagaagagcgcaagtagcacgaagagctctccggtacataaggcaactggctcaggaccggggtcccccaaaacaaaagagctgaagtcgaagagtcccagtccgattccagttcctcaggttcccaaaaactatcgctacagcattgaaactttacgtgagcttgccaagcgaagagactcacgtaagccacctatggtgccctgccagaagggcgactgcatctcacagctgttcgtatcgcgccagcagcaaccgcagcagcaccatggccagcacatccagcaataccagcatatgagctttaacgaatcattggactatgtgcccgggaagcgtggtcgtggtcacggacccaacaagaagcaccacgaccaacatcagcaaatgggcggttccagtggtatgggcagtggaagtggcggaggaggtggaatttcgaactccagtcagcggcacatggacattatccgcgtgcagctatctcttaaggaggagataaagctatccgagtgcgaaaatgcgtggcagccaggtactctgcgccgcgtttcaatggccggtggtcaggatgaagatgacgatgtcgagggagtgctgaaaaaggtgcgcggtattctcaacaaactgacgccggataactttgaggtgctgcttaaggagatgtccagtatcaagatggacaatgaggctaaaatgacaaatgtcatgctgctgatcttcgagaagacaattagtgaaccgaactttgcacccacatatgcccgcttctgcaaggtacttttccacgagatcaaggccgaaaacaagtctctttttaccagctcgttgatcacccgcattcagcatgaatttgaatcaaatgtaaatgatgccaacgcaaagtccaagaagctgcagccaacaatggagcgcattaaccagtgctcggacccagctaaaaaagccgaactgcgcgccgaaatggaggatctggaataccagttcagacgacgtgcttggggcactgttcgtttcatcggcgagcttttcaagctgcagtcgctgaccaacgatcgagttcttaattgcgtggagtcgttactcgaacacggatgtgaggagaaactggagtatatgtgcaagctactgaccacagtgggtcatttgttggaatctagtctgccggagcactaccagctgagggatcgcattgaaaagatattccgccgcatccaggacattataaaccgttcccgaggtacatcgcaccgccaacaggtccacattaagatcagcagtcgagtgcggtttatgatgcaagatgtgctcgacctgaggctacgcaactgggatcagccagccacccatcagtcaggacagcagggcggacgcggtcaacgacacaagcagcacgatgactccaaggatcagtcccacagcaccggtggtggtcgtggagggggaatgaatcagcaccagcagtcgtcgactcatcaccagcaccaaaagcataatcagcacggtcacgatggcggaaactacttcatgcagaagatgccaaacaaacagcatcacgaaaatcagaccctaagcatagatcccagcaaattgcgatttagcaacagtagtgccaccgacgattcaattgctaagctaggcaactcttcgcactaccagtggcgcaatgtcggcaaccgtccggtcagttcaacgcaagtaaatgcatcaaatgcgcctccgcctacatccttgttgaaacggccagggcaaaactacaaattcttgccgtatcagcagccttcggcggttgcgggcactgccaatgcacctgctggcggtaacaagagcaatgtggaagtaaatgacgcattcgatggcaagcaatgtcaggggctaattacaaagctagtcgaggaggctcttaacacgcgcgaatggcaaccggaggtcctaagtatatggcgttcgcatagcggctcgcaacagtcgaagactttgttccatttactcacggactatttgcacaagtctacggtgaagcgtcagcaccggcaagcctgcggcaatatctttgcttatctaatggacaaggatgccgtggagaaggagatttttgaagaagcctactcccggtttggcgacgattttcctgatctgctggtggatgtaccaaacggctggggctatgtattcgagttcctggggcccatcattcactcgggccatttggacctaaaagatgtttggcagcggcgctggcttgatgactttttctttgccgagcgttttgtgtacgcctttgttagctactttgttcaggaattcggagccgcctatgcacgcaagttgtggcacaacgattacaagcttgatcgaggccagcttttctggagcgacgtgcgcaagtatcgggagtttgtacagtcgcacagtttttactttctggacaacggacccggacaaaatcaaggacatgccaaagttaaggcgcccacaactccacgttcgccggtggaacatgtagagcggattagacacctgttagcaatatcttgcgacatggccatcgactacataaacactaacgtggccatcaatgacaagtttgtgaggcagctcactagattcctgtgctgtgatttcgccctgactgtgatgacaaatacccacaacaacatcaaaagcggcggcaactctaaaccgctgcagctgaacaccgagagcttccgtagctgttgcactccactactgcgactgtgtatcgacgcccaggaggcgctggagattgcttgcatagacgaggctgtggacgctctgcagcaacactttatgaccgagtacgaggacgacatggctgccggcgaaacaatctgcagcacgttcagcgttctgtacgagagcgaggtgatacccaaggagtcgttcgacaagtggtataagctagagatggcacattcgagagcctaccgtcgcccattcattgacaaactgcggggtttcatcgaggagatgtag

SEQ ID NO: 21567 - protein, 1905 aa, DROSOPHILA
MPRALSNPTLPPHFQQSAGLIAPAGGNAGGPYISATYIPINQTGPLMGMQPAVTFPTNGAAGASFYAAAPPPPQQKQLPPTAQQQGPGGAPGAAQTPTLAYYQLGPNAQNSAGNNVVSGANTHRGNMRGGQRSTPTAQHTNYFTAYTMAPGNAQRPAPTNVAPMMNSRSGALNGAAAFHHLPHNFGIPSLALGPPAGMTTPILAPAGMQAPPPQPPGGLHTFAPHLQSNSATTLPSVPSVTGVPAVASGFSTTSLPTPSVTTAPQLGANSDKVCKRKYAIPIIHPDTMENVMDGWKRSVFIKKDSNSTLTQHTDLDTALDDNSTLCLYQAPTLMDSGSGSSLLSGAMVDQQMQTVKPASSLKQSVSLEKVPEAVYCKDAVGQDVHPSPPPKSTDKDQISVIVKDILAHSGNAEDHLSFWQYSDVDNVTETHNSLPLVQSDLPDTTDTCQQPVLFQEQAKKQRPKLANKQSTATPASIANDVAEAAASGCPGVSILSRGQSMVTPAGPSTPPPPSRVAQQKSTKSIVTTAVAASVKPTTGSPNRKSSIQAATSTTTSSGASSSTASTPTHASSKLKQQPVNNLQHGKQIPGKVSTPALPPTASRISAAVTLLAGTANITTTTNSSKKQRQAQKRARELEKKKQKSSITSTTSTQGQNNNGKGNGNGNAALEINTNSNNAATVTTTSMSTLTTTTTATAPTTKQETAAVDDKETAQPTTDTLSATSNNTKVSSILRDKKTMLNPKEQLTSHNNNNNNNNEDGIEAKVESDPESDIKDDSMSNITGEKSEKHLANEEIVAKFLQKDSPDTSVVHAETQQLQFLNSSSSVCEEDEPVPVISEGVTKTEENAEAEIKFGDFHEDPRNDTGFICSSTWSSSTISKAAEDDSSQSSRSADNVDCAPKVVEQISEEKSASSTKSSPVHKATGSGPGSPKTKELKSKSPSPIPVPQVPKNYRYSIETLRELAKRRDSRKPPMVPCQKGDCISQLFVSRQQQPQQHHGQHIQQYQHMSFNESLDYVPGKRGRGHGPNKKHHDQHQQMGGSSGMGSGSGGGGGISNSSQRHMDIIRVQLSLKEEIKLSECENAWQPGTLRRVSMAGGQDEDDDVEGVLKKVRGILNKLTPDNFEVLLKEMSSIKMDNEAKMTNVMLLIFEKTISEPNFAPTYARFCKVLFHEIKAENKSLFTSSLITRIQHEFESNVNDANAKSKKLQPTMERINQCSDPAKKAELRAEMEDLEYQFRRRAWGTVRFIGELFKLQSLTNDRVLNCVESLLEHGCEEKLEYMCKLLTTVGHLLESSLPEHYQLRDRIEKIFRRIQDIINRSRGTSHRQQVHIKISSRVRFMMQDVLDLRLRNWDQPATHQSGQQGGRGQRHKQHDDSKDQSHSTGGGRGGGMNQHQQSSTHHQHQKHNQHGHDGGNYFMQKMPNKQHHENQTLSIDPSKLRFSNSSATDDSIAKLGNSSHYQWRNVGNRPVSSTQVNASNAPPPTSLLKRPGQNYKFLPYQQPSAVAGTANAPAGGNKSNVEVNDAFDGKQCQGLITKLVEEALNTREWQPEVLSIWRSHSGSQQSKTLFHLLTDYLHKSTVKRQHRQACGNIFAYLMDKDAVEKEIFEEAYSRFGDDFPDLLVDVPNGWGYVFEFLGPIIHSGHLDLKDVWQRRWLDDFFFAERFVYAFVSYFVQEFGAAYARKLWHNDYKLDRGQLFWSDVRKYREFVQSHSFYFLDNGPGQNQGHAKVKAPTTPRSPVEHVERIRHLLAISCDMAIDYINTNVAINDKFVRQLTRFLCCDFALTVMTNTHNNIKSGGNSKPLQLNTESFRSCCTPLLRLCIDAQEALEIACIDEAVDALQQHFMTEYEDDMAAGETICSTFSVLYESEVIPKESFDKWYKLEMAHSRAYRRPFIDKLRGFIEEM

SEQ ID NO: 21568 - DNA, 4553 bp, DROSOPHILA
atttttatgtgacatcattattcaaatatgtattgatgataacattcgtacagcatttaaatgctaaaacggagcatcgtgctccctgtgctaataattccaattgataccatgtctagggcatcactttccgctgcctcccgcatccctgaccctatccaaaagctacttgcaaactcaattaagaagttgctgctgcagcagtcgagagtgaagggcacaagtggaggaggcggcggaaagccagccagccagtgaaagcctgcattgagccgtaaaagaagccgacgtgtaggtaaaatcaattacaatcgcagacgggtttgtgtgttgcgtgaacggaggttggagaagaggagtgggaacacgggccccaccggacggatgagtggcgtgggcgtaactgacaattgacagcaacaagttgggcgcttcaaccagatctccaggacacggcgacaatggcaggcacttgtcaacgcacggctggttaggattagccgcagacacatggctggtaacatgagtggggtggtaaaatggaaaatctcctgctgacagcttttttcaggccaatttcccgaattcacgcagacaatgcaggcaaactaatctgctcaaatcgattcaggcccataaagggcctcgaacatgaagtaaagtctgttcaacttgagaatagtttttcgtactcatgggtactcacgatgagttcttctggcacttgagcttctttccaacaatgctaaaaagtttttggccagcagctctaaaactttattgaatttccagcccctatcaaaggtatcttaagtagaaaacgaagaaaggctgaccaatgacattgtcgtaaaagtgtagaccaaaaagggcgaaagtaaacgtgtttgggggccatcaaagtggcgttgacactttagtccacccactgaaacacacacaaactatatatttcctttcaaaactagacaactggaaggcagtttgattctggatcggattacatacctgttgcagcctcggcctgtacctgatgtttcacattctcgatgatcttgtcgccgctgcccttgcgcaagctatgtccggcaatatggtcactcaggctgccaccgccagctgccaccaatcccccgggtggaaaaagctttcctggcattggaggagggggcggcggtggaggaggcggcggtgtcggagcgaccagcgacttttgctcagactgctggtagtgcgccagttgctcctcggcacgatcagcacgcgtgactgcctcgcgcagctgctcctcgagtatctccaacttaagttgtaatttttttagttcatcgttagtagttttggctatagccgcatccattagattttgctacaaatgcaagaaacaggaacaagggtagaacggggcggacgagcaggagcaggaagagattgggttgattggtggtagtgcaagaaaattagaagatctatcaaagcatatagggggcaagttagtgcatcgaaagccaggggatcgtgagtgggggaaagcggcgcacggcaagcgagttgcttacgtgtctcggctggtttttttttttggtagaggaaagaagaaaggttgacccggcaccaagaatggggaacaacaacacgcccagctggccacattccatgcatttttcagatcgtattatatatgtgcattgggggaatcgtctccaccagctgatcttgatgtgattcagttgctcttgaagatattcgagaacggcttgaaaatgtcaaacacgctgcgtgtttgctaatggattgacagatggacagaatagatagattgatagccatagatcaagtgcaaaatcaaagtgtaaccagaacttgggactaaccatttccacaatgcgctcgttgtgctctctggcctgctgctgcacctggtcctgaatctgctcgaactccacctgctcgttcagtacgctggacgacgtactggtcctggatcctggctggccatcagtaagatctcgagtcttcgcagtgagctcatcattgcgctgcttcaacttgataagagcggcttccattctatgacgaaatccatttactttacatctcagtattgttaagaatataataatgaactcacttttggctagtttccacgctctccttcatgttttcggtcaacaatttggccactttggtcaagttgctgttttccgtacgcagcgcttcattctcctcctccatggcgtgttgctaaaacgagaatgagaaaaaaaaaataattaaaacctatagtcatggactattaaaatgagtcatctattccttccatgcaaggggttgtgttttttctaacgaacacttacttatctcgaattcataagtgtaattttttttataagaatcacaatatattaataagctcgtttaacaatcccacatcatacctgctccaacagctcggccatcttttcgttggcctcgtacaactgcagctccaccgaatttgtgaaatttttgagagtcaaaaactcattggccagacgctccaccagaccgctggtaatgggcactccttccgaattggcatcaaccagactgtccagctcctgagttccgatactgtcagcactgtctgcgctgcccgactgcaggatcttgaagagctttcgcttaagttcaacagaaccgagcaccgaacggggagctattggaggtgcctgatcctgctgtttttcgcgaatatgctccagctcgctggtgagactgcaaatggagatatatcagataatacgaatttttaacctttttttctaagatttgaaacatacttgtgaatttgatcgaccttcattttgtgcagcttatctaaagcgtttcgctcgttcagagccttgttgaacttggcgcttagctccttaatttgggtctcgaagttggtctgctgctgctgcagggattccagagtagcacacatcttctcatgctgagcctgctgctcttcctgtgtggttttatctgtaaaacgtttaacgattagcttttagactgcttataataatattataaacgttaactcacgggtctcgatttccagcttaagagccttgttctcttcccggagggcaatgttatcctccagcaaggtaaacatatcgtgctctgggtcctgctcgttgtagtccggctccctgacgcgactcctactgcgtgtcttggcctcctgggtgcggaacttggccaccggaatgcgaccgcgtcgctccatagtcctgaagatttattgcctgacggaagagtaaattatagttctaattaataactgagcatagaaaaaatgagcataactttgcttacgttttgccaacgcacaagccttaaagccaaatccttaacctcttatgctaagcaatgcaaatggaacttaatgctgccatcaccaaaagatgaatgttttaggtgtgttggatgcgatttgagggtgtatgggaattgctacagatgaaagtgagtgttgcatgccgcgaatgtgaccaagcgctcctggggatggtgcccacattgaaacgacttggagttttacttttcgattttattatttgctgtttacagtttctgtttaatcttgctttaaacgccccttttcctgtctctctattttgccctgggtgccgcatgtgtgtgcttctgtcgggtattgtattctactcgctcggattctgctgttactttgctcaatcttcttcttcgactgctaaaaatgcaggacaccattttgccttgtttaaattaataccagaagttggccgaaagcatttggaatgcctgccgaaagttgctacgaaactagttaaagtgccacgcccactgctcgatttaagcttataaatggtttagcttggctttagaaatatttgcttgttagtgcagaagcgattcttttccttttgcttgttttttttttccttctgttttgtcaattcttaactattttaatttaactgtgtttttgcattgggttttcattgtttgttttttttcttttgctaattcttatgcgtacaatttcctttgcttttgccgtaattcaatttcatattttgtcacttgtagtgtaaaaataaaaaaaaacccaaagtttatacataaattctcgagtctagtacaactctttttttttttttttgctacatttgttagtttcctcgctttaaatattttatatataaatttatgagattgatttgcttttgtttttcaatttagttgtatgtttttcgttcaattttataaaaataactaattaaaggcggcttagagctctttgtttttgctttttctctcgttaccttgtgtttgcttccacgcttgattattttttttttttgtttaatttggtttaaatagctatatattgggttttatatattttcgaaattaatattactgtattttttttctttttacagctaattttaagatttatctttggataatcatgctttgtgtgctaaatactttacatgtctttacgaattttataatttacattttttttagta

SEQ ID NO: 21569 - DNA, 1453 bp, DROSOPHILA
atgtgggcaccatccccaggagcgcttggtcacattcgcggcatgcaacactcactttcatctgcaataaatcttcaggactatggagcgacgcggtcgcattccggtggccaagttccgcacccaggaggccaagacacgcagtaggagtcgcgtcagggagccggactacaacgagcaggacccagagcacgatatgtttaccttgctggaggataacattgccctccgggaagagaacaaggctcttaagctggaaatcgagacccataaaaccacacaggaagagcagcaggctcagcatgagaagatgtgtgctactctggaatccctgcagcagcagcagaccaacttcgagacccaaattaaggagctaagcgccaagttcaacaaggctctgaacgagcgaaacgctttagataagctgcacaaaatgaaggtcgatcaaattcacaatctcaccagcgagctggagcatattcgcgaaaaacagcaggatcaggcacctccaatagctccccgttcggtgctcggttctgttgaacttaagcgaaagctcttcaagatcctgcagtcgggcagcgcagacagtgctgacagtatcggaactcaggagctggacagtctggttgatgccaattcggaaggagtgcccattaccagcggtctggtggagcgtctggccaatgagtttttgactctcaaaaatttcacaaattcggtggagctgcagttgtacgaggccaacgaaaagatggccgagctgttggagcagcaacacgccatggaggaggagaatgaagcgctgcgtacggaaaacagcaacttgaccaaagtggccaaattgttgaccgaaaacatgaaggagagcgtggaaactagccaaaaaatggaagccgctcttatcaagttgaagcagcgcaatgatgagctcactgcgaagactcgagatcttactgatggccagccaggatccaggaccagtacgtcgtccagcgtactgaacgagcaggtggagttcgagcagattcaggaccaggtgcagcagcaggccagagagcacaacgagcgcattgtggaaatgcaaaatctaatggatgcggctatagccaaaactactaacgatgaactaaaaaaattacaacttaagttggagatactcgaggagcagctgcgcgaggcagtcacgcgtgctgatcgtgccgaggagcaactggcgcactaccagcagtctgagcaaaagtcgctggtcgctccgacaccgccgcctcctccaccgccgccccctcctccaatgccaggaaagctttttccacccgggggattggtggcagctggcggtggcagcctgagtgaccatattgccggacatagcttgcgcaagggcagcggcgacaagatcatcgagaatgtgaaacatcaggtacaggccgaggctgcaacaggtatgtaa

SEQ ID NO: 21570 - protein, 48 aa, DROSOPHILA
MWAPSPGALGHIRGMQHSLSSAINLQDYGATRSHSGGQVPHPGGQDTQ

SEQ ID NO: 21571 - DNA, 7762 bp, DROSOPHILA
aggctctgcgagatttcactctggcacaggcggtgcttggaggtagggcacgggagcagactgatgcgggagcagagttcgcttagttgtggttttaagttctcccagcgcgcattgatgtcagcgatgttggtcacactgcggatctgtttgaacttggcactgatgtcgataaagtccaggaagatctggccctggttggcccagttgggcactcggatgctgctgccctctgtatcctcgaattgaatgagcaggctatgcaggtatttcattttacctgcaagtttgcaatgacaattgttagtaatccaccgaaataattcttatcataaggaaccaaccgtttatgatggcatcaggagcaatgtgttggaagatgacatcgtgcgccgtagcaaaatgttttgcctttagcagatatttggcttgaaggtgatgctttcctgacgctcccgcctttaccgccttcgcatagtccacccacgacatcggaataccaagctcttcgacgataaagcgctcttccgcatatagagccaccttggcggaaacgctgacattcctctgtagcatttgctgaactgcacgttccctctgggtctgctgcttaatatgcaaaagaacaaagataccccactgccagaggccttcgttctccaactggctagcgaaatccaccgaaagacgagcctccgttaagggcgaacagtgacggtagccaagagctcgcagagtttgcaagagcagccagctaaaatgatttgatatgatttattttgcactgtaccaaaaaattcttttagctcacctcaaacgaaagtccatggcatcggcggtatgcgttataggattgagagtttcttccagggaatgcatacgtttagagtgtaactggagcaagtggtagcgcaaatcgtagacgggcttcttggtgtcagtaggtgcgtccctgtagctgggctttgggggctccgcatagcactcttccgcttggaaggcgtcgttataagcattgagtgcatcggtgatagacgatgttggggctgtgaaataccatagctgcagggccagtgctgtcagccagtttttattctcgagtaagttgatggccccatgtgaagactgcatcattggcgctccggcggccagcatgtacatcttaaggcgctccagatcgatatacttatccgacttgctctgctgccaggcaaagagctgctcctccattaatagccggaagacagctccggaacttaattgggacagcacaagagccagattagcatcatcgtagctgaaggccagctcacaagcctcatttacgcgatggcagctaagtaaatccaacatgtgctccaggtagctgtgggtgctaacttttttcgagagtagatctttgcccagcagcgtgttctcaagccactcggatagcagattgcgccgacacatgaccatgtaatgagagttcttttccaggtccaccagttcatcgtgatcgccccatagtgcgaataaaagcgaccacactgacacgctatagtcctcttttaagccagcatttctctgcttaagagactcggagaagtgcttggaaactagtttcgtaccgctatcgggatgtatacacgggcactcactaccctccacattaactgagaggcagtcgttaagctgaacttcgagatggggaatgatactttctcgaaaaccctcgttgcctttgaccatgttaaactccaccaactgcattacactgggcgacaaatcggtggccgagcgcggcgcaaataccatggagacgggcagggatggtccagtaactgaagcaaagggaaattattataattggactgctacagcttgtttcagatattcttacattcttttaggttttgcatgttattataggtgcttggcagtaccaatgagttttgtggaccaaaactgagcttaaagctgcgtcctttgtagaatcccaaatcggcgatccaattatcgcgcatctcataagcgatggacctgggtaggggaaccgtggtggcacgcaacttaatcggagccactttgggcttacagacaaacttgaaggctttagtgacaggcatttcaaacttcgtttcttttacagctgcaacaatgcttccagttgccatcgacgatgtctgaaattgatcaggatgtttattgggcttcaaagtaaaaggttacgtcgatatacctcctcataatgtgcatcacacatcaggctggcctcagagacggaggaagaaatcggcagagcgggcgatgggtgttcaaaatcgtactgactggaactctcggaggcaccatctttccaaacaagaggttccacgttgaaaaacttgcgatgacgaagaagacgccccgtagtctctgtagaaatttatgagtaattttcaaatgtatagtggccgtgtgggatgataagcagtgaattgttgtaattataatgaattgttgccaaagcaggcaaaatgaattggatttactaacacatttgaaagctttattaactttataatttgtgctacctttttaaacataaatatatatatataatactttttgcaacgatcaaaaatcattaaatatcgttgataattaacaatacatatttgctcaaaactaacgattaacatttaaacatctacatatcttttactgtaagcaatttgaaagaccatcaagagattatccacctacccatgggttcgtcctcgggagcattgtcctccacaaagaaggatgacttcattagctgcattttgtgcgcctcgttgcctaccatttcctgagccaaaacagctgtgggactggtaatcgttggacgttgacgcggtggatcaaacatggagaaatcggagttgccaccagcttggaaaaattctgcgaattaaaattaagtaaattacaattaatgaaactaaaccttttaaaatggactttagacgtacgtgttttgtccattaaaaggaactcggcggtatcatccattggcctgaatccgctggcaacacctgcgaccaaggcttttgggtccaagttacgggctgcatcttctgaaatcttctgcgcttggcgcagcgaattgagcgtcatcttttctgcgtttgcccgctgctgagcctcaagcgttgcaattttggcttttttcgggtcagtgggcaactcgtcctcttcgtcgctgtctcccaggccatatttagaaaagtgcttgacgcggaagacccaactacccgtttccgggcggtattctataaagcgcgtatcgtttttatcgcacacccggcgcaacttgccctcccagtccatctcaagcaagcgttgtgggtccttgatggcttcgtgcttggtcttgtccaacggccatacttggtccaaagtgacctgggcgtcacggtttagaccttgaccaatgggcggcttgttttcgtcgtcgggataaatgataatctccttgttgcgaaagtggactgtgatacaaattgttttgcattaaataaatgtatgagagcaaacacaaacggttataaaaaaacacaagactcttaccaatctcatcgaggttcaggccagccacatccatttccttgccgaagaagacattgccgtatccttcccgacccaccgtaaagttcggaaccacacaggatccgtcctcggccagataggagcgtaggtcgtctagcgatggaattgtatagtaacccacgcgtcgcagcacaatgcctgttggatgtgattcgtcgtctgctgcctctgcagcagctgcctcaatggctaggcgggattggtttgctgcagagtcctctgcctcattagatctgttcgaaagcacactctcattggcctgctgcgaagtgaaggtttcgcgacgtgcaatggtgctggattgatcctcaaatggattctctgggatggttgacaccgagaggcgaacggtggaggatggtcggtatgtatctaaaggtttacgtggcacaagctcgttgagggtgctgttatggggcgatccctgatccattccagtctgaatgttgtgctggcgtaccttctcaaggttgttaggatgcagccatgactcacggcggccgttatcctgactttcccgtccattcgttgctccaggcgagtttccagctggtggtagcggctcacttggaatggctccgctaaacgactcgcgttctttgttgggagttgcgcctttgggtcgagattggggcgtgttgggagcactgccaatagagctagagggatttccaccctctacactttttactttgggtttgataactaatcgtttagcactgggcttcagattgaagccctctacagaagcatcaaactcctcgagaccatcaaacagcgattttctattaagtgtgctgcccagcgcctttaccttcattggagcaggattgttgctggtacttatcttgtactggttgctggtcaggtccagaactgcttgttgggcagcaggatttgtagctcttgttgcatctgcttcactgcttagctttagatccttgaaaatcggagagtctccgtagggagaagttaccctagctaggatctgctgatgaatgggctggtgtgaaggcgtcatgatacccagtgtgggctgagctcccataataccaccagttaacgagttgtttgtacccataccgaagcctcctccgcccaaggaaccaccgacacctccgaaactggtagttcctcctccaaacagtcctcccgttggggcagcacccgtgccacccaaggttgtagtacctcctccaaaaagacctcctcccggcttggctgtatttccgaaaagtgatccgcccgtgttgcctgcgttgaaattaagtggtgctgcgctggtggctccaaaacctccgaatccggacgttgctggcttgttcaatcccgagttaaaaaggcctcctcccgttgctgctgtactggtgttcaggccaaaatttgaaaacggagtgctagccgtggaggttgcgccgaaagttggagcagcaaagctagtggcgggcttgtttccgaaaaggcctccgccggcggtgcttgttgctggagctccaaatccaaaacctgtcgtggctgctgatgcagccgttcccaacccaaaggctgatttatttggatcggcggctggtgtggcaccaaaaagagttgactgttgcgttgctccggctgtggttccaaagcctccgaatcctgtgttagtctgtccgaaagcaggagccgcactggtagcaggtgcctgaccaaagaggcttcctccctgtccaaaagcaggcttcgccccaaatggatttgaagcgtcagctgcgggagcggcaaacggagtggtggtggtggctccaaagggcttttgcagaaagttgttttgctgggttgctgctccgaatgcattgttagtcgccggttgttggccaaaagcggtggtgccaaacatgctcttattctcggtcacagtttggccaaacagacctgtgcttggttgggcagtgcttccaaacaggccaccacttgcaggctgagcgggctgagtaacctgagctccaaatccaaaagctcccggagcattcccagcctgtggacccttgcgcccgcacatatagtcttccaggcggagctcctccagagatttgccctcgaactccttcatagccgtgatgcagtgctgcttagtgttcacactatttgcctgaccgctcttcatcagggtatctgtaccaatggttggctggtacttggccacggccgtgcccgtattgactccggaagctcccacggccgtagcctgaggttgggcaaaggcggaggcggtgccactgccaaaaacattggtggttgtaggcgccgacgtcccaaagcctccgaatcctgttgtactggtggcggcagccggttggccaaacaaagagcccgtgggctgagcagcagctgtttgcccaaaggccgtcatagtcggcttggcggctccaaaggcgggtagcgtcgattgtccaaagagggaggtgcttgccgccgtctgggtggatccaaatatgttcgaggtctgttgcggctgcgagaaggctgcaaagaagaaattactaaattagtaacatgataccacttcaaatgatcgtgtctaacctccaaaagccgtgggctgagctgtggcagtgcttccaaatcccgtggacgtgtttgccccgaataagcctccggcgggctgagctggtgtggctgccgcaccgaacagtgactgctgcgcgggttgggcggcaaaggtggaggtgtttccaaaggccggtgcggcgggtttgccaaatgccgactggccaaacggagtggttgttgtggtgccgctgaatccgccaaagctggtggccgccggagtggctccgaagctgggtttcgcgccgccaaacattttgctcgctgctgctgctcagataacaaacatatactaggtagatcccctgctttgtccttcgccggaatgccaactatcgcgatgagcaatgcttcgatttcaccacgttgggcaagctggggcggctgcgccggatgcgaaggttgtgggaccggacaggcttagcttaaaacaaataaacactcgcgaatttgtcaagtcagcaggagtcgaccgagtctgacgcaaaaagtggacagaaatggcgcgccgattttttcacgatgttgaagaaaatgcagccaaaagtgtgaccaaggcgtgaaatcgcatgcaaaaatacactgtaaaaaagcaggatacaactgccaggcgcataactattgaccataacttatttatggtcttaataaaatttttgcttggtgcctccgaagcaaatttactatgaatgtgtggaaaatgtattttataacttgggtttctcgtattttgtaggtaagctcgattttcacatttttatgtgaccgtactgcgaacaaagtgaaaacccatttgacatcaacggtgtgaacacgctgtaaggggcactctatatttgatattttcgattgggaacagtacggtacttctgggcatcgagcacgctcattcacaacaaacagttgaaacgcgcgggttgttttccgagagcggttatttaattaattggcaactgtcacacacgagtgtgtgtgcgatcgagtgcgtgtacatgtgataattagctgagcggcagcggccaactcccagcccaaatacaagtcgagaacaaaacgagcgaaaaacggcgcaaaatgcatttgcggagcgacaatttgtgcggaatgctagcttttgtgcaataattatttattggttgcaattgtccaaccggtgtgcttttcgtcgaaatctgtagcgaaatcggaggcgaaatgcttgtgttggcggcattgtgaaaacgaaatcaaaatttcaactacgtgttgctcttttgccgttgcctaatttaatgtcttgttgtttttattttcgcaaacgaaagtccatcgctttgcatgtgtgagtagcgatcgtttgtcgccgtgttggtggtaaaagtcggcgcaaaaacaacaatatcagcaacaacactagtagaagcaacaacaacgagaagaaaagccttcaagatgagtgtgtggagcgactgcaatgccaagcaggcagaattcggcattggtaagttggcaatgcggctattaagccgataaattaggtagaatatggctaggcaggaatgtttaaacaaagtgctttgtaaac

SEQ ID NO: 21572 - DNA, 5110 bp, DROSOPHILA
ttcacgccttggtcacacttttggctgcattttcttcaacatcgtgaaaaaatcggcgcgccatttctgtccactttttgcgtcagactcggtcgactcctgctgacttgacaaattcgcgagtgtttatttgttttaagctaagcctgtccggtcccacaaccttcgcatccggcgcagccgccccagcttgcccaacgtggtgaaatcgaagcattgctcatcgcgatagttggcattccggcgaaggacaaagcaggggatctacctagtatatgtttgttatctgagcagcagcagcgagcaaaatgtttggcggcgcgaaacccagcttcggagccactccggcggccaccagctttggcggattcagcggcaccacaacaaccactccgtttggccagtcggcatttggcaaacccgccgcaccggcctttggaaacacctccacctttgccgcccaacccgcgcagcagtcactgttcggtgcggcagccacaccagctcagcccgccggaggcttattcggggcaaacacgtccacgggatttggaagcactgccacagctcagcccacggcttttggagccttctcgcagccgcaacagacctcgaacatatttggatccacccagacggcggcaagcacctccctctttggacaatcgacgctacccgcctttggagccgccaagccgactatgacggcctttgggcaaacagctgctgctcagcccacgggctctttgtttggccaaccggctgccgccaccagtacaacaggattcggaggctttgggacgtcggcgcctacaaccaccaatgtttttggcagtggcaccgcctccgcctttgcccaacctcaggctacggccgtgggagcttccggagtcaatacgggcacggccgtggccaagtaccagccaaccattggtacagataccctgatgaagagcggtcaggcaaatagtgtgaacactaagcagcactgcatcacggctatgaaggagttcgagggcaaatctctggaggagctccgcctggaagactatatgtgcgggcgcaagggtccacaggctgggaatgctccgggagcttttggatttggagctcaggttactcagcccgctcagcctgcaagtggtggcctgtttggaagcactgcccaaccaagcacaggtctgtttggccaaactgtgaccgagaataagagcatgtttggcaccaccgcttttggccaacaaccggcgactaacaatgcattcggagcagcaacccagcaaaacaactttctgcaaaagccctttggagccaccaccaccactccgtttgccgctcccgcagctgacgcttcaaatccatttggggcgaagcctgcttttggacagggaggaagcctctttggtcaggcacctgctaccagtgcggctcctgctttcggacagactaacacaggattcggaggctttggaaccacagccggagcaacgcaacagtcaactctttttggtgccacaccagccgccgatccaaataaatcagcctttgggttgggaacggctgcatcagcagccacgacaggttttggatttggagctccagcaacaagcaccgccggcggaggccttttcggaaacaagcccgccactagctttgctgctccaactttcggcgcaacctccacggctagcactccgttttcaaattttggcctgaacaccagtacagcagcaacgggaggaggcctttttaactcgggattgaacaagccagcaacgtccggattcggaggttttggagccaccagcgcagcaccacttaatttcaacgcaggcaacacgggcggatcacttttcggaaatacagccaagccgggaggaggtctttttggaggaggtactacaaccttgggtggcacgggtgctgccccaacgggaggactgtttggaggaggaactaccagtttcggaggtgtcggtggttccttgggcggaggaggcttcggtatgggtacaaacaactcgttaactggtggtattatgggagctcagcccacactgggtatcatgacgccttcacaccagcccattcatcagcagatcctagctagggtaacttctccctacggagactctccgattttcaaggatctaaagctaagcagtgaagcagatgcaacaagagctacaaatcctgctgcccaacaagcagttctggacctgaccagcaaccagtacaagataagtaccagcaacaatcctgctccaatgaaggtaaaggcgctgggcagcacacttaatagaaaatcgctgtttgatggtctcgaggagtttgatgcttctgtagagggcttcaatctgaagcccagtgctaaacgattagttatcaaacccaaagtaaaaagtgtagagggtggaaatccctctagctctattggcagtgctcccaacacgccccaatctcgacccaaaggcgcaactcccaacaaagaacgcgagtcgtttagcggagccattccaagtgagccgctaccaccagctggaaactcgcctggagcaacgaatggacgggaaagtcaggataacggccgccgtgagtcatggctgcatcctaacaaccttgagaaggtacgccagcacaacattcagactggaatggatcagggatcgccccataacagcaccctcaacgagcttgtgccacgtaaacctttagatacataccgaccatcctccaccgttcgcctctcggtgtcaaccatcccagagaatccatttgaggatcaatccagcaccattgcacgtcgcgaaaccttcacttcgcagcaggccaatgagagtgtgctttcgaacagatctaatgaggcagaggactctgcagcaaaccaatcccgcctagccattgaggcagctgctgcagaggcagcagacgacgaatcacatccaacaggcattgtgctgcgacgcgtgggttactatacaattccatcgctagacgacctacgctcctatctggccgaggacggatcctgtgtggttccgaactttacggtgggtcgggaaggatacggcaatgtcttcttcggcaaggaaatggatgtggctggcctgaacctcgatgagattgtccactttcgcaacaaggagattatcatttatcccgacgacgaaaacaagccgcccattggtcaaggtctaaaccgtgacgcccaggtcactttggaccaagtatggccgttggacaagaccaagcacgaagccatcaaggacccacaacgcttgcttgagatggactgggagggcaagttgcgccgggtgtgcgataaaaacgatacgcgctttatagaataccgcccggaaacgggtagttgggtcttccgcgtcaagcacttttctaaatatggcctgggagacagcgacgaagaggacgagttgcccactgacccgaaaaaagccaaaattgcaacgcttgaggctcagcagcgggcaaacgcagaaaagatgacgctcaattcgctgcgccaagcgcagaagatttcagaagatgcagcccgtaacttggacccaaaagccttggtcgcaggtgttgccagcggattcaggccaatggatgataccgccgagttccttttaatggacaaaacacaatttttccaagctggtggcaactccgatttctccatgtttgatccaccgcgtcaacgtccaacgattaccagtcccacagctgttttggctcaggaaatggtaggcaacgaggcgcacaaaatgcagctaatgaagtcatccttctttgtggaggacaatgctcccgaggacgaacccatggagactacggggcgtcttcttcgtcatcgcaagtttttcaacgtggaacctcttgtttggaaagatggtgcctccgagagttccagtcagtacgattttgaacacccatcgcccgctctgccgatttcttcctccgtctctgaggccagcctgatgtgtgatgcacattatgaggagacatcgtcgatggcaactggaagcattgttgcagctgtaaaagaaacgaagtttgaaatgcctgtcactaaagccttcaagtttgtctgtaagcccaaagtggctccgattaagttgcgtgccaccacggttcccctacccaggtccatcgcttatgagatgcgcgataattggatcgccgatttgggattctacaaaggacgcagctttaagctcagttttggtccacaaaactcattggtactgccaagcacctataataacatgcaaaacctaaaagaatttactggaccatccctgcccgtctccatggtatttgcgccgcgctcggccaccgatttgtcgcccagtgtaatgcagttggtggagtttaacatggtcaaaggcaacgagggttttcgagaaagtatcattccccatctcgaagttcagcttaacgactgcctctcagttaatgtggagggtagtgagtgcccgtgtatacatcccgatagcggtacgaaactagtttccaagcacttctccgagtctcttaagcagagaaatgctggcttaaaagaggactatagcgtgtcagtgtggtcgcttttattcgcactatggggcgatcacgatgaactggtggacctggaaaagaactctcattacatggtcatgtgtcggcgcaatctgctatccgagtggcttgagaacacgctgctgggcaaagatctactctcgaaaaaagttagcacccacagctacctggagcacatgttggatttacttagctgccatcgcgtaaatgaggcttgtgagctggccttcagctacgatgatgctaatctggctcttgtgctgtcccaattaagttccggagctgtcttccggctattaatggaggagcagctctttgcctggcagcagagcaagtcggataagtatatcgatctggagcgccttaagatgtacatgctggccgccggagcgccaatgatgcagtcttcacatggggccatcaacttactcgagaataaaaactggctgacagcactggccctgcagctatggtatttcacagccccaacatcgtctatcaccgatgcactcaatgcttataacgacgc

SEQ ID NO: 21573 - protein, 1600 aa, DROSOPHILA
MFGGAKPSFGATPAATSFGGFSGTTTTTPFGQSAFGKPAAPAFGNTSTFAAQPAQQSLFGAAATPAQPAGGLFGANTSTGFGSTATAQPTAFGAFSQPQQTSNIFGSTQTAASTSLFGQSTLPAFGAAKPTMTAFGQTAAAQPTGSLFGQPAAATSTTGFGGFGTSAPTTTNVFGSGTASAFAQPQATAVGASGVNTGTAVAKYQPTIGTDTLMKSGQANSVNTKQHCITAMKEFEGKSLEELRLEDYMCGRKGPQAGNAPGAFGFGAQVTQPAQPASGGLFGSTAQPSTGLFGQTVTENKSMFGTTAFGQQPATNNAFGAATQQNNFLQKPFGATTTTPFAAPAADASNPFGAKPAFGQGGSLFGQAPATSAAPAFGQTNTGFGGFGTTAGATQQSTLFGATPAADPNKSAFGLGTAASAATTGFGFGAPATSTAGGGLFGNKPATSFAAPTFGATSTASTPFSNFGLNTSTAATGGGLFNSGLNKPATSGFGGFGATSAAPLNFNAGNTGGSLFGNTAKPGGGLFGGGTTTLGGTGAAPTGGLFGGGTTSFGGVGGSLGGGGFGMGTNNSLTGGIMGAQPTLGIMTPSHQPIHQQILARVTSPYGDSPIFKDLKLSSEADATRATNPAAQQAVLDLTSNQYKISTSNNPAPMKVKALGSTLNRKSLFDGLEEFDASVEGFNLKPSAKRLVIKPKVKSVEGGNPSSSIGSAPNTPQSRPKGATPNKERESFSGAIPSEPLPPAGNSPGATNGRESQDNGRRESWLHPNNLEKVRQHNIQTGMDQGSPHNSTLNELVPRKPLDTYRPSSTVRLSVSTIPENPFEDQSSTIARRETFTSQQANESVLSNRSNEAEDSAANQSRLAIEAAAAEAADDESHPTGIVLRRVGYYTIPSLDDLRSYLAEDGSCVVPNFTVGREGYGNVFFGKEMDVAGLNLDEIVHFRNKEIIIYPDDENKPPIGQGLNRDAQVTLDQVWPLDKTKHEAIKDPQRLLEMDWEGKLRRVCDKNDTRFIEYRPETGSWVFRVKHFSKYGLGDSDEEDELPTDPKKAKIATLEAQQRANAEKMTLNSLRQAQKISEDAARNLDPKALVAGVASGFRPMDDTAEFLLMDKTQFFQAGGNSDFSMFDPPRQRPTITSPTAVLAQEMVGNEAHKMQLMKSSFFVEDNAPEDEPMETTGRLLRHRKFFNVEPLVWKDGASESSSQYDFEHPSPALPISSSVSEASLMCDAHYEETSSMATGSIVAAVKETKFEMPVTKAFKFVCKPKVAPIKLRATTVPLPRSIAYEMRDNWIADLGFYKGRSFKLSFGPQNSLVLPSTYNNMQNLKEFTGPSLPVSMVFAPRSATDLSPSVMQLVEFNMVKGNEGFRESIIPHLEVQLNDCLSVNVEGSECPCIHPDSGTKLVSKHFSESLKQRNAGLKEDYSVSVWSLLFALWGDHDELVDLEKNSHYMVMCRRNLLSEWLENTLLGKDLLSKKVSTHSYLEHMLDLLSCHRVNEACELAFSYDDANLALVLSQLSSGAVFRLLMEEQLFAWQQSKSDKYIDLERLKMYMLAAGAPMMQSSHGAINLLENKNWLTALALQLWYFTAPTSSITDALNAYND

SEQ ID NO: 21574 - DNA, 28310 bp, DROSOPHILA
gtacgttcgttatacatgtaatagaaaagcgatacatcattaaatgtattaatgtgttattttttatctaaaaagtcacagaagaattcaatacttaaaattaaataaaaattctaattataattatacaataaaaataaattttaaattgaatgagggacctatgcctgcagtttctccattttcacgactgaatatttttcgacattcaaatctgcagttccactatttctccgccgttccgcgtagctatgcgctgcttggtttttgaactgctttgccgacagctaaagagaatcgacgctctctcttgaaatcgcacacccaactggccaatcaggtttgagcactgcacacaatggcatttgccttttgggctccccagagattttggttttggttttgggttttagttaccgtttggcttgtgtgttttgtttttcggtgccttgtgtttgctgcctttggctttgtctttgcaggcgttgacactttggtttcccaaaagagctgaaccgaaggtgcctgggaatagagaataaagccaagctgaaatggagacccgagatcccaaaaccgagatcctagacacacgcccccttcgattggggacgtcgttgcgctggttccattcgcaccgttcctagggggctgctctcactcgctcccgctcgctcccattaggatgccataggatggtggtgggttcttttttctgctgacagctttgcgtctctccacgggattggccattggactgccgccaacccccaccccctccggcacgctctctccgctctcccagtggcgcagactcgtttcgtttccattttcgaaactctcgttggcctgccgttttaccctgcttctactgctactgcttctttcgctacggccgcctttgtggctctgctgcgtcgctgccgctattgctgctgctgctgcgccgtcgccgccgcttcttttcgactgctgcagcagcatcgcttggcaaggattcagttggggtttaacagccactcgggacggtagcgcgcgccgctcaaacttgttgcgagaccaattttccgaaaatcccaaattctctacggtgcattggccagttcacccaaaaacacccacacacacacacacacagactgtctcactttcgtttcgcgattgattgccagctctccggagaccaagaaccaaaataatagaaaagggaacccaataccaatacgacgccgcaaaccgatcgagttataaatacaatacgcaaataaaaaactaaacaaacagtaaaacgcctagcaaagagccttcaaaacggcagccacaatttccagcgcaggattaggaggagacgtagccgcgtacgctgatctccaccagcactcgcattcgcaccatccgaatccgcatccacatccgcatccccatccgttcgccaccgacggcttcaagctgcgttccgaagagccggtgccgggcttcagctcggcctccccctggcccaccctggagctgggcatggagtggggccggaagctgtaccccagtgccgtttccggtccgcgatccgccggcggcctgatgttcggcctgccgcccaccgccgctgtggacatgaaccagccgcgcggtccgatgacctcgctgaaggaggagccgctgggcagccggtgggccatgcagccagtcgttgaccagagcaagtaagtaaagggattgggttgaattgtgaacggaaaatggcccaacaaagtgattttcccagtgctgaaatcaaaacccttggacatatctacaaaaactgaccgatagaaaaaaagtgatcttccatgtgttaaagtgttcaatctaatttaaatggtccgcggaatgaaataaacgcttagtgtattaagttgaatctgaaagaagagtaaatttcatagctaatatccactagtgatacagaatcgtcataatttaaatgtaaaatcctccaggatattcagatagcttaattgtttcctatttgcttataaattatgcaggtttatttttatccataattttttttaattacattgctttttggccaaaactctctctgacaaacgtacttgcaatgtttttattaaataaacaaggatcaataactaacgcatcaataaacgaacgaatgcatgttcattattccattcagtatcttaagctttctactagataatacagatcataaaataagcagacacaaaacctctaagaaatatcgcctatgatatggcgcccaacatggggcccatcagcattcattgttgacatgtaacaaggtgggcttaacgggaaacccccttaatctctgctaatctctccctaaatctccaatctccaagagaaaacgcgccaaagtgcccgcaacaatgtttcagcaacacacgcacgcagagcccaaaacaaaaggaagtctccaaaatgggaagactgtgaaagaaaaaaaagtgcgtttgtttacttttggccaaagccggcatcccgtgtgtccaagtccaacaatatatggaggcccctgggggagcgattccgaaacgtagtaagtcagtcagtcagccggggaagtgggcgactttttatggccgccacccaccctgtgggccataagatgaaccccaaaacaaagtccgtccattcagatcccagactcactcgaaattcccactcaaaatgtttgggctcacgcacttttttgggatgatactacatgggtgggtggataaggcagcggggggctttgagtcgaaaaagggatgttatttggactttgactttcactttcgcctcatccaaatgaagcgagtcccaagaagtcactccactctccgctcaaggaccaaaaaggacccccaacagagggttgctcggaaaaagcttttatttttcttggcccttgtttgtttagttgcgtttgagatgtttctggcgtgagatgttcgcgccgagaagaagtgcgcgagttgcccaaacggaaagcgagagcgaaatgacagcgggatttgttcattcagcggcggcaaatcagcactcccatccacacggacaccccccacatcaccatctcgataatcacatccagaggcaggacaatcctaatcagaaccataatcacaatcagacattagacaataagacaatgcgctgtgatacgaggtaaacaacttgtgatggtattataatcaagtgaaaaatgttgtaaaaagtttttataggaagtgtagaaattgtatgagtactatatatgttcatgtgttaaagaacctaaattgcattgtttataagaacatggagtgtaactatggcaaagacaacaagttaatggcatagcaaacatattatgctcaatttgaaccacttagtatattgaaaatctttggattatttctcaacagagctgcgatatataaaaccgaagttatattttttcccaatcaacgaagtgattataaaagtaaagttattttagatacctatctatttacttcaaaaatatattagattggtatgcctgtttttgccgaatcaatatttaaaatgattagacaatcttttcaaataagctgccatactttattaaaagtttataaatataacaattaacaaatttaacaaacacaatataattccttcagacactttcctcccaatttatttatctcaccaccaagaaaaacgtaaacttttgtgatttaaattttggatttattactattttgtacgcaacttttgcgacaaataaatctcctcgattccgataattgttcaatatgtttgtggcaaaccatttatttaaacacttatcagtccatctaactggaacagcagaaacaatgttgtactataaacaaagtgcataaaccacacacaattgtgtggttgtacttcttgtcgccgctcgtaaatcagaggaatattcgaaaatttatttcaacaaagattgtccagggagaagaaatggaagcagctacagctccaactctagattgcaacaaatggccgtaaagtgtccttaaacaatgaggatattttgtgccaccaataaagtcgctctttttaaagggctcgcatgtgtggaaagcggattttcacgtgcctggccaaaaattgactaaacgtgaccacgaaagagtccagtttttcacctctctgctatttttcctgacggccacctgggcatcgatttgcgacaattaaatgttggcataataaaatcaacagcaaaacggccacaaaaatgttctatatctcttttttttagctgctcttctcggttgcaaattggcggcaagtgcaaacaaagtgagctggcaaactgccgcagaacgattttccacaatttccagccagtcgagttgaaaagtcaacagaaaacaaaaaatcgaaaaaatggaaaaaaggaagcggacttaggcggttgagggggtgttggcacaagttttttatttgccaggatgtactcggcattatttcgttgctcacttttcgaacactcgactccactccatggccataacaataacctttcaccagaatgtaacatgtctgacattcgtatgtcgtacactggcaccacctttccatcgctttttcccccccccacaaaggtgactactgccggtgaaaatcgcattgaacttccgcttttccgacccccagtccccccggctaccaacaaaaagctgggctgcctcttaatttgatatcaccctgtgggtgaatcaactttagcaccgcaaaatgtgtttgtttccttcgcaaaattcgtattcagattcacttgaagtccgcaaagggcattatctgcatgtatttcatgttattttaagctctcacttctcataaacattctcgtcatttaaggtccttagaattgttgacattgaggtgggtatcataaaaaattttgcaataccgtagaagcttccctcaacaagaaatcgcaaataagatgcacaatttaaattgttacagaagctgttaatatattaaaaatacaaacatagagctattttaaattttaaaaccttaacagattagattcttttgctatgttcaatcaaagctccttccatgattcgctaaatcgtatcgctcatcaaccgctgaaaggcaatcagaactgatggaaaagtagaatggcaaatccgtgtacctaccgataaaattgtccaccaaatccactgggtatccattcgagcacttatttaataactaggacgcaattcgattgcactttcgattgaagcgaagagctgagcgggggggaagcggaatggagactctatcattagctgatggctgggagtgcgacattatcctttggcaaatgtgtatataattgcaggacccccgagtcagttggccagccaggacatgcggctccttgacattgcctgctgagcaaacaggagcagcacataaatagtgcagcaaataacgcaaatacaaaaaatctgataaaatcagcattttctaaattaaattgttcgttatgcatacagcggaaagagaaacaagaaacaagaccctaccttagtccttccaaccggacattgtccggtaattgttcgctgacaggaggattgttgatggtggaaggggagcagggacacgaggtcctgacatttagcatatggactagttggggagggggtggggcaaggacaagcctttatgccgtctgcggctcagtgtccacgtgtcctgccagcgataattgcccactgtctgcttggcccacatacagcaaatgtacatacacacaaaaatatttcaagtgtagcacaaggggcgttcggcggacaacaaggactgtcatacatcaggattattgtgtcacgttgatgttgcttatgcgcttttaatgatagttgtctgagttgtgagagctgctgcccgaatgtcattctctagtctaattgagttgcccctaatactggtcactactaaactagactctcgctgccaattagaggctctttaggcctgctctatatttatccagctaatggcataattacactctcctctcccacgtaatactcatttcactaattcccaccatttatttacttttttgatccattgcagtttgggcattggccgcgcccactttgaaaagcagccgcccagcaatttgcgcaagtcgaacttctttcacttcgtgatcgccttatatgatcgggctggacaaccgatcgaaatcgagcggacggctttcattggattcatcgagaaggactcggaatcggatgccaccaagacgaacaatggcatccagtaccggctgcagttactctacgcaaatggtgagtgcgaagtgctattaaagatggaaccctttgtgatcctatgctttatattccgtttctaggagctcgccaggagcaggacattttcgtgcgtctcatcgattcggtgaccaagcaggtgagttcaaaaatatttcaattagttatggatgaactcaacataaattataagaaatggtgctataactagcaacggaacatacatgtttagaaaattagaaaatcataaataatatacattaataacaactcaagttttaatcctttacacaacttgaaagaagtaatgcccaaacatctaatttgaataggttgagtaatttcctgcacagaaaactcgaaacaacttcaaaaccacttaaatatatttcgaaaattagcaattcatcttgcgattgccacttacataaattaagaacttcctgattgccacgctgcttcactgcaaattaaggccaaagttaaccaggctacgaaaaaccaattcctttcacttggctgcttccgtgcattttccctctttcccggacacgatgtttgttttgctgattcgagcataagttgcattcgaaattgattgtcatggctaattaagtgtgtcctggtgtgtcctttggccaataaattgagtcgtcaaacgagcagctcgttcggccaggacttttccgacttttccgcgtgaaaaaaaaggggtgtgaccggggctaacgagagaagcgagcaaatcgagagaatcgcacggggatcgaacattgttaatgcgctttgttgtgggtgcgtgcaggtcctggggcattatactggtccttatagtcctgctgcaccatatgtccgcttttgtcggcctaatgccctgcgagtcctttttcttgcctctcctttttcggccttttcaagggcaattaatttctcgagtgacaaatttttatagacattggacgactcctttcgccgtctcttccccattaaccccccccccctctctctctctcactccaatcggtggcactactttctcgatttctcttcgtttttgtgggcgttccttgcccatttagcccgttcgcatcagaaaacgagagcgcaataaatttgtccacaaattatcgacagcatgcgacatctcgcccccttttctttactttatggtgacaaatccatttgtgcgaatgcaatttaatcgcaaaattatttgagcagccaccaattgaatttgctaaaaatatcacacacgaaaaaaaaatggccgtaaaagaaaaggtctctgtgaagttttgtttaattttttttttaggctttgccgataagaagattatttatgggcattgttttaggcaattaaagcttatcgacaaattgaatagcgccatagagagttactttaatatagcaaatgagtaattacaagcagtttaatgggtcttcaaggaaacatacgaattcccgtgctaaatgcgacagattcccaaatggatactcattgtacaactcactcaagtttcaatttcacaataatcgaaatacgaatcgggaagtaaaacatacatataagtatggatgttatattttctaagaataactattacatcccggttagttccttcctccgatttccctaaattgcccattttcgcttgacttgtggcgtatttttgatagacctacccctaaacctgggaaaatcacacagctctgcgagttttgtgcccatttgaaaagtgtcgcaagctgggaaaagaacaatcatttgatcggattaggtgggttcggctgcctctttgtagaccctttgttttcgactggatgtttttgaattttacatttcgcttgtcgcgtgtcgcttttctttatcggattgcgtaacaggtaaggcggggataagcgagtgttatctttagcaagtgggattgcaactcgaaactcgaaactgggaactgtggcgggccgaatgcgattaaggcggaattgtctcaatcgcaaatggcaggaaggcaggacaattgtcaactgccatccacgtggcaggaccaaagaaaaaaaaaatgaaaatccaaaaaacaagcagcgacgaggcacaacccttgcaacccctttcctttcgggcaaatgcagcagcaaatcatggtcataatcataattacattcgatcagataacggccaaaaacagttcgaacgggaggcgtcgcaattgcaatttgagctaacgatggcaccacggaaaatcgcctcatttcggcgatcatatttcattttcatcagcggatggtggatagatagactggtgctataagggtccggcataaaacaatagccaaatccttttgcccggtttttgtgttttgccaaaattgcgcttatcgcgattaaaacgcacgcacaaaagcgcatcgaaattctaaaccaaaaagagatggatagcgttcgaggggcagagaggagagacggcagataactggcgattaatgcactgagataactgagttatagtggttgaaaggagcccaaaaatccaggcgaactactactaatgacaaagatccgtcaaccggttacccgatttatccaaccgctaacggttaaaacgaaaatcggaaagcagcatcattaaataccctatagccattgcactcgcacacacacacacacacacactcgcacacatgctgttgtctgcgcgtgctaattaagcgataaaattaatttgtatgtcaacacttaaaacgccaaaagagagagaatcattttcgattattaacaaattgtacgagcacagctcgcttaatggcaaatggttattgttgttgtcgctggcgccgccggccactcaataaattcaacagattgcgcgaaatctccacatttgcatgtgcgccgccctccgtccgtcccgctcgcaccagcccgatttatggccctccccacgctggctctccctttcgcacgcaatgcgattaaaaatgcttttatttcacggcaagtgcatttctgcggtcgaaagagatggcgtaaagagcgagagagtgagtgagaaaacaggcggaaaaatgatatcgtcctcattatgcgaaatgtgtaatgcatgcggcatgctcccctttgaaattcttttggctcccttgggggaacttcggttttataaaggtgtgccaaatgcactgccctatgtgggtgaaagcaatcttaactttaaataaatgagcaacgtaggttacatactttcgatgcttacaaattgaaaatatttaaatcacaataatatttacattttcaaaaaaaaaaaaaaaacatagattggtttattgaaaggtcacaatgctctttagaattttttatcataattagaaacaatcaataatttataactgccaaaaaaaggtatacacagctctgtatttcataaagtgcatatttcaatacgcttgcttatgtaatttttcaacaagctggcattacattgttaacccgtgtccctaaaaatatgcaaatatcctgcgaagggcaggcaaaaaaagtctttcacccatttccctcgacaaagtgcacgaatggcgaacggaggatgcacgagtccttgcagcggtaacctttatttcggtgtcctttcttcttggtgggcaatttatgcgttgccccgataaatgtagctttaataaattaagagctaccctctatgggttttttattcgcttttttattgttttttttttgtgttttgtttttgtgccctttcgcaaacattttttgcagtcgctcctttgtccgcgataatttatcttgtttggagagatttttatttggcacgttaaatatgcagcatgtgcaacatgcaacatgcagcattcaagtgcgtgaataatgcagcgagcgtcgattcattttattccaaaagcgataataacaatttgcaaaaatgctggaaaaaatcggctcatcgctcggagtttgatggaaaatcgtttaaaatttaaaagcttcctcggctcatcctgtttgcatcccccgctaccactccccccgcccccaccatgcggccaccgtgtggagtcctttttctgcctgtcctgtcatcacttcatcactcgcttttttgcacattttttcttgctgttttgttgtcctgccgctgactcctgttctttgtcctgttgataaatcgtagtttaaacgcttttactccagttttagtggctttcgtttagtttgccgtttttttttattagatggagccgtttagcctcggatttccgcaaaaacacagagtacgaggtacaaactaattgtttgtttctgcatcccatcgtaaggatgatggatgattccacgattctagcttgtgtcctttttaggcaagttggtttttttctgggcttgaaaacttagttttggttagttcaatggaccagatttatttagcattgattatgaatctccttatctgaaaccaactaaatctgaaggacattacctttcgcccttccgatgtcctaaataaacaggtgacaattacaagttgtcgcataaaaaatccaaacaaaactttatgtcctgtgcgggaaaacattgaaagtccattagctcggactgggataaaaaggatatgccatcctagttcggcctataattagctgcactctgtccggaaaagttcgagctgtaatgctgaatatcccgcagatattggacattgagctgggccatcgagggctgcctgatcctttacaggtttcaccatgggccgggggaattattaacctgacaaacgggataataagggatgatcataattttacatgtgcccagtctaatgccaaaacagcagggggcggccctatctatacatatatattcatatacagggtgggattctggaggactactgctgaatctgctgctgctggttgcattaaaattaatttctgattatctatctggttgggcacagcttctgtccatgggctcatcatcattcgagaatacagtttcgctgccgaaagtggaaacaaatgcacatatgccagtgacgtcagaggaagcactcgtccttgacggcaagtggcaggattcctcctgccagcgctctgttctctttttgtttttactttttggtggatgaacaacaaacacggctcaggtttttggcttcctcactcggttattgttattacttttgcgtgtatctgcgtcagttgatgaatgatcctctctcaccctccgcaggacatcctcgtccttcacccctcgcatatgccgtgtttttgccaactaattcgctggatgagtgttggattacggtcagggggcggtagtaggacacccgctttaatcatttttaaattagagaactatgcgcctttttgtctgccaacctcaacgcgcctcatccccttgtttatctatttattgttggaacttcaagagcggcctgcggaaattgcagcagattgtcgaacgctgcacttgcggttcctgttccttccacatggcacgattcttggcccacaaacaccatcccctcgaaagcacgcctcactgccaccacagaaaaaaggaaacaacaaacaaatagacagtcgtttcgagtggcgttttcactgggcaaacacacaaatactagaacgccccctcgatgcccctgcccctccatacccttcgcatattatgttcatgcagaggtaaaaattgtggacattgtcaatatttgcattatgtcccatatgtcgatttgctggtctctaagttttcggggctctgtaattagcatttatgtgtgtttgtctaagcccaaaacgattgcggataggggtcaaatttgtagaggggtcgggtgtcgatggcagagggttaataacggggtcacgtggagttactggttactggtggcaggtagcaaaatccatgagattgtaatctgtctgatttggtcaaaacaattagctttacctgtgttgtttttcctttaatcgatagaaggaagtattatctatctattagaattagtagaatcattattcccctatccacataacaaacttattaatattatatagtaaaaaccataaactttataatctataacacatcattatttccaatttcaggccatcatatatgagggtcaggacaagaatcccgagatgtgtcgagtgctcctaacgcacgaggtgatgtgcaggtgagtgcgcttatctagtagtgatctaatatcctttgacatcgcaatccacacgttttcgttgccgatttgcgaatcaaaatctcaagtctcgcgggcattcggaaagcgactcccaggagcttcttaaacttgccttttgtatcccaaaagggatgttggccacagccactcaaattatagagacctgagctctcatttgttttgaccgtatttttttccgtgatttttcctgggttttccttaagactttcttacgcttttccccccaaagcttccagggactgctttaattttgttgatttttaagctccgtccggcggggcggcagagtgtccttcgttttattttcacgctcaaacgcacgcgagctgaaacgtataaatggttgactaccgcgccgcctcatcgccacccacaagcacccactgccacccccaccaccccatgggctgctgttcacccttctagcagctttctgacagttgaaggttgcgtagaaaataaaaacggcagagcaaagggaaaaaactcgctgagagaaagccgaacaacaaaaaaattacacagccttagccggcgaaaccccagccaccatcctttaccacccccctctgaacacccaaccactgccctctccttcgtgttgttgttgttgttgctgggccggccatcttttattatttcggattggcacccagtttttatgtttgcgtagcattatcaaaaacaaggggacaacgtacacgcacacacacacacacacacgggggttgcagactcccccattagaaagagaggggtggagagcgcgggcagtgagatagagatagaggtagtggcagtggcaggacaacgaggacgtcttctttatcgttttggctttgcgcccatttcagtcatccatgtttatgttatatatgcccagcaaaggcacaaaagccaaaagccgggtccaagccaaaaataccacccccagatgaccctcaaccaccaaccgtttcgcccacgcaacacaccacccaccatccccagccccccttttatactgtacgatgtgttttttttttttttggttttctacatctagcccaggggctgtgcagtcgaaaattacgcagccattgaactcgatatagatatatggagtgcgtatatagatgcagataagggataagtgcagagcaatgacaaatgtctgacccccaaaaaattgtcacatttcaaatatactttgcaccatgagaccaagtctttaaagttcaatggaattgggttatgctaaaggtgatggaatataggaggtttcctatagataacttaagttaagtgaagtctattaatgtggagaatgttatagaaaaggtttagtttaatgatttatcattagaaaagaaagatttgctggttagaatatttataatatttcctgaccatgcaattagttggtacttaaacattttctttcagttaatcagctcacttaaactaaagttaagtttgaactttatccaaaactgttgttttatttttcagccgctgctgtgataagaagagctgtggtaaccgcaacgagacgccatcggatcccgtcattattgatcggtaagtagtcatagttcattcctcctcgtacagaagcatagccacaaccaccaggacctcgtcctgttgctccgccatacaaaagatgacattttaagctgcttttcatcatcgtcgctggctttttattttgtcagcctgttctgcggcttgtgtatgcgtatcgttgatttattggcattattatcaactgcaatataaaacacgatgcggcagacatgcaaagagctcgccaaaagggagcggccaggcgggcttaccaacccattattcgatgaagggagctgaaatgagacagaagctgcaactgtgtggcaaactgagtcctgcgagagagacaaacgaaaaattcatcaaaatgacagtggcaaattctattttcataaattgtaaattgagatgcgcagttcgcggcaatccgacactgcgaagctactttccagccgtggggaatcctccaaccgatgcgacccgtcgaccgtcgcgtgtcaggcgaattatgttaattgtgtgcacatccttgtggccgccacgcccccttctcctgccgcctgtcgtgtgcccgccctaattggcttcggaaatattatttgagtgcaggaggcaatttaagaaaaccaaaaatgctaaacaaattgggatttgctgcgcttagcaaagacggatatctgtatgaagaaggatttccatctttataaaatattaaaatcctttcaattagagcaatctgctgactatctctagttctatagcatttaactccattaactcaagcattttagccaaaccattcctggccaactagcactgccattgccgccgaactcattgagttgttaagcaattttgtagtccctaggccccattaaattgaggcacaccttatgcagatgataatcagcgccctgtgtgattccccgtaaaacaacatccacggacctccggcgaagggtgtgcccaagtatttgcctatgtccagtccatatccatctcccatctctgcacttccagatgcaattgccatttgtaggactggccaacaatggtgggttttctgcgaaccgagatctctgcgctccgcttaatgattctattattaaagtgggcagccaaagtgtctgcgaccggttgctgtcgcactgacaatcatcccataattggtgtcataattaaatttaattgattgcctccttcggctcccccacctgagtttgcaaattaggaaatggacgggccaaaaaccggagacgggagtggcaaaaacaaagcaaacaaaaaaaaaaaaaaaacaacgcagacagttcttgccacacagtaaagagctggctgaaaaacacgatctcggcaagatcacagatcgcccgctgcacatttatgatcttgttaaaattactcggcgttctgctgctccagaatgtcatccgttggaataacagttacacttggtccgatctccagctggtggtattacatggcattcccatctctttttctgccccacgtgcccgggtgcgacactttgcgcttgatatttacgattattaattcatttctcctctatttatttgccttgttagcctcaatggtgagcatccagctcacacattggctaatcctctctagagatggtagcgtgaagaacctaacgtagtaaccatgcacataacttaaatatttcttatataaaagttgtagttctataaaccaaagtatttgttgttctcgtacccatttgaacaatatttctattgagctatcgtgacacgctcacacctgtgatccccgccagcttcccgtccatatgtcgcatttgtcaggcgggctgtaacttttgtcggcattgcattccattcctgcggctcggacgcatatcaatcaccagctgaaaacactcgcaactcccagttaccagctaccagctaccagctaccatttaccagcaaagcagcacccatctccaatcagcttaaaaggcggcatggatcagtcggtggccaccagagccagcccatccagccagcccgctcattgatatgccagtagatcatgccgccggcgggaagacaaagaccccgggataatctatctgttcgcaactaaattttgcctctgcccgtggcagcgatggagttggaggagttggatgcgaggaagaaggaggaggagggggaggaggaggcggtgggtccccagctaaagcgctaacttgcccgggggtccaacgcattttgccactcaagccagcaaatgcccctccaccgatccaatccgaatcgatccaggcgaaactttgtcagcggcgcgcaacaattggaactgattgaaaattccaaatcgggggatccagggggataccgccgacttgcatttccaagtggctgacgaaagccaaaaactgatacgatatgacaacagcaacagcacaacaacaccagtttgggcccagagcaaccagctaccagctaccaactaccatcaggtatctctctctctctcttttggccacatactgacgttcggacgtgtgccgtgagagctgcccaacagagtggccactatccagtgtccactggtcactagccacattcgccggcgatctgcacatgttttattgatgaatttctgttattcatgcaagcgatctgcagttggccacaagaggaggctttggagatgccgaaattgtgcacacaataagctggggcacagtgggtcaagggatagggaaaagtgatgaaaaacggattgcattaccttaggctagcgaaaagcaaacacatatggttttgtgtggcatcgcttttaacaaacattcctactattacaaaataatcaaaaaaatgacatatttttgaactcgaagttagatatacttacaccacagtggaatagatcggtgcgggatttgcaattacctggcgcaggtgatgagggcttagtcgcagtcgcggttgcaatcgtgctctctctttctctccttttttatttatgatttgcgaggacactggacactggacactggacactggacactggacgtgggacttgggacattggacactcgcattgtctccggattcgactgccacgcattttgtctctgcccttttgccagtttgttggcatgcacttcgtgtgtgttccataattaagtgaatttaaagctcacttctttggcggtggtcgttgttgttgctgttgttcctgtgatgtccttgttgtatttttttctcaaggtatttgtgttgttggttctgcgacatgttccacgtttttgtcacacattttcaccgatctcgagtgtttttttttttatttggctcatttcgcgtatttccctctgtgctccatttgctggctatcatttcctgatccacatctggcgtatgcgtaatgacttgaattacactgacagccatgcaattggcatcgttatcggtggtggtcattaaaatcgttatcgcgtgacaagcgaagagcgttcgactttttaatttgggtaaatggtggggcaatcaaaaaattgactacaccaccactcaaacaccgaaagcgttgtaacaaaaaccagaaaaaaaatcgaacaaaacaagtgtgggtgggaaaagctctcaggcgaacaacaatcggaaatttgccactcttgcatttatctacgtcattggcgttttcttcgctttatttcaattttctatatttgccagcgttttgtccaccgcagcgacaaataaactaagtgccaactcccggccaactaccctccaaaagacccgcccccttttcgctggcaacaaatagaattgacattttgtggtgtccaatatgcaaaaacgtagggagaagagtttttacggacgaggcaagaaacagggtgctctcaatatcgcagaaacattttaaaattcattacaagtatatattgcaaaaaaacacattgaaagcacaccaaaatgatttgaatagtgcaatattttttcagccccaccgggggcgccacaaatatttttcaagataaaacaaaaattaaactcattgtcaataataatataatatttggatacatacataatataaaccaacataaaattatgtactttaaccagtttttataagtttcccattttcataacgccaactgtgctgcgtgaggtgagccaatgttttgggccattcattgcatgccttgataatcgcgctcgcgctaaaaacgatgacaaaactgctgctagttgttggctacagttttaattttctaaatgcattccagccacctggacgggctggttgtcgtggttgtcctgcgccgcccgagaaggtggttattcggagggaaaacgtgaaacgagtcctggctgccagttggactgctcaaatattcaaagcgaggcaaatacaaaatgtgaaaaaagagacgattttgacggcatttgcggtcagcaatcgacagtacgcccatgaaatattgggcagacattccacgcagacagccatagtgtgaggaaccataacagttaattatcgataaagatattgaggagcaacgcatatttctgcctttttattgcacacacttctcccctccccaaaataaatagaacaaaaaaacatgaaagacccactcgtttgggatattattttcatagtctctgacgattatctttgaagtggaaacaattgagtttgagtttgaatttgaggtgtgcgaactgcacttgatttgcacctcgtaaatcaatggatttgcgaattgaatttttgcatttcaaagaactcctatgttcgccgcatttgcatatttgtagacagtctatgtctattgaaattgaattattaatgcaaatttcgaacggtttgcacttcgcctcactttaaattggcactcacatttttgccaggctgaatttaggtttgctcctgggaaatgtagtttattaaatcataaatacgtaaattcaaaagcaaaattttccattgaagttctaaaacatttctacaatgtgatgaatacaatgatgaatagacctattgcactatccattagttattataagttaagataattgtgacattttcctcacatcttgatgactttgttaaccctttaaatagccgcatccattccctgaggttatcgcaatgaattaaccaagcgaggactaatgtgcataattgaaatggtcctcttgagcaccggcatttggattaaaaatgcacagatccgaactatatgcacattgtctttgtctcgactcatcatcttgggataaactcatctattagttggtgtttggtgtctgtgcgattctgttagccattccctcggccatttacccctattgcataattaatggcattaaaagcgttaactgacagtcaacacactccggcacacacatgccaaaatagttggcataattcgggcatttcaatgaggtcgataatttgatggttcgatggagagcaaagggataaggtcatacacgtacacacgcatgtcgtcgtcttcagatacatttgtatcttttttgtggccattctatctgcgtctgatgccagctacttttatcgttgtctgatatctaacctcgcactgtgtgcgtgtgtgtgtgtgtgtacaaaaataatcagtttatagatgaagaaatcccaagaacaacaagcaaccagctcttcacccccccccccccccaaaaaaaaaaaggaaaacaagaccattcggaaggtatttccccggtcccagcggcatgactttcggtcccaaagcaaccccaaaaatatatatacatacatatatctgttgttatatgtatacaaaataaacgcgatgtgaactgagctggggctcggttaaaagctcactcaaatccataagatgcactcaaagtatctggcactcactttcgctctctgtttttccgcggagagcaagcctcctcacgcaccaagtgaaagtgttttcaacaagttctcttccggcaaaaaggataagcgtatcctgcagacggcacgcagcccgtaaagttcaccatccccacgcacaaaaaagtctattataatacaaaggagaccagaagatatagaagaaaaagccatgaacttcagaatgaaactcggggttgggcggaatggaatggaatggtggcgaggaatcgcagtcgaaatccttgggctgcttggcttggctcctgccggagcgtggagcgttaagccgagaaggaacataaataaataaagcccaagcaacaatagaagcccaaaatggtgacttcatccttgtcgacggccatgttttcgtgacgctctcgctttttgtattgtgtacatttttcggtggagaaaatgccaaaaggcatagaaatggcgcgaaagtaagttttcgcattattttccgttctcctccttcgctgtcattgccccatagtcattgggtttatgcgacaataaagttgaacatttttgaatattatcgttagtgaaaaattagagacaagttgcctacccccccggggcagttgccccgccaccaatctcaccacctcacctgagatccttttgccttggcgtgcgccaaaaacgctctcggctcctcacgaccgctgttcacgccatgaccagataatatcggcgggaaaactgggtggttgggttggttgggatgtggaaggagcctcctggcaaagcgatttatgtccttttcaaaattcatcattaaatttgtgtgctgtttggcgatgcaaagataatgccacaatttgttgttcgcactcttgttgcttcgcaaatttacagttaatagccgggaatccttgcaaaccgtaaacaggacaaaacttttgcttttcgataaagatactgggaatttattttaattttctgtgcctcagatggccgggataaagtcgatggcttaagcttagagttagaatttagtaggagcactaaatattaggttataaatagcttgaacttattaacaatattatactatcagcttaaaagttaatatttatatttaagtaccatccttaaattccactttgtgccagatagagcttgaagtgctatcttctgttcaattggcactttttagccaatcgggcagaaacatttaaggacattccgagcagctaaaaaaaaacaaaatctccgtccaatcgaagagaaacgccgccaagtcgccatcccctcgcccaaatatgaatgaccaattatgcacttcgttggcgctacgtgaccgagctgccaattttgggcccatcgaaaatcccaaacggaggtgtcccgatgtcatgtgcgaacatttgatgatgcgtagcttttcattaaatgaaaatttcgcgttgctggcaaaacaaaaggacaaagaagcggccaaaggcgctaactttgctggcaaatggaaggccaagatgggagacactttgatttattgacaggacgcgagtggaatttttaattgccaccaagtgggtggtggttgtctatggttggttggttttaccgagggaaaaatccttgaattggtcaggacttgtgttttcggttagatttccccaaaatgcaatatcctcgtcttgaagacatatgcaaatgggagggggcaccgcgtgaatttatgtgtcctgtcaggatattttgaaaacattgtaattcaagcaagtcgaggggcaggatgcttccgagaaagtcaattagctgcccataaaaatgcaggctggcctcgaagtgatgatggctctggtgtctcggggatgaagtcatcgccgggcaagtgaaatcattatcctggaggatcccccgtccttagacactcgatccgtattcaaatttcaaactgcagttgcatctgtgagtttccacgttcgttgccgcaccgtaattcgatattgtatctgacagatatacacggctctcaaatctcgagggatggcgcactggattgcttgtgttaatgatgatgagcccgctccgatgctcttttttttccgtaatggataacatccatccacatctcacatctgttttttcttcgcaaagtccaacaagttcacaggcattctcgataagcaccacacttggcttttaatgctgaatatacaagtaatacaatacaaatttattttagtaagccgaagtttctatgccctagcaattttagaattttagcaattttatttacatatttgtaaataacaagttttatcattatgtttatgaagtatggtatactatagtactatatttaaaaaggtatctagttcaatttgagatctattgtatatagaaaacacttggtgatttcgttactataactttaaaacccgttttcagggtataagttttacgcataaaactaataaataacttgtttacactttgtgatttggacttattggatactactcaatggtttagttttatcagtgttaatagaaaatattgcttttagtggttatctcgagtgccagtttcttatcgcccgctcagagatttatatgctttagaaattcaaagagcaaaagagctatttaggctgaagtttttatagggagaccgaattattaaaaaaaaaaaaaaacaagtgtcggaagtataaacaaatttgcgacactcccatcggacaaggacatatgcagatgccacccgctggccagagatcaaccctccagctgcctgctaatttgttcaatttgtcgagtggcaaacaacggagaaaaaatatgatgaaaattgccggcacaacgccgccgcttttccatctctcccccccccccccccatcgctgatcggaaaggaaaatattatttcggcaaataaaaagttggcaggggatttcagatagggcgtatcatgtcgccggcggatgcataaaagtatttcagcatttaaatgcaacgcacacgggtgtcagtttccattggattggtttcgagacggattgggttgggttgcgctgggctaacaggctcacatcctggccgcaggacattcgccggctgtcaccccacttatcgcagtggcactcactaccgccgcgggccaaacatctgcccagaaaagccaagctaaccggcacaagtggcagcaaaaaggcgcaacccgtcattagcggctcgtaaagtcgccttcgaggaggcgaacatcgtaaagactcttaattgaagctggcataaatccacaactgattgataattgccagcacaatgggaaaaacgagtccaatgccatttatggtccatcctcagtctgcccctcacaaatagaatagctgcaggaatggttattgagaccttataagtgctatcatattaacatataaaatatttaatctttgctttaaacaagatacagcaaaatgccactaaagtttagctttaatttctctcattcttaactaaatatcttaaaaaagtcatcttttgtgtggtttcgaaactagggatttagaaatgtcataagatacttatttaatgtaacacttgattaatcaaatcctcactttcttacagcttcttcctgaaattcttcttgaaatgcaatcaaaactgtctgaaaaacgctggcaatccgcgggatatgcgccgatttcaggtgagtggaacgcctatgctactttcgcaacgatacagatattaattgagaatctcctaatgccaggtggtaatttctacgcaggtggccgtggatggaccactattggccatctccgacaacatgttcgtgcataacaattcgaagcacggacggagggccaagcggctggacaccacggaaggtacaggcaacacatccctgtccatttccggtcaccccctagcgcccgacagtacctacgatggtccgtagcaaaattccaattattccgaccaatttttcgttttacgtagatccaagaaatcccccacgaaccccaaagaatattcccaattttttgtttttttccgtagcaattggcaaacctaaagcagtgaaagcggttagatgtaatcaactaacccatccatttgtggaatccctttccaggtctctacccaccgctgccagtggccacgccctgcatcaaggcgatctcgcccagcgaaggctggacaaccggtggcgccaccgtgatcatagtgggcgacaacttcttcgatggcctgcaggttgtgttcggcaccatgctggtctggagcgagctaattacctcgcatgcgatccgggtgcagaccccgccaaggcacatccccggcgtggtggaggtgacgctatcctataagagcaaacagttctgcaagggatcacccggtcgcttcgtctatgtctgtaagtgattgcagctaaatgacttcacgactgtgcttcatatctaaccttttgattaacgctttaagcagctctcaacgaacccacaatcgactacggtttccagcgcctgcagaagctcattccccggcatcccggcgatcccgagaagctccagaaagagataatcctcaagagggctgccgatctggtcgaggcgctgtactccatgcccaggtaagagctttgctactagcttagtcaagcggcggaaactaatatccaacccgtgttgcagcagatctccgggcggctcgacgggcttcaattcctatgccggtcaactggcggtcagtgtccaggatggctccggccagtggaccgaggacgattaccaacgggcgcagtcgagcagcgtgagtccacgtggtggctactgcagcagcgcctccacgccgcacagctcgggaggatcctacggtgccacggcggccagtgcagcggtggcagccacggccaatggctatgcacctgcacccaacatgggcacactctcctcgtcgcccggcagcgtcttcaattccacgtcaagtaagtttctcgatccttggtgaacaatccattaaatgtcctgcattcattcttctgacttagagagatatagcctttgaagatcttatagtcccatcattaatctaacccatgtctcagaatgccccgatttcgtttaacatcttcagttgattttaacttatgttcgtataactctcacatgaataccgcccccacataaactgagaaacctgtctcgcctccacatcccgaattgtccccactgcccaacgattcccgaacccaaacaaagtgaacaaagtatgctcagcaaagtgcattttcgccattaattccaacagtgtccgccgtgtcgtcgacgtggcaccaggcgttcgtgcagcaccaccacgcggcaacggcccacccgcaccaccactacccacatccacatcagccgtggcacaatccggccgtgtcagcagccacggcggcggccgtttaagcatttcccggactcccaacgccagccagatggagctgaacggaggatgaggatgaggacaggatgagccggacttttggggccgagtaacgacattttgttgaaattaaatgccacacgcccaatgccaaacacccaaccacccacaaagaccaaacaccagacaccatctatcaatccgaaactgcaaggacgcccacaattggccaatggatgggtgggtgtgaatggtgggtgtgtggatggggctgctgaagcaaatctgagcattcaaaacacttctccaacatcaacaaaacaccacagacaacacacgattaacggtatttataatttgcattatccttgagacactaaattgatttaaaaaaaatatatatatatagagttcccactttggtagatttctgttaaattccctaattgttccctataactgaaacatgcacttataaaataactaatttaatatttgaattgtttaactatttgcaggggtcagcagcctgagcttcaatcccttcgccctgcccacctgcaatacacagggctatagcacccaactggtgacgtcaaccaaataatattactactaaatgaggctattggcaggccccaaatccaatccaatacaccccctccatcccacaggagtcgcagataccacgccaatcacaagaagctcgaaagtgcaataaacaaaagaaaatggttccaaaattcaaaaatctattaatatagttgtacattttttgattgaatgccgtttttaatttaatttgactaatttaattaatttgatttggtaatagatttatagacatacgcatagaataccatatcaaagtaatggaaaacatatgatgaagggaaggcatatcatgcaagaacccaaaagttaagaacgggcagaactaattctaaaatagcttacatagcatacattttgtaaatatttatcccaaagtaaataaaaaatcgtaattaataatcggaactgtgaatagaggaaattatacaaaatatatacccatgatgaacaattctaatacgaatcaagatataccaaaacagatacaatttgaaagaacttttggacataattaactaaatgcttgtatacgatactttcttggattaatatcgaaaaaataaataaataaataatgaaaggaaagtcttggaaatacactctgccagtcgagagaaccgaaatcaaaatgttatatacctacatagatatacaaaaagccagatttgcagcatatctacgcgtaatattacaacaaatttataccaaacttttggcaaacatatcgtgcacttagtcctaatatccaccctaagcgaacatatttgtataatgcccatcatatccacaattcaaaattcattttgagcgaaccacttacctatatcaacaaccaaatcatcaaattagacatacatacatttcgctattcaagtcagtgtttgataaactaccgatttgttgactagaatctaagcctagcatactatatatatatatatataggcttaagtttattgtttattgctcgatttgtaggagttttactgtaatttgtattcgtattgtatgataatgtacgcttgcactcctagatctacaaaatattgaagagaaaaacgaaatggctggctacgcaattggggagcggccaatacaagcatatctctataagaaacgcataaacagcagaacttagccgcaaaatcgatttgtaaattacaatacaataatttataataacaatctagcaacgctctctgttttgtaaatcttaacaagttatttaaataaaatttatttaaaataaacgtaatacaccatgaaatcgccttttccttaatttattgtagtgctttatttgagttttaagtaaaatataattgggaaatatacaatcaaagtaagtattttcaatcgataaaagagcataatttaaatgaatacataacatatgtataattattaacctagattacgacacgctgatttgcccatttaccatatggtttccttcgttcctcgttttattattcctctgggtaaatgtatataatggaccgcctactcatccttggcaagcgttgagtcctcactttccttgaacagtatatcctggatcttggaccgcacgtacatcttccgactgagcgaaaggtggcgcattgcgggcaccaagctaagtgcaaaatagtagtcgtcgtccttggtgagctcctcgtgattctgttgtatgatgtagctgagctgttcgctgacagcggtcagccgttcgatggacgtctccaggttgttcttcagctgcttggccgagctgctgctggaggacgtggaggccaccacagtagcctgtacgcccgaaccaacaccgatgggcctgctacttccaccggctggtgaagtcgaatgggttagcacggtcacttgcttctcaggctgatccaggccctcatcatccatcacgtgtataggactatagcacagtggatcctcgctgtatatgatgtccttaatgtcctcgctaatctcatcgttctgctcgtactcctcccacttttgcggcagggcgcccgcctcgcccagataattggcgacgttcgactcgatcttcggcttggccacacgcagcggctccctcagcgtcttggccttggtaatccgcacggttttgtctgcaatgcaaaggatggaagcgatggttaatacgatacatattggtacagctaccggataataacaaaaatatcataacccagagatgggcgccggcgatagtttcccgccgacccaagggtcgatagcccgccatacgaacttcgctggaa

SEQ ID NO: 21575 - DNA, 3927 bp, DROSOPHILA
agttggggtttaacagccactcgggacggtagcgcgcgccgctcaaacttgttgcgagaccaattttccgaaaatcccaaattctctacggtgcattggccagttcacccaaaaacacccacacacacacacacacagactgtctcactttcgtttcgcgattgattgccagctctccggagaccaagaaccaaaataatagaaaagggaacccaataccaatacgacgccgcaaaccgatcgagttataaatacaatacgcaaataaaaaactaaacaaacagtaaaacgcctagcaaagagccttcaaaacggcagccacaatttccagcgcaggattaggaggagacgtagccgcgtacgctgatctccaccagcactcgcattcgcaccatccgaatccgcatccacatccgcatccccatccgttcgccaccgacggcttcaagctgcgttccgaagagccggtgccgggcttcagctcggcctccccctggcccaccctggagctgggcatggagtggggccggaagctgtaccccagtgccgtttccggtccgcgatccgccggcggcctgatgttcggcctgccgcccaccgccgctgtggacatgaaccagccgcgcggtccgatgacctcgctgaaggaggagccgctgggcagccggtgggccatgcagccagtcgttgaccagagcaatttgggcattggccgcgcccactttgaaaagcagccgcccagcaatttgcgcaagtcgaacttctttcacttcgtgatcgccttatatgatcgggctggacaaccgatcgaaatcgagcggacggctttcattggattcatcgagaaggactcggaatcggatgccaccaagacgaacaatggcatccagtaccggctgcagttactctacgcaaatggagctcgccaggagcaggacattttcgtgcgtctcatcgattcggtgaccaagcaggccatcatatatgagggtcaggacaagaatcccgagatgtgtcgagtgctcctaacgcacgaggtgatgtgcagccgctgctgtgataagaagagctgtggtaaccgcaacgagacgccatcggatcccgtcattattgatcgcttcttcctgaaattcttcttgaaatgcaatcaaaactgtctgaaaaacgctggcaatccgcgggatatgcgccgatttcaggtggtaatttctacgcaggtggccgtggatggaccactattggccatctccgacaacatgttcgtgcataacaattcgaagcacggacggagggccaagcggctggacaccacggaaggtacaggcaacacatccctgtccatttccggtcaccccctagcgcccgacagtacctacgatggtctctacccaccgctgccagtggccacgccctgcatcaaggcgatctcgcccagcgaaggctggacaaccggtggcgccaccgtgatcatagtgggcgacaacttcttcgatggcctgcaggttgtgttcggcaccatgctggtctggagcgagctaattacctcgcatgcgatccgggtgcagaccccgccaaggcacatccccggcgtggtggaggtgacgctatcctataagagcaaacagttctgcaagggatcacccggtcgcttcgtctatgtctcagctctcaacgaacccacaatcgactacggtttccagcgcctgcagaagctcattccccggcatcccggcgatcccgagaagctccagaaagagataatcctcaagagggctgccgatctggtcgaggcgctgtactccatgcccagatctccgggcggctcgacgggcttcaattcctatgccggtcaactggcggtcagtgtccaggatggctccggccagtggaccgaggacgattaccaacgggcgcagtcgagcagcgtgagtccacgtggtggctactgcagcagcgcctccacgccgcacagctcgggaggatcctacggtgccacggcggccagtgcagcggtggcagccacggccaatggctatgcacctgcacccaacatgggcacactctcctcgtcgcccggcagcgtcttcaattccacgtcaatgtccgccgtgtcgtcgacgtggcaccaggcgttcgtgcagcaccaccacgcggcaacggcccacccgcaccaccactacccacatccacatcagccgtggcacaatccggccgtgtcagcagccacggcggcggccgtttaagcatttcccggactcccaacgccagccagatggagctgaacggaggatgaggatgaggacaggatgagccggacttttggggccgagtaacgacattttgttgaaattaaatgccacacgcccaatgccaaacacccaaccacccacaaagaccaaacaccagacaccatctatcaatccgaaactgcaaggacgcccacaattggccaatggatgggtgggtgtgaatggtgggtgtgtggatggggctgctgaagcaaatctgagcattcaaaacacttctccaacatcaacaaaacaccacagacaacacacgattaacggggtcagcagcctgagcttcaatcccttcgccctgcccacctgcaatacacagggctatagcacccaactggtgacgtcaaccaaataatattactactaaatgaggctattggcaggccccaaatccaatccaatacaccccctccatcccacaggagtcgcagataccacgccaatcacaagaagctcgaaagtgcaataaacaaaagaaaatggttccaaaattcaaaaatctattaatatagttgtacattttttgattgaatgccgtttttaatttaatttgactaatttaattaatttgatttggtaatagatttatagacatacgcatagaataccatatcaaagtaatggaaaacatatgatgaagggaaggcatatcatgcaagaacccaaaagttaagaacgggcagaactaattctaaaatagcttacatagcatacattttgtaaatatttatcccaaagtaaataaaaaatcgtaattaataatcggaactgtgaatagaggaaattatacaaaatatatacccatgatgaacaattctaatacgaatcaagatataccaaaacagatacaatttgaaagaacttttggacataattaactaaatgcttgtatacgatactttcttggattaatatcgaaaaaataaataaataaataatgaaaggaaagtcttggaaatacactctgccagtcgagagaaccgaaatcaaaatgttatatacctacatagatatacaaaaagccagatttgcagcatatctacgcgtaatattacaacaaatttataccaaacttttggcaaacatatcgtgcacttagtcctaatatccaccctaagcgaacatatttgtataatgcccatcatatccacaattcaaaattcattttgagcgaaccacttacctatatcaacaaccaaatcatcaaattagacatacatacatttcgctattcaagtcagtgtttgataaactaccgatttgttgactagaatctaagcctagcatactatatatatatatatataggcttaagtttattgtttattgctcgatttgtaggagttttactgtaatttgtattcgtattgtatgataatgtacgcttgcactcctagatctacaaaatattgaagagaaaaacgaaatggctggctacgcaattggggagcggccaatacaagcatatctctataagaaacgcataaacagcagaacttagccgcaaaatcgatttgtaaattacaatacaataatttataataacaatctagcaacgctctctgttttgtaaatcttaacaagttatttaaataaaatttatttaaaataaacgtaatacaccatg

SEQ ID NO: 21576 - protein, 575 aa, DROSOPHILA
MEWGRKLYPSAVSGPRSAGGLMFGLPPTAAVDMNQPRGPMTSLKEEPLGSRWAMQPVVDQSNLGIGRAHFEKQPPSNLRKSNFFHFVIALYDRAGQPIEIERTAFIGFIEKDSESDATKTNNGIQYRLQLLYANGARQEQDIFVRLIDSVTKQAIIYEGQDKNPEMCRVLLTHEVMCSRCCDKKSCGNRNETPSDPVIIDRFFLKFFLKCNQNCLKNAGNPRDMRRFQVVISTQVAVDGPLLAISDNMFVHNNSKHGRRAKRLDTTEGTGNTSLSISGHPLAPDSTYDGLYPPLPVATPCIKAISPSEGWTTGGATVIIVGDNFFDGLQVVFGTMLVWSELITSHAIRVQTPPRHIPGVVEVTLSYKSKQFCKGSPGRFVYVSALNEPTIDYGFQRLQKLIPRHPGDPEKLQKEIILKRAADLVEALYSMPRSPGGSTGFNSYAGQLAVSVQDGSGQWTEDDYQRAQSSSVSPRGGYCSSASTPHSSGGSYGATAASAAVAATANGYAPAPNMGTLSSSPGSVFNSTSMSAVSSTWHQAFVQHHHAATAHPHHHYPHPHQPWHNPAVSAATAAAV

SEQ ID NO: 21577 - DNA, 4978 bp, DROSOPHILA
gttacaaatgtgaacctcgaattattttaaaattggaatatatcatattatatttttatatgtatattaaattatgagacgtcacaatgcgtacatatgtaggtatttccgaacaatacaaatctgggcatcaaaatagtagatcgtatcgggtaacaaattgtgattcaaacgtttacaaaatttttaaatttatatgtaaacaaattcaaatagaaactgcatcaatctaactccatgttttgggataaataggcgataaatgaattttataaccaatatatcgcgacaccgtaacgtgtgccttattccggccttaagtttaaatgacttttaataatacatcaaaaacctaattcaagtatatattaagcccacggacattcaactgcaaagccgtcgcacgtaaaaagtcaataggatataggattttctaatataggaccattacctgattggtatgccgcccatcacctgcgacgtaaccgtcatcgtactgtaatcgcctgagaatatgtttgttttcaaggtaattattgatcctaacttccatgttaatatcgaatccctacagtcacaatggcgatcataccttatatacacacatatataaacatatgcgtgcatatatatacatacgtgtaacaagaacaaagtttccgttttccggcttgaccgttattccgaggtggcacgatttggcaactaagagccattccaaagagagcattattatccgctgagcaaagatgctgtttcttggtaaacccgaagacgggacgaagatattttgccgaaggccttagagctgagtcctgaaacgaagacgtttggcttactttgcgccagcgacgatggcgacagcgatgactcgacttcaggccgactccactttgcgtgcaagttctatttctaaacgagacgtgtctgaacccccagcaacagtcatatttatacttgtccgaggcggcggccaaattagtttttctatgactcgcgggccgccaggttatctgtagttgtttgctgggagcgacttccaagtctcagccgtaatcgtaaccgtaatcgaggccgtgcatatagacagtcactgtattcttccaacaaaaaaaacctcgtaaagaggtaaaagcaaccgaaatacgcaccaaaccaccaattatacaaatggcagcaagataacatttcgctccttttcgaacacttgcatacgcgacacattgcttattattggttttattcacaaattttggtttttttatgctttgaactttagtttcttttctttaaaaagtgattaaaacagtttggtgactatgttccatccccaataataacaaacaatttataagtgtccatgtgcgacgctaggatattcaagaataagtttcctaattgacctgtgtgttttatttatttcgacgcaactacgtctacgaggaaatatattaatttttcaaaaccgatgccaacatatatgtggcttggtaacttaagtcgtccagaaactggcttatacaagaaaccgtattcttatatattaaggctctaccttcgattgcttttaaatcaaattgtctataaattgaatcagaaacgttaaattctgggacaaaagcaattttggtagactgacttttttaaacagaatgaccgatatattagctatggtgtttatatatatattttaaatatatatcttaagagacgtatgcgtatctcacgtttttaatatatacaaaatacggaagtaatttaataattcttaatttgatttattaatcgaaagaatacgtgtaaaaaaaagttagatcattatacacttttttacttcatggttttacttccatggtttggcttaaaaaaaaagcactccaattttatatccattattttagaggaaatcatcctgaggcactagagaaatgttgttatttcttaatgatttaattgataggtatactgcttcaaaaaagctaaagaaatttttggagaaagccttccggatgtaactggcgccaaagcagtcttttcttgtccgaaaactttaaacaacattttcttaaaaaccacgattttcaaaattatgtaagttataataaacaatctagtaagccaattttcatcatctagcattcattttaaagagcataaacatttttcaaaaaaatttttgtcagtaattggcagggttacttttggaattttgcaaacatttctgctcattgacaataaaaaacccgagtaagaaaagaaaaaaagtttgttgaattcagactaaaatttcaaaacttttgttaaaacgtttttttattacctctgccatgactatcgtagagtaaaaagggttaagcatttccgaccatataaagtataaatactcttgatcagaatcaatagccgagtcgaactggccatgtccgcctcaacctatgaggattgaaacaagcattcattctgaatacatagacgcagcgcaagtttgttgactcatattgtcacactcactctaacgcccacaaagcgccttaacctgccacggacacctttttgaaattcgaaatatttcgttatcttttcatatttttattagttttgtaaatttatatcgagttgcaaaaaaaactattccacgccaactataactcccacaaaccgcccaaaaatgccacacccactcttttaagaaatgattcaattttgttggattaaataagtcgttttccttatttcaatctatatgccgaaaacatattgaccacgcccactctgacccctaaaaccgcccaattttaaaaattcaaaaaacccttttacgcttaacaactttttttgttttacaggcaataaaatgatatgaaattacgatgctttaaccaggcccaaacttcgcacagttggcaccccagatccgtgttcagggtcgtaagcagttgtcctcccgatcgaaaaaaacggccaagcccagcgagctggcaaatctgtattggccatctcctaacaaattatcttggaatgtttaaaatggactccgcagacttctggcagcaagcgcgtgctccgtttggtctgcaaactgcgcttcaccaatactcttcccccccgaatcaacagccaatatcccaccacgccctgcaccactccgttccgcaggagaacgagcagttggccggagttcaaccagaaggtccagcagcaggatcaggcgtagtgggcaacaacagttccatggcaatttccggcaccaattcaactgtgggcagcaaggcggagtccagtcacattccgcagcagcactcagagcagcagtcatatggaagcgactccttccgaggaacgcagtcgccccagctgagtagccaccacctgttgtttaacgccgctgcagccgctgctgcggcggtccacctcaagtccacggcgatgcagaataacctctcgccaataggcgatcaggtgcaaaataaccttcgcaactacggacaaggatccttaaacgccttatgtgggatcaagcccaagcaggagatggatgcgaagacgcccctacagccgttggacgagtgtccccaccctctagttcaggcgcaggcccagtcccagtacggcggagactactacgacgtggccgacccacaggctagagaaatctcggaaggtcgagcactgataatcggactcggagcacccagtacggtgtccaccgacgatgcacagtccagtgcgccgtctcatcagctggcagggactggccgagcattgcagactcatcagtgcaagccaatgtcccctggaacagttggtagctcgaatttgggcgcaggacgaagatccgcacccacaacaataagcaagaccttttcgcagggtcagcagtcccctcagcactctacaacgccatccggaggcagcacgacgcccgacatcaaatacaataacgacaaaatggccaatgaaattcaggtattgttttgaagatttttctgcttatctatatactttaaagggaacctggtaatcgaatattcgatgcagtccaaacaagagtagtaaaaaatcaacagagaacgctattcgagtttttagactagactatatgtacacccgatatttagctgttacgagcgcaacaatgaactttcaaaattgtgtgactgttttggacgttttgcaggtgtaagtaggggcgtggccaaagtgtttttggtatgtcaataaaaattggcaagacaatgaaaacgaagattaatcaaaacattttttgtgggggcgtggcaaacagttttttggcaaatcgattttattttatcgatgaaataatatgaatacattttgcaagagcgtgggagtggcagttctggacgctttgtgggcgttagaggatgcgtagcaacaaacttgcgctgcgatctatgcttaatctcaactttctagcttttagttagatagtttctgaaatctcgacgttcatacagacggatatggccagttcgactcgtcttttgatgctaatcaagaatatatgtagtttatatggtcggaaacgcttccttctacctgttacatacctttaaacaaatctagtatacactttccctctacgagtaatgggtatgaaaacaaaaatcaacacgcatcaacgcattttggaaagttgaaggcgtgatagtttttgtgtttaatgggaaatacaaatttacaaatttgtaaaatgtaaaaacttctagaatacaattgtctaatcttaactttcaagcttttacagttcctgagatcacaccgttcatatagattgacatacggacggaaagactaacattgccggattgactgtagtagttcactgtattttaatgtattcgtaacaggcataataaaaaaaaaactaatttcataatcacatctaaagtacaaatggaatgacatccattcgtactgttgaagataaagtaatgtaagggtttgtatgtattta

SEQ ID NO: 21578 - DNA, 1260 bp, DROSOPHILA
gccgccaggttatctgtagttgtttgctgggagcgacttccaagtctcagccgtaatcgtaaccgtaatcgaggccgtgcatatagacagtcactgtattcttccaacaaaaaaaacctcgtaaagaggcaataaaatgatatgaaattacgatgctttaaccaggcccaaacttcgcacagttggcaccccagatccgtgttcagggtcgtaagcagttgtcctcccgatcgaaaaaaacggccaagcccagcgagctggcaaatctgtattggccatctcctaacaaattatcttggaatgtttaaaatggactccgcagacttctggcagcaagcgcgtgctccgtttggtctgcaaactgcgcttcaccaatactcttcccccccgaatcaacagccaatatcccaccacgccctgcaccactccgttccgcaggagaacgagcagttggccggagttcaaccagaaggtccagcagcaggatcaggcgtagtgggcaacaacagttccatggcaatttccggcaccaattcaactgtgggcagcaaggcggagtccagtcacattccgcagcagcactcagagcagcagtcatatggaagcgactccttccgaggaacgcagtcgccccagctgagtagccaccacctgttgtttaacgccgctgcagccgctgctgcggcggtccacctcaagtccacggcgatgcagaataacctctcgccaataggcgatcaggtgcaaaataaccttcgcaactacggacaaggatccttaaacgccttatgtgggatcaagcccaagcaggagatggatgcgaagacgcccctacagccgttggacgagtgtccccaccctctagttcaggcgcaggcccagtcccagtacggcggagactactacgacgtggccgacccacaggctagagaaatctcggaaggtcgagcactgataatcggactcggagcacccagtacggtgtccaccgacgatgcacagtccagtgcgccgtctcatcagctggcagggactggccgagcattgcagactcatcagtgcaagccaatgtcccctggaacagttggtagctcgaatttgggcgcaggacgaagatccgcacccacaacaataagcaagaccttttcgcagggtcagcagtcccctcagcactctacaacgccatccggaggcagcacgacgcccgacatcaaatacaataacgacaaaatggccaatgaaattcaggtattgttttga

SEQ ID NO: 21579 - protein, 372 aa, DROSOPHILA
MKLRCFNQAQTSHSWHPRSVFRVVSSCPPDRKKRPSPASWQICIGHLLTNYLGMFKMDSADFWQQARAPFGLQTALHQYSSPPNQQPISHHALHHSVPQENEQLAGVQPEGPAAGSGVVGNNSSMAISGTNSTVGSKAESSHIPQQHSEQQSYGSDSFRGTQSPQLSSHHLLFNAAAAAAAAVHLKSTAMQNNLSPIGDQVQNNLRNYGQGSLNALCGIKPKQEMDAKTPLQPLDECPHPLVQAQAQSQYGGDYYDVADPQAREISEGRALIIGLGAPSTVSTDDAQSSAPSHQLAGTGRALQTHQCKPMSPGTVGSSNLGAGRRSAPTTISKTFSQGQQSPQHSTTPSGGSTTPDIKYNNDKMANEIQVLF

SEQ ID NO: 21580 - DNA, 3454 bp, DROSOPHILA
acctgttgagatttcggcaattccccaagcaaatcccatattcacatcttgttcggaacatcgccacccgccattttctacgtattttccccgtttcatattcttcgtggtgaaactagtagtttttgtcactaccgcttttgttgtcttagagtgcactagttttttaatcatcgctaacagccttggaggctgtaaagttccacttggctgccctaatacactaaaagcatttaccaacactgcctgccacgccccctgaaacacgcccgattaacccccacacgcccaccggcaattgtttgtgctcatcggtgcaagcactcggcacatatcgccatctctttccaactgacagtggcgtacgcaggataaaaaggggtcacgaaacacctgcgatgatttataatatatttgaagattatagaaagtaaaaaaactaaacaaaggtataatgaaattctgaaatatactaacattattgaaaatttcctataagtcaagtaaacatttcggaagtgctactaatgttttgtaacttgttttgtcttttgtgatggttaaagggtttttaaaaggcaacatctttaattattttctttcgattctttaactctactgactacattgtgcatattcgtattgatccccttgaaccgaaaccctggtacgcccctggttcattcgaaacatccatcactttttgctgcgaagtgaaagaggatgaaggatataggatgcagatgcaggttacaggatggaacttttaagatatggtatgtgggatgcaatcatctagagtgggcaaaacaaaaaaagaacacttcagatgcggaaaccgcaatgaatacactgcgacatctgcaaggggcgtggcagtgcgcccaattggaagcaattaatcccacaaaccaaatggcaagcgaaaaaagcaaagttctttgcgagctcttatttctgagttcataacaaatatcctgttaagaaggcaccgtgtcagttaatttactgtaatttattaaagtttacactcgaaaaaaaacctatgttctatttggatgagtaagtggattcggtcttcttgatattgagaacgccgttggaatcggtggcaccctggatgttggtcaccttctggttgccactggcatcgacaacggccacggtctgctggatttgggtggcgggaatgggtccaactccggagatgtgctgatagctaccggtgcttcctactccgctgttgctgctgatggaggctgcgctggtgtagccattgtaggtgggataatagttgtcgcctccagttaaggagctctcgccgaaacgctcatcaaaggacacaccactggaaattaaaacgatcattagtgatcatcaatagaagtcctcattttccagttaactcacccaagcactggagcagcggcctgctgggtgtaagaggagccagaatgaccggagccatcggcattctgaacgctgtgtgaggcgtaggtgaagacgtttcctccactggaggacgaggaggatgatgacgaggaagacgaactggactgacgacgcagacgcctcaggagatgggcattcacgggatggacattcgactggtggccctccgagtccaaggtgaagaaggcacggggcagaaactggccagctgtatgaataaagagcaatgaattcagcgataagtatctgaaatctatgaatatagctttaaagcttagatttcgttcacatctcgcccttatttaccacgattaaatattttatgaacttttactattgaatttatttttaatattatgaaaacctttgaataattacatatacttagcatatataccatgcagatttattccaagttttttatgataatgctaatcccaaaagtatgcttataaatctcaaacattcaacaatggcaatttcttttttgagtgtgaaagtttgtccactcagcgatcgcgtgaataatcaaacgtaatgctgattttgaatagccatattttaggaatcgtaataaaaagcgaatttgttgtgcggaaagttttgctggacaaacattgtcgcaaagttaatgagctacgcgaatttcacaaaccagtttgggtttccggatgggttcgataggtttttgggtattattaacatactagcacccgtcgaccgacttgttaattcaattaataataaacacgatagcagctccgactagcgatgatgtaagtgcacaatccggcttaagctctcctcaaattatactcaaatttgcttttttgctcaccggaagaggccgaagcggtagtaatcgcaaacaaagcgatggcaatcacagcgtacttcattgtgaagcggtatggatctgtaagaacacacacttcgtcacttagtagggttaattcagcggttaggggtatgcagaggggcctatctgcggttaagcactcacaaagacgaaacgaaagactgaggcagcgaacgcgtgaaaagttccaaaacgactaagctcgcggtgcggctccctagcgcttatatatggaaatttcgaatgctgacgcagtgcgaaccatctacatcattatcatctaaagctggaagaacaagcagaagccgtcaaacaggcagaagagttgggcaaataactccaccggtaggtagactgaacaataaacaaatacagaaaaaaaaacaagaggcaggcatttaaagtttcttaaaacctctggctgtggctcataaacgtaaagttaggctcaatgattcataaggttaaatactatcacatctctcagttaatttcccctctctgcagcagagtttatctcacatataaatccacccaaaaagttaatgattatgggaaataaacacatgacgaagcagcgaagcgccaacggggaatttctgttctgtttgttttcactttatttgtatttcgcattatatattcgaacgccaaactgttttggccagctcgtgtaaattggccaagtgccctcgctttttcttattgtactttttttgtacccagtctgcgccttgagctctgcttttgacccgattcgtgtttttggcaataaagaacttctcgaacttcttctcttgggcttggggcaataacctgattacaacgtggccaacacctaacaaacggagtttcagagaaatattatgcattatacatacattgccgatcataaagctaaactatatatactcatttgtttaatggctggcatgcgtccactaattataatattttgtgaattttaataatattatgcctcgctcggttttaccgctccatctgtttgaaacaaaactggttttgatgggattttcgattgatcttgctcgacgaaatgaaaacaaattttgttatttaattttacattatcatatatgtatattccaggaaatcctttcaattaaccggttatttggggat

SEQ ID NO: 21581 - DNA, 762 bp, DROSOPHILA
tgagtgcttaaccgcagataggcccctctgcatacccctaaccgctgaattaaccctactaagtgacgaagtgtgtgttcttacagatccataccgcttcacaatgaagtacgctgtgattgccatcgctttgtttgcgattactaccgcttcggcctcttccgctggccagtttctgccccgtgccttcttcaccttggactcggagggccaccagtcgaatgtccatcccgtgaatgcccatctcctgaggcgtctgcgtcgtcagtccagttcgtcttcctcgtcatcatcctcctcgtcctccagtggaggaaacgtcttcacctacgcctcacacagcgttcagaatgccgatggctccggtcattctggctcctcttacacccagcaggccgctgctccagtgcttggtggtgtgtcctttgatgagcgtttcggcgagagctccttaactggaggcgacaactattatcccacctacaatggctacaccagcgcagcctccatcagcagcaacagcggagtaggaagcaccggtagctatcagcacatctccggagttggacccattcccgccacccaaatccagcagaccgtggccgttgtcgatgccagtggcaaccagaaggtgaccaacatccagggtgccaccgattccaacggcgttctcaatatcaagaagaccgaatccacttactcatccaaatagaacataggttttttttcgagtgtaaactttaataaattacagtaaattaa

SEQ ID NO: 21582 - protein, 202 aa, DROSOPHILA
MKYAVIAIALFAITTASASSAGQFLPRAFFTLDSEGHQSNVHPVNAHLLRRLRRQSSSSSSSSSSSSSSGGNVFTYASHSVQNADGSGHSGSSYTQQAAAPVLGGVSFDERFGESSLTGGDNYYPTYNGYTSAASISSNSGVGSTGSYQHISGVGPIPATQIQQTVAVVDASGNQKVTNIQGATDSNGVLNIKKTESTYSSK

SEQ ID NO: 21583 - DNA, 3170 bp, DROSOPHILA
tgtggcaactgcccacccgatccttgcccgtgattagcttgtaggtgtagtcgtcgcaccgtgttccaattacgtcgtgcagagcaccgccatcctcatcgatgccataggcggcaagggaatcaaacacaaaggtggccatgggacgcaggtggggcaggcagctccacagacgatcgtaaacgcgcagatgcgacgagtgcagctggcgcgtcttgcccgagtagaagcgctcggcggtgttctccagattccaaaagttcatgtcgcccacctgagaaccttcgtggacagtgacgcggcacaaatcaccctcttgcattgtccaggtgcgtgcctcccgtttgggcacaatcagtgtctccacaagatcgccagtcagggcacgataacgtttattctgtagtctccgagtcggattagattattttatcattgtattattgctattgttcgcgttacttacatcatactcctccttcgaaacgatcgaagctgcgggcttgtcatagcagatgactggcggttccttttcaaaggttcggggcttggcaccgcgcccacaccaggaggcgggggcggcggaggtttcagtgggaacaacagcagccatggccagtgaaacgtttttcgctcgtgcagcaggtaagaagctaatcagagagtaaatatgttgtggtctaactagcgatcgaatgactactgatctcgctccacaactggactaaacaggtaggtcccaacaaagctttcgataggcacagcgcagttctatcggatttgaaatgattcccagccagcgaacgttgttagaaacattttttttttttactttcttatactactaagtttatgaaatttatgaaaatcaattaaacaaatcaacaaaaaactattattcttctggtcttttccgacgaaacgttttttaaatattaagcaatcatacataaatgatgccgtactcaaacctatgctacagctgacttttttttcttttgcgagggggatgctaatcaattgattataactaagttaatttgaccctagactaaacattgtatcttcgagctttgtttgtttcggcacctatatctccatcatggtgggttgctgccgctcgctaaatggtggctcgttttggattttgtctagtagctcctccagccagatgcgcagctcctttgaggcgaactcctgcggcagtggcagccgctccagggccaccttaagcaccgtggaagactccatctcgggacagacaatgcacatgccgtgcaccaagcagctgaggctctgcgagatttcactctggcacaggcggtgcttggaggtagggcacgggagcagactgatgcgggagcagagttcgcttagttgtggttttaagttctcccagcgcgcattgatgtcagcgatgttggtcacactgcggatctgtttgaacttggcactgatgtcgataaagtccaggaagatctggccctggttggcccagttgggcactcggatgctgctgccctctgtatcctcgaattgaatgagcaggctatgcaggtatttcattttacctgcaagtttgcaatgacaattgttagtaatccaccgaaataattcttatcataaggaaccaaccgtttatgatggcatcaggagcaatgtgttggaagatgacatcgtgcgccgtagcaaaatgttttgcctttagcagatatttggcttgaaggtgatgctttcctgacgctcccgcctttaccgccttcgcatagtccacccacgacatcggaataccaagctcttcgacgataaagcgctcttccgcatatagagccaccttggcggaaacgctgacattcctctgtagcatttgctgaactgcacgttccctctgggtctgctgcttaatatgcaaaagaacaaagataccccactgccagaggccttcgttctccaactggctagcgaaatccaccgaaagacgagcctccgttaagggcgaacagtgacggtagccaagagctcgcagagtttgcaagagcagccagctaaaatgatttgatatgatttattttgcactgtaccaaaaaattcttttagctcacctcaaacgaaagtccatggcatcggcggtatgcgttataggattgagagtttcttccagggaatgcatacgtttagagtgtaactggagcaagtggtagcgcaaatcgtagacgggcttcttggtgtcagtaggtgcgtccctgtagctgggctttgggggctccgcatagcactcttccgcttggaaggcgtcgttataagcattgagtgcatcggtgatagacgatgttggggctgtgaaataccatagctgcagggccagtgctgtcagccagtttttattctcgagtaagttgatggccccatgtgaagactgcatcattggcgctccggcggccagcatgtacatcttaaggcgctccagatcgatatacttatccgacttgctctgctgccaggcaaagagctgctcctccattaatagccggaagacagctccggaacttaattgggacagcacaagagccagattagcatcatcgtagctgaaggccagctcacaagcctcatttacgcgatggcagctaagtaaatccaacatgtgctccaggtagctgtgggtgctaacttttttcgagagtagatctttgcccagcagcgtgttctcaagccactcggatagcagattgcgccgacacatgaccatgtaatgagagttcttttccaggtccaccagttcatcgtgatcgccccatagtgcgaataaaagcgaccacactgacacgctatagtcctcttttaagccagcatttctctgcttaagagactcggagaagtgcttggaaactagtttcgtaccgctatcgggatgtatacacgggcactcactaccctccacattaactgagaggcagtcgttaagctgaacttcgagatggggaatgatactttctcgaaaaccctcgttgcctttgaccatgttaaactccaccaactgcattacactgggcgacaaatcggtggccgagcgcggcgcaaataccatggagacgggcagggatggtccagtaactgaagcaaagggaaattattataattggactgctacagcttgtttcagatattct

SEQ ID NO: 21584 - DNA, 1049 bp, DROSOPHILA
atgcattccctggaagaaactctcaatcctataacgcataccgccgatgccatggactttcgtttgagctggctgctcttgcaaactctgcgagctcttggctaccgtcactgttcgcccttaacggaggctcgtctttcggtggatttcgctagccagttggagaacgaaggcctctggcagtggggtatctttgttcttttgcatattaagcagcagacccagagggaacgtgcagttcagcaaatgctacagaggaatgtcagcgtttccgccaaggtggctctatatgcggaagagcgctttatcgtcgaagagcttggtattccgatgtcgtgggtggactatgcgaaggcggtaaaggcgggagcgtcaggaaagcatcaccttcaagccaaatatctgctaaaggcaaaacattttgctacggcgcacgatgtcatcttccaacacattgctcctgatgccatcataaacggtaaaatgaaatacctgcatagcctgctcattcaattcgaggatacagagggcagcagcatccgagtgcccaactgggccaaccagggccagatcttcctggactttatcgacatcagtgccaagttcaaacagatccgcagtgtgaccaacatcgctgacatcaatgcgcgctgggagaacttaaaaccacaactaagcgaactctgctcccgcatcagtctgctcccgtgccctacctccaagcaccgcctgtgccagagtgaaatctcgcagagcctcagctgcttggtgcacggcatgtgcattgtctgtcccgagatggagtcttccacggtgcttaaggtggccctggagcggctgccactgccgcaggagttcgcctcaaaggagctgcgcatctggctggaggagctactagacaaaatccaaaacgagccaccatttagcgagcggcagcaacccaccatgatggagatataggtgccgaaacaaacaaagctcgaagatacaatgtttagtctagggtcaaattaacttagttataatcaattgattagcatccccctcgc

SEQ ID NO: 21585 - protein, 319 aa, DROSOPHILA
MHSLEETLNPITHTADAMDFRLSWLLLQTLRALGYRHCSPLTEARLSVDFASQLENEGLWQWGIFVLLHIKQQTQRERAVQQMLQRNVSVSAKVALYAEERFIVEELGIPMSWVDYAKAVKAGASGKHHLQAKYLLKAKHFATAHDVIFQHIAPDAIINGKMKYLHSLLIQFEDTEGSSIRVPNWANQGQIFLDFIDISAKFKQIRSVTNIADINARWENLKPQLSELCSRISLLPCPTSKHRLCQSEISQSLSCLVHGMCIVCPEMESSTVLKVALERLPLPQEFASKELRIWLEELLDKIQNEPPFSERQQPTMMEI

SEQ ID NO: 21586 - DNA, 2966 bp, DROSOPHILA
cacgtctctgaactcctctgaaggtaattgcacgttcgactgttttggacttttaggcgttccagtggagcttgtttcctcactacgcgtaagcttcatccactcctggacgtccagatcctgttctaggttttccaatagatcaacgttactgggatcggcgaccacaggcggcagtgttacagattgcgattggaagaagtcgtagccagagctgaagcccggtggcaccgttagcagcttgtccccgaactgaaagttgctgacatccagagctgcgatctgctggcgctgctcatcgaaaccgcctggccaaaagggaaaattggagtgggagccacgcgtcgcgtcttccagcaagcccggctcccgctgcatggacatcgagttgttggcattggcgcccacggcctccaagtccaattccacgaactcaagtatgtgaccactctggtcgcggcgaggagccaacttagtgcttcccgggcaacggggcgcatgcaacaggcgcatcggatcgaatttgcggggcaaaacatccggcaggggattgtggagggacagctccggtcgcaggatatagttgcgcagccgttcgaggttatcctcgcccctaatctcattcattttaatagtttattcctggcgaaaataactttgtttagcatttgccaaaatacaaggaaaaaatcaacaagagtcggcagataatttggatggactggtcaccctaaaaatcgagaaacaatcgcgtaacgaattgcatcccgtgcagtgtgcaaagatattttaatttttttaattaaaaataattttaacgaatttattccaaaatttatattaagtaaaacaaaaactcaataattattgcagtaatatatttgtattgataattcgtcatcaatacggaagatgatcttgcacatctctatggcactgtttacataaatggcacgctgttagaaccagatttccgcacacggaatgaaaatggttctgtttacttgcgacggaacacttcgaccttgagggggtggcacttgtcgtccggcacatcggcgcccactgcgatggagacatcgccctgtggacaggcgctcagagccaccagaagattcatgtcggccacaaactcaatgaaatcccccttgcgcgctggacttgccttgcagaaatactgatgcgtgtcccgtgtaaatccggtgcacataaagatgttccacacgtcgtgtacatcctgctcggtcagcccgcgctcctccaccaccgccttgactagggaactgtggcaactgcccacccgatccttgcccgtgattagcttgtaggtgtagtcgtcgcaccgtgttccaattacgtcgtgcagagcaccgccatcctcatcgatgccataggcggcaagggaatcaaacacaaaggtggccatgggacgcaggtggggcaggcagctccacagacgatcgtaaacgcgcagatgcgacgagtgcagctggcgcgtcttgcccgagtagaagcgctcggcggtgttctccagattccaaaagttcatgtcgcccacctgagaaccttcgtggacagtgacgcggcacaaatcaccctcttgcattgtccaggtgcgtgcctcccgtttgggcacaatcagtgtctccacaagatcgccagtcagggcacgataacgtttattctgtagtctccgagtcggattagattattttatcattgtattattgctattgttcgcgttacttacatcatactcctccttcgaaacgatcgaagctgcgggcttgtcatagcagatgactggcggttccttttcaaaggttcggggcttggcaccgcgcccacaccaggaggcgggggcggcggaggtttcagtgggaacaacagcagccatggccagtgaaacgtttttcgctcgtgcagcaggtaagaagctaatcagagagtaaatatgttgtggtctaactagcgatcgaatgactactgatctcgctccacaactggactaaacaggtaggtcccaacaaagctttcgataggcacagcgcagttctatcggatttgaaatgattcccagccagcgaacgttgttagaaacattttttttttttactttcttatactactaagtttatgaaatttatgaaaatcaattaaacaaatcaacaaaaaactattattcttctggtcttttccgacgaaacgttttttaaatattaagcaatcatacataaatgatgccgtactcaaacctatgctacagctgacttttttttcttttgcgagggggatgctaatcaattgattataactaagttaatttgaccctagactaaacattgtatcttcgagctttgtttgtttcggcacctatatctccatcatggtgggttgctgccgctcgctaaatggtggctcgttttggattttgtctagtagctcctccagccagatgcgcagctcctttgaggcgaactcctgcggcagtggcagccgctccagggccaccttaagcaccgtggaagactccatctcgggacagacaatgcacatgccgtgcaccaagcagctgaggctctgcgagatttcactctggcacaggcggtgcttggaggtagggcacgggagcagactgatgcgggagcagagttcgcttagttgtggttttaagttctcccagcgcgcattgatgtcagcgatgttggtcacactgcggatctgtttgaacttggcactgatgtcgataaagtccaggaagatctggccctggttggcccagttgggcactcggatgctgctgccctctgtatcctcgaattgaatgagcaggctatgcaggtatttcattttacctgcaagtttgcaatgacaattgttagtaatccaccgaaataattcttatcataaggaaccaaccgtttatgatggcatcaggagcaatgtgttggaagatgacatcgtgc

SEQ ID NO: 21587 - DNA, 900 bp, DROSOPHILA
agaccacaacatatttactctctgattagcttcttacctgctgcacgagcgaaaaacgtttcactggccatggctgctgttgttcccactgaaacctccgccgcccccgcctcctggtgtgggcgcggtgccaagccccgaacctttgaaaaggaaccgccagtcatctgctatgacaagcccgcagcttcgatcgtttcgaaggaggagtatgataataaacgttatcgtgccctgactggcgatcttgtggagacactgattgtgcccaaacgggaggcacgcacctggacaatgcaagagggtgatttgtgccgcgtcactgtccacgaaggttctcaggtgggcgacatgaacttttggaatctggagaacaccgccgagcgcttctactcgggcaagacgcgccagctgcactcgtcgcatctgcgcgtttacgatcgtctgtggagctgcctgccccacctgcgtcccatggccacctttgtgtttgattcccttgccgcctatggcatcgatgaggatggcggtgctctgcacgacgtaattggaacacggtgcgacgactacacctacaagctaatcacgggcaaggatcgggtgggcagttgccacagttccctagtcaaggcggtggtggaggagcgcgggctgaccgagcaggatgtacacgacgtgtggaacatctttatgtgcaccggatttacacgggacacgcatcagtatttctgcaaggcaagtccagcgcgcaagggggatttcattgagtttgtggccgacatgaatcttctggtggctctgagcgcctgtccacagggcgatgtctccatcgcagtgggcgccgatgtgccggacgacaagtgccaccccctcaaggtcgaagtgttccgtcgcaagtaa

SEQ ID NO: 21588 - protein, 276 aa, DROSOPHILA
MAAVVPTETSAAPASWCGRGAKPRTFEKEPPVICYDKPAASIVSKEEYDNKRYRALTGDLVETLIVPKREARTWTMQEGDLCRVTVHEGSQVGDMNFWNLENTAERFYSGKTRQLHSSHLRVYDRLWSCLPHLRPMATFVFDSLAAYGIDEDGGALHDVIGTRCDDYTYKLITGKDRVGSCHSSLVKAVVEERGLTEQDVHDVWNIFMCTGFTRDTHQYFCKASPARKGDFIEFVADMNLLVALSACPQGDVSIAVGADVPDDKCHPLKVEVFRRK

SEQ ID NO: 21589 - DNA, 3978 bp, DROSOPHILA
gctgcctattcaagtgtccatttttaattaacactctgacaatttgacgcgaaatgcatttcgagtgagtgtgtgaccaccacgtgcaactgtgtgtgagtgtgtgtccgtttgactaatgctgccactgtggcggatgcatgccgatgagcctttggttttgtggggagctgagagctctgcgccgaatgtttagaatgcaattgacgtgtcagagggcaaatgaccggcaacagccggggtcgtggaaggggtgcgaaagggttgtggagcaggggtcaggacatcagacaatcagggggggtggctgataaatgttgcatgcgcctgtgtaacccaattaccgttctgcaaattacccacaccagcggacaaaaggactccctgagtttgggggtccacattcctcgactcgctttgcataattgatgacaaattgaaatcatgtttatggcatagaggctgggacattccataaaatatattttccatagattttgatgcggacagtcttcgcctcagacccatcaggacatccggactttcccttttcctcatctttttcctaggccataaatcccggactggccaagcctggccaaatcaaatggccaatggatcaatttgcggttgatggagcttagccgctcgagtcttcctcacggggctcgtaaatcgcaatgagtggggcccataaattttcaattggtcagtgggtgaggaaaggggaaaacaacttcacaataggtatttagcatagcaatcagttagctaatgcaagatgggatcttttcctaaacaaaatactctatctgatatgtatagcaattcaaagtaaacctattgtgataaatatgtataaggaatagattaacgttgtcctcttcagtttggtaatattcccgaataacgagtcagattgtaagatcagggagctaaaactcactctgatattcaagtgtaagtttactaaccaaatttctagtttgtcacatcatctcacaaatcttggccagaatatgtctatctcagtgaagcggaaaacggtgatttcaccgcaggaactcctgaagacactcgagctgtccggcgaagaggacctcgatctgcagatcaagaactgggtgatgtgggaccgcaacgaggcgacgctccagcaggtgactgaggcagtcagggatcaggattggaaggcgttgcgggtgagactgtgccataggatcacctatttgacaactggcttgaggggagtgatgcgcgcaggcttcgactctttgaacgatgtggtgatcatcgaagtggcccagggcatctgcgcctacctcgtcgatgcctatccaagcatccagaagaggcaaacacagggcgtggtcgttggctacgatggcaggtacaatagcaagcggtttgcccaactcatcgccaccgtgttcctgaacaacgacttcaaggtgttcctcttcactcggatgatcccgacaccctttatacccttcaccgtcgtcacgctccagtgcctggcggggatcgtggtcactgcctcccacaacgttaaggaggacaatggcatcaaggtatattggtcgaatggggctcaggcgatggcaccgcacgatcagcggattcatgactatatgatgaataacctagaaccaaagccttcgtcctgggaaacttcactggtacttgaccatcccttggtggaggatccctatcgtcagatatacccactcttttacgaggctctcaagacgcttattcccccaatttacctggaaactaatgagtgcagccagttgaggttcatctatacagctcttcacggtgtgggttatcccttcatgagggaggccttctaccaggcgcgactcaagccggttattcccgtcgtggaacagaaagaggccgatccagagtttcccaccctcgttaaaccaaatccggaaggtaagtgaaacattttgctatttttttcatatattgttaggtgtagtgtacatgattttaaactttcgttagagggcaaggaagcgctgaagctggccataaagaaggcggatgcggaacactgcaccttggttctggccaatgatccggatgtggatcgcttggctgtggcagagctggatccgcgtggccgctggaagctgttcaatggcaacgaactgggtgccctgctcggctggtgggcactggagaactacaagactaggacacccaagccagcagtgaccaattgcataatgatagccacactggtcagctcacgcatcctggcggcaatggcgagagttgagggcttcatctttgtggagggcatgcccagtttcccctggatggcacatcgcgccttggagctggaaaagtctggaagaacagtactatttgcatttgaggagtgctttggctatatgttcggaatgagcctgccggataaggatggcattggagctgccatgcagttggccagcatggcctgttatctgcgcagcactagaaatgtgacgctgatcgagaagctaagggagatctacgatacgtatggctaccattcgtcgatctcgtcggtttatatggccgatagtccagagacaatcactagcgtcttcgatcatttgcgcaactttacggacgaagagggatatccgaagttcattctggatgaagaattcgaagtggttcatatccgggatttgaccatcggactggacacttccttcagcgatggaaaggctcgtatgccggtcactccagatgcccagctaattacgtttaccttcaccaatggctatgtggttaccctgcgatcggcacccaacgatattaagatcaaacttaatgcggagatctgtggcttgccggaggaaaagcagtgggaggagctacacgataaactgaacaggatgaccaatgccgtggtggaggagtttcttcaaccagaggagaatggtcttacggatgcctcaacaattcaataatcttggttttcaattcaaaacgttcgataacattcatttttatgagctgtaactaatggcaagtttttaaaagcatgttaataaaatcataagagacgttaattataaaaaggaaactaaatactaaaagttataagaaagatgaaagatttaaattcttcacaatattaaatttgtgagggaaatccttggtttcacctattaaagtgctgtgaaatgctttaggtggaggtggagcgttggaaaagccgcagaacgccaattaagcgtacagagaaattgccaaccatgtgggttatttgagccaagaaggaggagaaggaggccgaacatggccatcagcaccatcatcatcctttgttttgccaccgcacaaacgtatctgtatctgtatctctagccgagcgaaagtatctggcaagacaaacactgaaattttatagtttgcctgctaattgcactctgggggtgccttcaccaccaacactcccacactgcccccgttgttttcaggccgctccacccccctgattgtgtggtaatcgtttccgattgtgcgattcagcaaaagtcagctcacataatgaaaacagtgattaagagttggccaagtcgtttggagttcatatgagtgaacgcaggcctcattgtttcactttagatttcgggtaacctttccacatatttcacatatgtatgtttgctcagcaggtcaaacggaatatttcagatgctataaaatgtcgagtgcccaggtaaacacggcgttgatccccgaggtcgtcgtcaagtcaaatttcattcaagacaaaaggttcgccccgaccccctcctcgcgaatatcctgctgatatccttgccactgccatggccattaaattttccctaaaatacatactcgaacagggatccaaacgcacacgaattaaatattaatccctgtcgacgagtgggtttcttgttgttgtttttttttcactttatttttcgtttttggatg

SEQ ID NO: 21590 - DNA, 1906 bp, DROSOPHILA
cacaaatcttggccagaatatgtctatctcagtgaagcggaaaacggtgatttcaccgcaggaactcctgaagacactcgagctgtccggcgaagaggacctcgatctgcagatcaagaactgggtgatgtgggaccgcaacgaggcgacgctccagcaggtgactgaggcagtcagggatcaggattggaaggcgttgcgggtgagactgtgccataggatcacctatttgacaactggcttgaggggagtgatgcgcgcaggcttcgactctttgaacgatgtggtgatcatcgaagtggcccagggcatctgcgcctacctcgtcgatgcctatccaagcatccagaagaggcaaacacagggcgtggtcgttggctacgatggcaggtacaatagcaagcggtttgcccaactcatcgccaccgtgttcctgaacaacgacttcaaggtgttcctcttcactcggatgatcccgacaccctttatacccttcaccgtcgtcacgctccagtgcctggcggggatcgtggtcactgcctcccacaacgttaaggaggacaatggcatcaaggtatattggtcgaatggggctcaggcgatggcaccgcacgatcagcggattcatgactatatgatgaataacctagaaccaaagccttcgtcctgggaaacttcactggtacttgaccatcccttggtggaggatccctatcgtcagatatacccactcttttacgaggctctcaagacgcttattcccccaatttacctggaaactaatgagtgcagccagttgaggttcatctatacagctcttcacggtgtgggttatcccttcatgagggaggccttctaccaggcgcgactcaagccggttattcccgtcgtggaacagaaagaggccgatccagagtttcccaccctcgttaaaccaaatccggaagagggcaaggaagcgctgaagctggccataaagaaggcggatgcggaacactgcaccttggttctggccaatgatccggatgtggatcgcttggctgtggcagagctggatccgcgtggccgctggaagctgttcaatggcaacgaactgggtgccctgctcggctggtgggcactggagaactacaagactaggacacccaagccagcagtgaccaattgcataatgatagccacactggtcagctcacgcatcctggcggcaatggcgagagttgagggcttcatctttgtggagggcatgcccagtttcccctggatggcacatcgcgccttggagctggaaaagtctggaagaacagtactatttgcatttgaggagtgctttggctatatgttcggaatgagcctgccggataaggatggcattggagctgccatgcagttggccagcatggcctgttatctgcgcagcactagaaatgtgacgctgatcgagaagctaagggagatctacgatacgtatggctaccattcgtcgatctcgtcggtttatatggccgatagtccagagacaatcactagcgtcttcgatcatttgcgcaactttacggacgaagagggatatccgaagttcattctggatgaagaattcgaagtggttcatatccgggatttgaccatcggactggacacttccttcagcgatggaaaggctcgtatgccggtcactccagatgcccagctaattacgtttaccttcaccaatggctatgtggttaccctgcgatcggcacccaacgatattaagatcaaacttaatgcggagatctgtggcttgccggaggaaaagcagtgggaggagctacacgataaactgaacaggatgaccaatgccgtggtggaggagtttcttcaaccagaggagaatggtcttacggatgcctcaacaattcaataa

SEQ ID NO: 21591 - protein, 628 aa, DROSOPHILA
MSISVKRKTVISPQELLKTLELSGEEDLDLQIKNWVMWDRNEATLQQVTEAVRDQDWKALRVRLCHRITYLTTGLRGVMRAGFDSLNDVVIIEVAQGICAYLVDAYPSIQKRQTQGVVVGYDGRYNSKRFAQLIATVFLNNDFKVFLFTRMIPTPFIPFTVVTLQCLAGIVVTASHNVKEDNGIKVYWSNGAQAMAPHDQRIHDYMMNNLEPKPSSWETSLVLDHPLVEDPYRQIYPLFYEALKTLIPPIYLETNECSQLRFIYTALHGVGYPFMREAFYQARLKPVIPVVEQKEADPEFPTLVKPNPEEGKEALKLAIKKADAEHCTLVLANDPDVDRLAVAELDPRGRWKLFNGNELGALLGWWALENYKTRTPKPAVTNCIMIATLVSSRILAAMARVEGFIFVEGMPSFPWMAHRALELEKSGRTVLFAFEECFGYMFGMSLPDKDGIGAAMQLASMACYLRSTRNVTLIEKLREIYDTYGYHSSISSVYMADSPETITSVFDHLRNFTDEEGYPKFILDEEFEVVHIRDLTIGLDTSFSDGKARMPVTPDAQLITFTFTNGYVVTLRSAPNDIKIKLNAEICGLPEEKQWEELHDKLNRMTNAVVEEFLQPEENGLTDASTIQ

SEQ ID NO: 21592 - DNA, 2977 bp, DROSOPHILA
cgtcatgcccacaagttcattacacattcgcaggattcgaaatgagcaaaagtaatgggaaatgcagtgggcgctgggtttggggttattttccatggggtaggggctgcttttactggcaggttgattaaccagacttagagacacaacccccgagatgctgcatgtgtgccataaaaatcgcaattattatatcctccattcgcttctgatttgcggattcgagtgaaaagtatctgacagttttccatgattgcggatggatgattccgatgtaatctgctgagtgtaattatgagtgctcaattattcaccaatttattggtagaataggaattcaaggttttatagtatcgaactgtgaagctaatgcatagtagaagtgttaagaacttaagaaagattcctatgcatgtttttgaaaagatatcatattctataaatgggcgggagaaagttctttagtttggcgaagaaagcaggagaagaatcacgctatgaaaaggtaaccagcagagaaacaaaggcaaacgacacttgaaaagatattcgcaagaaagccgcgaaagggggaatgccataaatcaaatgtatctacgtatctgcgtatcttgtatccattgtggctgtatgtatgtaaatgccagacaatagttatggctatgctgggcttaattatacgcggcactcgattcgattcgctggaaaattagcatatgacaaggccagttaacagctagcaaaacagttagctaaactccgcggatggagtcacagatgaagatagatgcccatgtaattaccggagcagaaaaaaccaaacaattaagataaagaatttttaaactatgactcaaacggattcaccattgtttcattagctaattttagacatgggtttattgcggcaataagcatttataatattatagttacgactacgtttaggggctaataatttagactttaactttgacttagagaagatggagcgggtagatcacaagatcacctcgaatcgctgatcccggccaatgggctccgctttgctcttcaccagatatttggcgaactccgcgggcgactggaacgacttgatggggaacttgccgaagcgtccgttggtcttggacaccacatagtagatgggataggggcccggcgtcatctggacgggtaatacttgacctccgacctccacctgcttcaactgctccacctgccgccccgcggacaactctccagcccccctagcgtccaagttcagttgcttctgctgcttgagtttctgcttgggaaaggcttttagttcgtatttcaaggctggctgcgtcgcatcttcaccactggcggccacatttccacccagcagcttggcgggacgagggcgcctctttcgcatctgcttggagtccacgtactgccgctgactggatccgaatgccgttgacggacgcagtgtttgcacctggatgaagggcgagttcatttggctgccggtggtgtctttcttgggcggtaggtcctgcggatgcacgcggatcaccttctgcgtttggttggctatgctgatcacatcctcctcaatgtccgtggactcttcgatggcgagggatgcccaggtcagtgcacccaagcagaagcagaagagctaaatggagttaaatcaaatgaattaaactatgtcagactttggagtatttgaacttaagccacaagtttttataaactgttcttgaccagctgttgacttcgacatctttaactatcaacaaagtcgaaatgattcaacttcagctggcaaattattctataatcgaacttaagtacttattttttagtgccgtgggcgatcaatcacaattaccattagccgatgattggcgaacatcttgtaagatcagccaggtaacaatgtatccgcggattctgaggcttctgtggcttccgcaactagcgactgatgttggatgctgtcgtttgacgactgaaaaacactggagaccagcgatcgctgtaagcttttgagctggagatcccagatatgtatgccccccattgccccccgaacacgatctgtttataatgaagtgttggtttttttttttgttttgtggctcgcgcatttggtaggagccagagaacatataatgagccgaaaatttgttagttttgttgcgtcttttgtcatttggagaaccctccatcccgtaagttccccaaattaaacgcgcacagtgggtcggagtatggcaaaaactggtaatcatttgtttggttaatttgcgttggttgtcgccgattgcctcgctgattaatttgttttgcgtctgatcacctcggatcccacatttcccccttctcactacaatgattgtattgtggattgtttgatttcaagatatttttatccgttggtgaagtacaaatttgtgcttagcaagatatatcaatttcgcttagatacatacaattctttaggtatatatttttaactacatataaatatgaaatgatttacataaacttataaattaatcaaatcataaacattcatcaagtatgctatttataaactattcaaattaggtctttgaaatattttcccacttctttaaagtatttaaactcgtatttcctttttcggcagagtattccacagtcggaaaacagcttgatcatttgttccacagatcattaggcgtgcattactaattattgtaatgaaattatttatgataattgtcagagtctcagacactgcacattgttgatcattcggcgtgtgcacaaaacgattgagcagaaataaaaatcaaataaagtttgccagcgaaaacaattataattcaattgtattcagatgggagatatagaagtcatgaagccgatgactcaatgttgttctgttcctagttgagctttctggtttctaatcttggaacttgacaagcaacctaagatgggatttgagagc

SEQ ID NO: 21593 - DNA, 761 bp, DROSOPHILA
acagcatccaacatcagtcgctagttgcggaagccacagaagcctcagaatccgcggatacattgttacctggctgatcttacaagatgttcgccaatcatcggctaatgctcttctgcttctgcttgggtgcactgacctgggcatccctcgccatcgaagagtccacggacattgaggaggatgtgatcagcatagccaaccaaacgcagaaggtgatccgcgtgcatccgcaggacctaccgcccaagaaagacaccaccggcagccaaatgaactcgcccttcatccaggtgcaaacactgcgtccgtcaacggcattcggatccagtcagcggcagtacgtggactccaagcagatgcgaaagaggcgccctcgtcccgccaagctgctgggtggaaatgtggccgccagtggtgaagatgcgacgcagccagccttgaaatacgaactaaaagcctttcccaagcagaaactcaagcagcagaagcaactgaacttggacgctaggggggctggagagttgtccgcggggcggcaggtggagcagttgaagcaggtggaggtcggaggtcaagtattacccgtccagatgacgccgggcccctatcccatctactatgtggtgtccaagaccaacggacgcttcggcaagttccccatcaagtcgttccagtcgcccgcggagttcgccaaatatctggtgaagagcaaagcggagcccattggccgggatcagcgattcgaggtgatcttgtga

SEQ ID NO: 21594 - protein, 224 aa, DROSOPHILA
MFANHRLMLFCFCLGALTWASLAIEESTDIEEDVISIANQTQKVIRVHPQDLPPKKDTTGSQMNSPFIQVQTLRPSTAFGSSQRQYVDSKQMRKRRPRPAKLLGGNVAASGEDATQPALKYELKAFPKQKLKQQKQLNLDARGAGELSAGRQVEQLKQVEVGGQVLPVQMTPGPYPIYYVVSKTNGRFGKFPIKSFQSPAEFAKYLVKSKAEPIGRDQRFEVIL

SEQ ID NO: 21595 - DNA, 5164 bp, DROSOPHILA
atcgcctcaatcacaggtagagcgagtagcatctgcaggcgcagttgctgtgcccattcatacctcccagcagctgcctcttttccaacttcagaagaagtacgaggagaacagcgtggagaaggttcatcagcagcaacagcaacagcaaagcgagcaacgcaagcatgtggaggccgctcaggcccttcatgctgcccaccagcaaccgcctccaccgccacccaatgagcacctgcaccacccccagatggcccacaacatcatgtttccgctgggacagcttcgcaacgagcagccgaccgcacagcaacaccagcatggccacaatccccaccagcaacagcaacagcatccccaccagcagcagcaacagggacagcaacaccatccgccaacgatcttcggatcgaccgccagcgaacggcctccaatgtcctacgaaaatgtcggatgagtcctgagccgtctgtgggaagccacttgtggagcaccacgccctgcgacggtgtcccccacgacggcagacgcgcacagctgttagccctcgatttagacggcaattcgtaggtctcattcttatgctagcctatacctaagtacacattgctcactacactactacagtcaaaaatggtgcagtcaatgaggaagatactcctgatgtatgccattttgtagtaagtggatgccgtgatcctcatgtaaatgttcccgtggcaataacagcgtagctcaactgtgactcaagttctcaatagatcgcgacgcatacattttttcggtgtaaatacaaatataattgaatcttaaaaactgtggatgttttttagttcaagtaaaatgattgatccccaacttctggcaagagctccctattcccaggtttttgtttttctggccaaatcggagaagtcattggcttagctctgaggtggaatccacaatcttgtttgtttggactttgaaaagctgtaaatccggcaagcggtccgtcgttaagctgtcttcaggaatatctagtcttcatctctcgtaacgcgataacgaaacccacagggagcacgccatatcataaagatagtcaaacagctgactgatccggtctgcctaagtgcgaatttcaactgagcgctgccgatcgccgaactcgtcgttgtctgtcgcatgttgggcaggttgatgagcgatcacgagccgagctgcagcatagtccgccagatctgcggcgcttatcagtggcgtccggctgggataaagagatacagatacagatacaggcggatcgactggaggcagactgggtctggcattcttttccggcagctgccagcagcagttgatcgtcagcgatcgaatcacagggattggcggcagctcctgcagatgcagagttcaaatttccagtgaagttctcaaccagtcaatccattcaccatgggccaaggtacgagaatgatctgaaattcgtgtcttacctcgaaactcgaagtcgaagatcttgtttaagacctccaaatgaagaacaaccacaagttgggagctcgcatttcatgtactctactttgatctttttagtcgaggcgcgcactgtgctgtggtacatgacattcatcggtttcatcgtgaactacatgatccggatcaatctgaacattaccattgtggacatgattgccgggaagggtgctattacctcaaatgaaacccacgagaactctacggacttggctgcccttgcggaaatgaatgaacgattttcgctggagcgttggtttttggactgggcgaatgtgagtatcagatcgctgaatcactggttaagtgcttaatgaaagccacaaagtgacggagcttgtgcaacaacggggcgtatgagtaacgtgtgtgtgcactatatctttggcagattccgtacgaaaagaatggatttcactggaacgagaagcagcagggcgctctgttgggatcatttttctgggcccactggacactgcagattcccggcggcatcttggccaccaaatatggtactaaactggtgtttggttggtccaatggcatcggtgtgttctgctgtttccttataccaatcgtatcgtactggagctacacgggcttgattatcctgcgagtattccaggggtggataacggtaagggatcgttgagcagattttgatggaaagtttaaatctttaattttaaagggcttggcctggccatcgatgcacgtgctcactgccaaatggattccgcccaacgagcgcagcaagtttgtcagtgcttacttgggcagttctgtgggcgtggccctgttctatccgatcttcggctacatcatcgattggacacggtgggagtgggtctactatatctgcggaatcgtgggcactctctggttcatcgcctggcagttccttgtgttcgatagtcccgctgagcatccccgcatcgctgactcggagagaaagttcatcgagaagtccttgggtgcctccattcagggcagcaagggacccacaccctggaaggcgattgccacctctcgtcccgtttggctgaatgtggtcgcccaatggggtggcatctggggtctcttcactttgatgacccatgcgccgacttacttcagactgattcaccactggaacattcgagcggtaagtgtttaatagattttgtaggtcaagagtattacacattgcctgctccttttcagactggcttcctgtccggactgccgcatcttatgagaatgctcttcgcctacgtcttctccatattcgccgactatcttctgcgcacggataagatgagtcgcacaaatgtccgcaagttggccacattcatttgtgagtattacttctgattgtttagatattttgtacagccttaatagcatttaaactcttttttgttctaggctgtggcactaaaggcttaatcgtattagcactagcttactttggctacaacgcgacggctgccatcgtgttggtcacagtggccaccatgcttcacggcgccgtgtcctcgggtcccttggcctccatggtcgatctgtcgccaaactatgcgggcattgtcctgggcgtgagtggaatgattggtggaatgccgggcttcatatcgcccttcatcgtgggccaacttactcacaataatgtaagttgtatttttgcctttgaaaggagttatttattccatgtataataatccctttttaaagcaaaccattgatgcctggaagaatgtgttcctgctcacctcgttgatgttaacaggcagtggcatcttgtatgtgcttttctcggaatccaaattgcagccatggaacagtggctgtcaccagttgcctgattccgggctaaaggaacttcagaatctgggacgcgatcaggacgatgaggaggagaagaagcctcttaaatctgaccatgataaggaaacccctatagtcgctgaacaggagaccaaaacaaaatctgattgcgatgaaaagtgacatgtgtggtcgcactctgtttaattgtcataatatcgtgtagattatggcaacgaacaacgtctgataaggcttatcgtcattttgtgtaaataactacccgtgaatccactgagtttagcatctttaacctctatatttaagtgagttgctaactataccataggattagttccctgttctcccccaagattaccttcttatacatataaatacaaatgtatatgatttattaccagcttttgtttattatttaaacaacactttcggcgtaaaagtcacttcatgtcggcatggcgttaatcaaataaaatgttttatgtttacggaagctaaaaatgctttgctgctgtctgggaaagtttttgcttaagccaggtgattcaactaatcccgactaagataatttttttcagaaggtcaaaagggattttttaatatctcagcatatttatttgcagttattaaaaataatgttaattaaatatttgagtgtgacgccacgcgagtacttttctttaacgtaaaacattataattcgctttatttttagacattgctatgtattctttaattttcgtattaatactactccctaagaaaatattaacatccaaaattaagctaattaaagaatttaaaattttgaattaaattatgttatgtatttaatcacagtctacaaagtattagcttttcttttaagctatatttacggggcttaaggtactattattagttttttcacggactcagatatcagatatctacgtcaacgaggcagtaaaacgattttacaactaaataacactgccataaactatatacacattttttcttaatttataaccgagagcggaaagacttccttctaaattaagttcacaaaagttgaacgacaattgttatactattttattttacagaattaaatttgtatggcgttcttaatttttcaaacttgatagcaatcttgggatattttattaacccaacgacgtaatgagaaccccatattacagcaaaataaatgatttgccaaaccgaagttaataattgcaatttaaatcaaaactgattgaaccggaaaatcgttttccctttttgggctgccgtttctctctcattactcataccacgcgttgcacaattggaagttcggaaggagatgggaattgaattgagaaaaggatggctggcgaggggctaaggggcaggccaacctttgctgctccgtggtcttcgacttttttacgtgcctgcatttgtttcattggcgtccatttccgattgcactccagggagtcgtagatgtcagtgcccgtctccatctcgggtcctttcaaccccctcgcacaaatccctgccatcatcctggccacttcacggcttgtccatttcgggtttcgtctgttaagccagtcgatgtcttgtcacttgatccttgagcttgagcctgcaaagtcgggcattgatagagattaattggtttcctgtttcgttgcccaataggccggcaaactggaggaggtggcgatgaggagttccataatgagattatatcgatgattttccatcatcagttaagttagcagtgggaaactttaaagggagcgatggttatccgaacttataatatcctcgaatttttcgataa

SEQ ID NO: 21596 - DNA, 2669 bp, DROSOPHILA
aagctgtcttcaggaatatctagtcttcatctctcgtaacgcgataacgaaacccacagggagcacgccatatcataaagatagtcaaacagctgactgatccggtctgcctaagtgcgaatttcaactgagcgctgccgatcgccgaactcgtcgttgtctgtcgcatgttgggcaggttgatgagcgatcacgagccgagctgcagcatagtccgccagatctgcggcgcttatcagtggcgtccggctgggataaagagatacagatacagatacaggcggatcgactggaggcagactgggtctggcattcttttccggcagctgccagcagcagttgatcgtcagcgatcgaatcacagggattggcggcagctcctgcagatgcagagttcaaatttccagtgaagttctcaaccagtcaatccattcaccatgggccaagtcgaggcgcgcactgtgctgtggtacatgacattcatcggtttcatcgtgaactacatgatccggatcaatctgaacattaccattgtggacatgattgccgggaagggtgctattacctcaaatgaaacccacgagaactctacggacttggctgcccttgcggaaatgaatgaacgattttcgctggagcgttggtttttggactgggcgaatattccgtacgaaaagaatggatttcactggaacgagaagcagcagggcgctctgttgggatcatttttctgggcccactggacactgcagattcccggcggcatcttggccaccaaatatggtactaaactggtgtttggttggtccaatggcatcggtgtgttctgctgtttccttataccaatcgtatcgtactggagctacacgggcttgattatcctgcgagtattccaggggtggataacgggcttggcctggccatcgatgcacgtgctcactgccaaatggattccgcccaacgagcgcagcaagtttgtcagtgcttacttgggcagttctgtgggcgtggccctgttctatccgatcttcggctacatcatcgattggacacggtgggagtgggtctactatatctgcggaatcgtgggcactctctggttcatcgcctggcagttccttgtgttcgatagtcccgctgagcatccccgcatcgctgactcggagagaaagttcatcgagaagtccttgggtgcctccattcagggcagcaagggacccacaccctggaaggcgattgccacctctcgtcccgtttggctgaatgtggtcgcccaatggggtggcatctggggtctcttcactttgatgacccatgcgccgacttacttcagactgattcaccactggaacattcgagcgactggcttcctgtccggactgccgcatcttatgagaatgctcttcgcctacgtcttctccatattcgccgactatcttctgcgcacggataagatgagtcgcacaaatgtccgcaagttggccacattcatttgctgtggcactaaaggcttaatcgtattagcactagcttactttggctacaacgcgacggctgccatcgtgttggtcacagtggccaccatgcttcacggcgccgtgtcctcgggtcccttggcctccatggtcgatctgtcgccaaactatgcgggcattgtcctgggcgtgagtggaatgattggtggaatgccgggcttcatatcgcccttcatcgtgggccaacttactcacaataatcaaaccattgatgcctggaagaatgtgttcctgctcacctcgttgatgttaacaggcagtggcatcttgtatgtgcttttctcggaatccaaattgcagccatggaacagtggctgtcaccagttgcctgattccgggctaaaggaacttcagaatctgggacgcgatcaggacgatgaggaggagaagaagcctcttaaatctgaccatgataaggaaacccctatagtcgctgaacaggagaccaaaacaaaatctgattgcgatgaaaagtgacatgtgtggtcgcactctgtttaattgtcataatatcgtgtagattatggcaacgaacaacgtctgataaggcttatcgtcattttgtgtaaataactacccgtgaatccactgagtttagcatctttaacctctatatttaagtgagttgctaactataccataggattagttccctgttctcccccaagattaccttcttatacatataaatacaaatgtatatgatttattaccagcttttgtttattatttaaacaacactttcggcgtaaaagtcacttcatgtcggcatggcgttaatcaaataaaatgttttatgtttacggaagctaaaaatgctttgctgctgtctgggaaagtttttgcttaagccaggtgattcaactaatcccgactaagataatttttttcagaaggtcaaaagggattttttaatatctcagcatatttatttgcagttattaaaaataatgttaattaaatatttgagtgtgacgccacgcgagtacttttctttaacgtaaaacattataattcgctttatttttagacattgctatgtattctttaattttcgtattaatactactccctaagaaaatattaacatccaaaattaagctaattaaagaatttaaaattttgaattaaatt

SEQ ID NO: 21597 - protein, 524 aa, DROSOPHILA
MGQVEARTVLWYMTFIGFIVNYMIRINLNITIVDMIAGKGAITSNETHENSTDLAALAEMNERFSLERWFLDWANIPYEKNGFHWNEKQQGALLGSFFWAHWTLQIPGGILATKYGTKLVFGWSNGIGVFCCFLIPIVSYWSYTGLIILRVFQGWITGLAWPSMHVLTAKWIPPNERSKFVSAYLGSSVGVALFYPIFGYIIDWTRWEWVYYICGIVGTLWFIAWQFLVFDSPAEHPRIADSERKFIEKSLGASIQGSKGPTPWKAIATSRPVWLNVVAQWGGIWGLFTLMTHAPTYFRLIHHWNIRATGFLSGLPHLMRMLFAYVFSIFADYLLRTDKMSRTNVRKLATFICCGTKGLIVLALAYFGYNATAAIVLVTVATMLHGAVSSGPLASMVDLSPNYAGIVLGVSGMIGGMPGFISPFIVGQLTHNNQTIDAWKNVFLLTSLMLTGSGILYVLFSESKLQPWNSGCHQLPDSGLKELQNLGRDQDDEEEKKPLKSDHDKETPIVAEQETKTKSDCDEK

SEQ ID NO: 21598 - DNA, 5768 bp, DROSOPHILA
taactccttctcaacaaattgatcgtttacttcgtccaggttcaacgtacttcaatctcaatccgtttgaggtgctccaaatcgagcccgaggtcgaattggcggatataaaaaagcgataccgcaccttgtcaatcctcgtccatccagacaagaatcccgacaaccaggagcgcgctcaaatggcattcgatattgtgtcgcgttcctggaaaatcctcgaaaacgaactcacgcgcaaaaggtgtctggaggtgtacgaggaggcaaaggggcgaacggatcaaatggtgagttccagttcctcggagcattaagctctatgatcgtccggctttagaataattgaaaatccaattgcaatggcacattttctttattgtactgtattatattaatttgttcgttacctttcagattgcagaaaagcgtaaaaagcttaaaaaagagggtcggcccactgagccaatacccgaggacgatcccaccaagtacaagcacgccatctacgttatggtcatgaaactgtttgccgacatggagcgtcgacggcaaaagctcgaccaacgcgaccaggaggagcgaaagcgaaagcgcgaaacggaaatcgaggaggaggagcggataaaggcggaccgcgaatggcagcagaacttcgaagagtcgcgccagagccgagtaaacagctggcatgactttcagtcgggtgccggcaagtccaagaaagccaagaaacaaaaacatatgaccggcatgatggttccaccaaaatttaagcccgagtcgcgataatatagcttcccagcgcggcgccgctccttcactatcgccagatcacctccgccaaaccgcgtcgcgttgcacatgaatatttttacattttttttataagtatcctttggaattgtaattgacacgtgcataaaatatagatgtaagaaacacatttccgtcttgcctctttccttctacaatggatggcttggaccatctccttcgatcacagttctgtgtacaaggatgcggtgaaaacaatatcgcgcttgatagcagccgacgcctcctccatcttcgactgcagtcccggattgccaatccgaatggcggccgttttaacatcacgcagcgtttcattcagctgctgaatgcagcgaacaatgatgccctcctgcaccgtcgtcagtttcataatctcagcaaagggctgtgaattggattaaatggacagatatgaggataggcaaaattgcgtcctacagggcttcttaccttatttctagcccactcgtagaccacctccagcagaccaaagttcaggcgattatcggtctcgatggctgcctgaaagcgctgctcctcggcaagaattgtatcgttgatctgctcaaatgccgccacgcactccttcaacgcctctggtattaccggcttatcctgcatcttcgcctggaagacaaggccggagagcaaggcggctatttctgccggctcgagatcgttgaacatgttgcatagtatgagctccgtgataagtagctcattttggcccatctcacaggccacttttcccttaagtgtgacctcgtccagttcatctatgtatttcagggctcgcagcaccttcaatttgttacaatagtccggatagagggtcaaatttctcgcggagttcttgaagcgcagctcctcgatgtgaatctccagcattcggcgctcgtacactttggcgaactcctgttcgaatccggcaatgttggtatgtggcagaaattcgccaaccttacggagcaggtgatcaacgtagttcagcatggccacctcgctgtcagcgttcacgattatttccttggaaagattaacgtatttgatgttatccgggttgtcaatgtaactctcattgagctggtttagctcggtcaccgccttgaccaccgatccacttggcggggagtccttgaaccgctccagctgccgctgctcccaattccggataatcgcatctgcatcgactttcaatgtgctcttggtgatactgataatgtctatagccttgatgtccagcacagtgtgtcctccgattcccactggttggaaggtcatgtttctaggcgtcagcgaaagtattttgtaatagagctcgccttgctggaggctgttgctatcctttgccttgaattgatggtccagcactagcaccttatagatggtatccttgcccgggacagatttggtgttgagtagaatggccagtttgttgtagtgcttgccctgcgtgatcacaatgacgcggccagctttcagttccttttggatcttgggttgagtaacaacaaatttctgaaaaaaaaaaaatgtatggtggagttcataaaatgcagttgcaattgtacgtatatcctaccatgatgcggtgcttttctttccaatactccacggctttgtcataaaaattgacaagtggttgcagatgttcgccgagagttgggagcatggcaaacttgtcttcggccagacgaagttgcttctgctgcgtaggcaattggagctttaggttaaactccttgaaactgaacttcatgatatcctccaccttgatactctcgatgcgcagacatgtgaggattaccgcatagcgcagaatgaactgtgactgcaacttctccggcaggcccagaatcatgggccgtagctccatcgatggtggcacactgcccttgcacataatgatcgccgtacctgtctcgtcgtgcccacggcgtccagctctgccggccatttggatgtattcgcctggtttcaggttacgcatctccagtccgtcaaactttttgcaggagtcgaagaccacagtgcgcgcgggcatgttgacgcccatggcaaacgtttcggtggcgaaaagcagcttaactagcccattttgaaagagcatctcgacaatctccttaagaatgggcaagatgccgctatgatgcacacctattcctctctccaaagcgtccttgagaacaagaacctgcggaattgtacggtccggtggcttcagctttgccagacactgcaggaagaacttctgcactgcacccttctccttttccgtgttcaggtccactgactgcaaagcggccaaattggagtcgcaccgattgcgggacagagtgaaagccaccactggcatcatgttgctccgcctcaggaagtcaattagtccgatccaggtgtactgctcctgcttggcatttaaatggtttcttggcccaccaccgccgcccttggccttgccttgcatctccttcttgcgctccacggccttctcgtagttaccctgcagatattttccctgggcgtccaccaggaggaagatgtcatcgcgactctttcctccagcaccagtatagaggaaatgcgtcagaggcactggtcgttttaaagtgctgatcacatagacctttctcttcttggtgctcccaacccagtcggccaattccaaggtattgggcacggtggcactgagcattataatgttaacatgttcgggcaggagtataatgacctcctcccagacatgtcctctttctgggttattaatatagtgcacctcgtcgaagatcacccactccagatcccgcgtgacatcgctgccgcaatacagcattgagcggagaatctcggtggtcatgatcagacaagaggcggtgggctctatctgcaggtcacctgtaataaggcccacatccttgaaggtttttcggaagtcgcggtacttctgattggacaacgccttgatcggcgatgtgtagatggtgcgggtgagatcacgcttggacagagcgatggcatattcagctacaactgtcttgccagcagatgtatgcgctgcaacgaaaacgtactggcgttgttccagcttgagaatggcctgcttttgaaagacatccagttcgaaggggaaatccatggcggggcatggtatctgctctttaaagttattgatgggttggcttatgtccaccatttcggcccaatcgctcttgaagttcttggttgtggtggaaatgtttagcacaggctttaggtcagccttcataatgtgatcgtccacgtctctgaactcctctgaaggtaattgcacgttcgactgttttggacttttaggcgttccagtggagcttgtttcctcactacgcgtaagcttcatccactcctggacgtccagatcctgttctaggttttccaatagatcaacgttactgggatcggcgaccacaggcggcagtgttacagattgcgattggaagaagtcgtagccagagctgaagcccggtggcaccgttagcagcttgtccccgaactgaaagttgctgacatccagagctgcgatctgctggcgctgctcatcgaaaccgcctggccaaaagggaaaattggagtgggagccacgcgtcgcgtcttccagcaagcccggctcccgctgcatggacatcgagttgttggcattggcgcccacggcctccaagtccaattccacgaactcaagtatgtgaccactctggtcgcggcgaggagccaacttagtgcttcccgggcaacggggcgcatgcaacaggcgcatcggatcgaatttgcggggcaaaacatccggcaggggattgtggagggacagctccggtcgcaggatatagttgcgcagccgttcgaggttatcctcgcccctaatctcattcattttaatagtttattcctggcgaaaataactttgtttagcatttgccaaaatacaaggaaaaaatcaacaagagtcggcagataatttggatggactggtcaccctaaaaatcgagaaacaatcgcgtaacgaattgcatcccgtgcagtgtgcaaagatattttaatttttttaattaaaaataattttaacgaatttattccaaaatttatattaagtaaaacaaaaactcaataattattgcagtaatatatttgtattgataattcgtcatcaatacggaagatgatcttgcacatctctatggcactgtttacataaatggcacgctgttagaaccagatttccgcacacggaatgaaaatggttctgtttacttgcgacggaacacttcgaccttgagggggtggcacttgtcgtccggcacatcggcgcccactgcgatggagacatcgccctgtggacaggcgctcagagccaccagaagattcatgtcggccacaaactcaatgaaatcccccttgcgcgctggacttgccttgcagaaatactgatgcgtgtcccgtgtaaatccggtgcacataaagatgttccacacgtcgtgtacatcctgctcggtcagcccgcgctcctccaccaccgccttgactagggaactgtggcaactgcccacccgatccttgcccgtgattagcttgtaggtgtagtcgtcgcaccgtgttccaattacgtcgtgcagagcaccgccatcctcatcgatgccataggcggcaagggaatcaaacacaaaggtggccatgggacgcaggtggggcaggcagctccacagacgatcgtaaacgcgcagatgcgacgagtgcagctggcgcgtcttgcccgagtagaagcgctcggcggtgttctccagattccaaaagttcatgtcgcccacctgagaaccttcgtggacagtgacgcggcacaaatcaccctcttgcattgtccaggtgcgtgcctcccgtttgggcacaatcagtgtctccacaagatcgccagtcagggcacg

SEQ ID NO: 21599 - DNA, 3578 bp, DROSOPHILA
gcaaatgctaaacaaagttattttcgccaggaataaactattaaaatgaatgagattaggggcgaggataacctcgaacggctgcgcaactatatcctgcgaccggagctgtccctccacaatcccctgccggatgttttgccccgcaaattcgatccgatgcgcctgttgcatgcgccccgttgcccgggaagcactaagttggctcctcgccgcgaccagagtggtcacatacttgagttcgtggaattggacttggaggccgtgggcgccaatgccaacaactcgatgtccatgcagcgggagccgggcttgctggaagacgcgacgcgtggctcccactccaattttcccttttggccaggcggtttcgatgagcagcgccagcagatcgcagctctggatgtcagcaactttcagttcggggacaagctgctaacggtgccaccgggcttcagctctggctacgacttcttccaatcgcaatctgtaacactgccgcctgtggtcgccgatcccagtaacgttgatctattggaaaacctagaacaggatctggacgtccaggagtggatgaagcttacgcgtagtgaggaaacaagctccactggaacgcctaaaagtccaaaacagtcgaacgtgcaattaccttcagaggagttcagagacgtggacgatcacattatgaaggctgacctaaagcctgtgctaaacatttccaccacaaccaagaacttcaagagcgattgggccgaaatggtggacataagccaacccatcaataactttaaagagcagataccatgccccgccatggatttccccttcgaactggatgtctttcaaaagcaggccattctcaagctggaacaacgccagtacgttttcgttgcagcgcatacatctgctggcaagacagttgtagctgaatatgccatcgctctgtccaagcgtgatctcacccgcaccatctacacatcgccgatcaaggcgttgtccaatcagaagtaccgcgacttccgaaaaaccttcaaggatgtgggccttattacaggtgacctgcagatagagcccaccgcctcttgtctgatcatgaccaccgagattctccgctcaatgctgtattgcggcagcgatgtcacgcgggatctggagtgggtgatcttcgacgaggtgcactatattaataacccagaaagaggacatgtctgggaggaggtcattatactcctgcccgaacatgttaacattataatgctcagtgccaccgtgcccaataccttggaattggccgactgggttgggagcaccaagaagagaaaggtctatgaaagagtcgcgatgacatcttcctcctggtggacgcccagggaaaatatctgcagggtaactacgagaaggccgtggagcgcaagaaggagatgcaaggcaaggccaagggcggcggtggtgggccaagaaaccatttaaatgccaagcaggagcagtacacctggatcggactaattgacttcctgaggcggagcaacatgatgccagtggtggctttcactctgtcccgcaatcggtgcgactccaatttggccgctttgcagtcagtggacctgaacacggaaaaggagaagggtgcagtgcagaagttcttcctgcagtgtctggcaaagctgaagccaccggaccgtacaattccgcaggttcttgttctcaaggacgctttggagagaggaataggtgtgcatcatagcggcatcttgcccattcttaaggagattgtcgagatgctctttcaaaatgggctagttaagctgcttttcgccaccgaaacgtttgccatgggcgtcaacatgcccgcgcgcactgtggtcttcgactcctgcaaaaagtttgacggactggagatgcgtaacctgaaaccaggcgaatacatccaaatggccggcagagctggacgccgtgggcacgacgagacaggtacggcgatcattatgtgcaagggcagtgtgccaccatcgatggagctacggcccatgattctgggcctgccggagaagttgcagtcacagttcattctgcgctatgcggtaatcctcacatgtctgcgcatcgagagtatcaaggtggaggatatcatgaagttcagtttcaaggagtttaacctaaagctccaattgcctacgcagcagaagcaacttcgtctggccgaagacaagtttgccatgctcccaactctcggcgaacatctgcaaccacttgtcaatttttatgacaaagccgtggagtattggaaagaaaagcaccgcatcatgaaatttgttgttactcaacccaagatccaaaaggaactgaaagctggccgcgtcattgtgatcacgcagggcaagcactacaacaaactggccattctactcaacaccaaatctgtcccgggcaaggataccatctataaggtgctagtgctggaccatcaattcaaggcaaaggatagcaacagcctccagcaaggcgagctctattacaaaatactttcgctgacgcctagaaacatgaccttccaaccagtgggaatcggaggacacactgtgctggacatcaaggctatagacattatcagtatcaccaagagcacattgaaagtcgatgcagatgcgattatccggaattgggagcagcggcagctggagcggttcaaggactccccgccaagtggatcggtggtcaaggcggtgaccgagctaaaccagctcaatgagagttacattgacaacccggataacatcaaatacgttaatctttccaaggaaataatcgtgaacgctgacagcgaggtggccatgctgaactacgttgatcacctgctccgtaaggttggcgaatttctgccacataccaacattgccggattcgaacaggagttcgccaaagtgtacgagcgccgaatgctggagattcacatcgaggagctgcgcttcaagaactccgcgagaaatttgaccctctatccggactattgtaacaaattgaaggtgctgcgagccctgaaatacatagatgaactggacgaggtcacacttaagggaaaagtggcctgtgagatgggccaaaatgagctacttatcacggagctcatactatgcaacatgttcaacgatctcgagccggcagaaatagccgccttgctctccggccttgtcttccaggcgaagatgcaggataagccggtaataccagaggcgttgaaggagtgcgtggcggcatttgagcagatcaacgatacaattcttgccgaggagcagcgctttcaggcagccatcgagaccgataatcgcctgaactttggtctgctggaggtggtctacgagtgggctagaaataagccctttgctgagattatgaaactgacgacggtgcaggagggcatcattgttcgctgcattcagcagctgaatgaaacgctgcgtgatgttaaaacggccgccattcggattggcaatccgggactgcagtcgaagatggaggaggcgtcggctgctatcaagcgcgatattgttttcaccgcatccttgtacacagaactgtga

SEQ ID NO: 21600 - protein, 474 aa, DROSOPHILA
MNEIRGEDNLERLRNYILRPELSLHNPLPDVLPRKFDPMRLLHAPRCPGSTKLAPRRDQSGHILEFVELDLEAVGANANNSMSMQREPGLLEDATRGSHSNFPFWPGGFDEQRQQIAALDVSNFQFGDKLLTVPPGFSSGYDFFQSQSVTLPPVVADPSNVDLLENLEQDLDVQEWMKLTRSEETSSTGTPKSPKQSNVQLPSEEFRDVDDHIMKADLKPVLNISTTTKNFKSDWAEMVDISQPINNFKEQIPCPAMDFPFELDVFQKQAILKLEQRQYVFVAAHTSAGKTVVAEYAIALSKRDLTRTIYTSPIKALSNQKYRDFRKTFKDVGLITGDLQIEPTASCLIMTTEILRSMLYCGSDVTRDLEWVIFDEVHYINNPERGHVWEEVIILLPEHVNIIMLSATVPNTLELADWVGSTKKRKVYERVAMTSSSWWTPRENICRVTTRRPWSARRRCKARPRAAVVGQETI

SEQ ID NO: 21601 - DNA, 3942 bp, DROSOPHILA
tcggtacgattacagcaaggaggacccccacgaagcaggcaacaagctggcaaagatgcaggagaaaaaggacaaaatggaacgcactctcaacatgaacgctatcatggtgctggatcgcgaggaagagaacttcaaggagaccgagcgccggcgaaacattgtggcgatggacaaggagaagattaagaaaatcatagtgaagatggacgaagaagagcaggatcagctgaacaaagccgctaccgaggtgaacacgaacttcagtgggatctttagctcccttttaccgggtgctgaagcgaaactcaatcccgtccataccaatggctgtctgaccggtttggagattaaagtcggcttcaatggcatatggaaggagagtctcggtgaactttctggtggccagaagtccttggtggctctgtcccttgtcctggccatgcttaagttctctccggctcccttgtacattttggatgaggtggacgctgccctggacatgtcacacacccaaaacataggtagtatgttgaagcagcacttcaccaactcgcagttcttgattgtgtctctcaaggatggtctcttcaaccacgccaacgtcctgttccgcactctcttcgaggagggtgtgtccaccatcacccggcaggtcagcagacaggcgacaaccaacaaacgctgaaatggaactcgtttactttcttatcacttaataaaactttaaaaataccatataaaactgttcttatcattttaattgtgaattttttcaagtttttttaattcgcaaaaaaggttgtgtattacagcaatatacttatttcaagagccatcggtcaatatacttattgctacattacttaaatcaacgaaataagtaatttaactacaaatttaattttgtaacggtcgtttgcgcatcagctgatttccaaccgggcgggcgaaacgtcaaactggtgagaccgtcaaacgcacacacacacatacgcagcggacagaagaagaagaacgaaaggcagcaacagcaatgtttgagggagtgaaaaattaaacaaaagtccccggaattcagcagcaaaaactcgacggcggttgaaaaacaaaacatcaagatttcgagccaacgcagactgcttcaaaagctcaccatggtaatttgcaaggttccaaaaattacgaatcgtccgattcttttaccacacacacacacgacttgtgcgtgtgtgtgtgcggggagcagcaaaatattgtagacaccgctggcatttggataaacaatagcaacaattggagtggtgttcgaggcgggaaaagcaccgatttgtggaatttcattcattggaatgtgggattgctaatgaaccgttttactcttccaggatcgagtgaccaagccgcagaagaagatgctcatcacactgctgcgggaaaccaagtacatggagggcaaaaaggagaaggagtggtattgggagaagatccaagcggcccttaatactattggtcccaagaagacgattattcagtggaaaaaggtgcgtttacttgcctattaaatccaaaaataaactttaatcttcttccagtgctggcgcgatatgcgactgaccacaaggaaaaagctggcggaactgaagcgctgtcaactctctggaggatctccaccaccggggatcgaactaaaccaggaggacaacgatatcatcgacattgtgggcaccgagtacttctacgaggagatgaatggtgagctcaaggcggagaacttcttgaccggcttggactacgccccggagcatctgtgcgatgctattctcacggcagcagtgggccatcaccagcacaatatgcagcaccagaaggatccgcaatcgcatgcagggcaacagcagcagcaggatcatcacaccaacgatggcgaaaccaatgatgctcctggatcaagcaatggtggctcatatcagggacacccagtatcccagttgcaggcgcacaatggcagcggtggaggaggcgagcatagcggcggtggtcaatcccactccggaatgctccagcaccctgcttttcacggtggcttgcatccacacctgttgaggcgccagcatggaagtggatcactatccagagagtcgccatttgaggagaagcttctgcagttcatgcaggatgcatttccaaaaaagagcaagaagcgcaagaaccgggatcccgacaagctgttcctcttatccctgtacgaagagatcaagagagttccggaggagatacgccttgatgtaaagtccgaactaatgcagatactgaagaagtatcagaagaagtcgcctgtcaaagcggagaagcccgcgccctcctctacgtcaacctcctcaaaactcagctctagcagcagtggcagtagcacggtgactactcacttgtcccacagcatgtaccagttgcaaaagaaatacgaaaagggcgagcgtgaaccatcgcctcaatcacaggtagagcgagtagcatctgcaggcgcagttgctgtgcccattcatacctcccagcagctgcctcttttccaacttcagaagaagtacgaggagaacagcgtggagaaggttcatcagcagcaacagcaacagcaaagcgagcaacgcaagcatgtggaggccgctcaggcccttcatgctgcccaccagcaaccgcctccaccgccacccaatgagcacctgcaccacccccagatggcccacaacatcatgtttccgctgggacagcttcgcaacgagcagccgaccgcacagcaacaccagcatggccacaatccccaccagcaacagcaacagcatccccaccagcagcagcaacagggacagcaacaccatccgccaacgatcttcggatcgaccgccagcgaacggcctccaatgtcctacgaaaatgtcggatgagtcctgagccgtctgtgggaagccacttgtggagcaccacgccctgcgacggtgtcccccacgacggcagacgcgcacagctgttagccctcgatttagacggcaattcgtaggtctcattcttatgctagcctatacctaagtacacattgctcactacactactacagtcaaaaatggtgcagtcaatgaggaagatactcctgatgtatgccattttgtagtaagtggatgccgtgatcctcatgtaaatgttcccgtggcaataacagcgtagctcaactgtgactcaagttctcaatagatcgcgacgcatacattttttcggtgtaaatacaaatataattgaatcttaaaaactgtggatgttttttagttcaagtaaaatgattgatccccaacttctggcaagagctccctattcccaggtttttgtttttctggccaaatcggagaagtcattggcttagctctgaggtggaatccacaatcttgtttgtttggactttgaaaagctgtaaatccggcaagcggtccgtcgttaagctgtcttcaggaatatctagtcttcatctctcgtaacgcgataacgaaacccacagggagcacgccatatcataaagatagtcaaacagctgactgatccggtctgcctaagtgcgaatttcaactgagcgctgccgatcgccgaactcgtcgttgtctgtcgcatgttgggcaggttgatgagcgatcacgagccgagctgcagcatagtccgccagatctgcggcgcttatcagtggcgtccggctgggataaagagatacagatacagatacaggcggatcgactggaggcagactgggtctggcattcttttccggcagctgccagcagcagttgatcgtcagcgatcgaatcacagggattggcggcagctcctgcagatgcagagttcaaatttccagtgaagttctcaaccagtcaatccattcaccatgggccaaggtacgagaat

SEQ ID NO: 21602 - DNA, 1663 bp, DROSOPHILA
cggacagaagaagaagaacgaaaggcagcaacagcaatgtttgagggagtgaaaaattaaacaaaagtccccggaattcagcagcaaaaactcgacggcggttgaaaaacaaaacatcaagatttcgagccaacgcagactgcttcaaaagctcaccatggatcgagtgaccaagccgcagaagaagatgctcatcacactgctgcgggaaaccaagtacatggagggcaaaaaggagaaggagtggtattgggagaagatccaagcggcccttaatactattggtcccaagaagacgattattcagtggaaaaagtgctggcgcgatatgcgactgaccacaaggaaaaagctggcggaactgaagcgctgtcaactctctggaggatctccaccaccggggatcgaactaaaccaggaggacaacgatatcatcgacattgtgggcaccgagtacttctacgaggagatgaatggtgagctcaaggcggagaacttcttgaccggcttggactacgccccggagcatctgtgcgatgctattctcacggcagcagtgggccatcaccagcacaatatgcagcaccagaaggatccgcaatcgcatgcagggcaacagcagcagcaggatcatcacaccaacgatggcgaaaccaatgatgctcctggatcaagcaatggtggctcatatcagggacacccagtatcccagttgcaggcgcacaatggcagcggtggaggaggcgagcatagcggcggtggtcaatcccactccggaatgctccagcaccctgcttttcacggtggcttgcatccacacctgttgaggcgccagcatggaagtggatcactatccagagagtcgccatttgaggagaagcttctgcagttcatgcaggatgcatttccaaaaaagagcaagaagcgcaagaaccgggatcccgacaagctgttcctcttatccctgtacgaagagatcaagagagttccggaggagatacgccttgatgtaaagtccgaactaatgcagatactgaagaagtatcagaagaagtcgcctgtcaaagcggagaagcccgcgccctcctctacgtcaacctcctcaaaactcagctctagcagcagtggcagtagcacggtgactactcacttgtcccacagcatgtaccagttgcaaaagaaatacgaaaagggcgagcgtgaaccatcgcctcaatcacaggtagagcgagtagcatctgcaggcgcagttgctgtgcccattcatacctcccagcagctgcctcttttccaacttcagaagaagtacgaggagaacagcgtggagaaggttcatcagcagcaacagcaacagcaaagcgagcaacgcaagcatgtggaggccgctcaggcccttcatgctgcccaccagcaaccgcctccaccgccacccaatgagcacctgcaccacccccagatggcccacaacatcatgtttccgctgggacagcttcgcaacgagcagccgaccgcacagcaacaccagcatggccacaatccccaccagcaacagcaacagcatccccaccagcagcagcaacagggacagcaacaccatccgccaacgatcttcggatcgaccgccagcgaacggcctccaatgtcctacgaaaatgtcggatga

SEQ ID NO: 21603 - protein, 501 aa, DROSOPHILA
MDRVTKPQKKMLITLLRETKYMEGKKEKEWYWEKIQAALNTIGPKKTIIQWKKCWRDMRLTTRKKLAELKRCQLSGGSPPPGIELNQEDNDIIDIVGTEYFYEEMNGELKAENFLTGLDYAPEHLCDAILTAAVGHHQHNMQHQKDPQSHAGQQQQQDHHTNDGETNDAPGSSNGGSYQGHPVSQLQAHNGSGGGGEHSGGGQSHSGMLQHPAFHGGLHPHLLRRQHGSGSLSRESPFEEKLLQFMQDAFPKKSKKRKNRDPDKLFLLSLYEEIKRVPEEIRLDVKSELMQILKKYQKKSPVKAEKPAPSSTSTSSKLSSSSSGSSTVTTHLSHSMYQLQKKYEKGEREPSPQSQVERVASAGAVAVPIHTSQQLPLFQLQKKYEENSVEKVHQQQQQQQSEQRKHVEAAQALHAAHQQPPPPPPNEHLHHPQMAHNIMFPLGQLRNEQPTAQQHQHGHNPHQQQQQHPHQQQQQGQQHHPPTIFGSTASERPPMSYENVG

SEQ ID NO: 21604 - DNA, 5956 bp, DROSOPHILA
agagcagcgagtagctatggacattgggatattgcattacagtggcgatactggcaatgtaaacatgcgtaccttctggtgtggattagactccactcgctccatgatcaaatctggcggacgcttctcgaactgtttgtacgtctcaatgattttgcccgcctcctcagcgttccaggccaacatcattgtcaggtcggctaacagtgatatcctggtcaagctcttgagggcattgtttggctctggtgtgtccacctggaccagtagcacccgcagctcatacatcttgcccagagccttcaaacgctggcaaatgtagtcgggattgagattatggtactttagcgagaggtacagcacgcaggatgttcgaccgaccacataatcgggcacgatgtcgtcgcggaattccagcgggacattaagtatggatttcaggatggggttaccgcgctgtttgctgtgaacaaggacgcagtgcggatttgaagccggcttgccgggtgcgggtctgccggatccactaggttccgtactattgctaggagcaggattcactgctgtggccgctggggcatctactttcggttgctttgcagccgttggcatttccatggcgcccagaacatcgttaaaggaatcatcgtcgaagtcttccatttcggtatttaaataaaacaaactgaaaagctcaaggtgcgattagattatcaggtgacgaaggcacttaaaaactaaaattattacaccattttttgtaataaaagttccgggggtcataaggtagcttaattaaacgttaaaataattgaatgaagctatagattagttaaatttgtatagtcatacataagtattttagctgaatttaattgggttcatagcatttttaaattgttgccttgtattgcatttcgtcactaggtgcacttttatcgaaagcattcctgccctgacatttcgatatgtatttcagatgccgtgccacggtcacactaattgcggcaaatttttgacgcggaatttaacgaaaagaacgccaggaattaaaaaaaccgcttagcataaaaatgtatgttaagaaactagtgctcgacggcttcaaatcctatggccggcgcacggagatagaaggattcgatccagaatttacggctatcacgggtctaaacggctccggcaagtcaaacatcttggatagcatttgtttcgtactgggaattagtaatctccagaatgtgagtaccaattggatatgtctggggctggacttcaacgcttatctctgtgctaccaggtgcgcgcttcggctctacaggatttggtgtacaagaatgggcaggcgggcattaccaaggccactgttaccattgtgtttgacaacacaaatcccgcccagtgtccgcagggctacgaaaagtgccgggagatctctgtgacgcgccaggtggttgtcggaggcaagaacaagttcctcatcaatggcaagctggtgcagaacaagaaggtgcaagacttcttctgctccatccagctaaatgtaaacaatcccaacttcctgatcatgcagggcaagatccaacaagtgctaaatatgaagcccaaggaggtgggtagccagaaaaacacaaccataaatagttctccatctaacatagatatttccccaaggttctgtcaatggtagaggaggcagcgggaaccagtcagtacaaaaccaagcgagatgccaccaaaaccctgattgaaaaaaaggagaccaaagtgcgggagaccaaggtcttgctcgacgaggaggtgctgccaaagctggttaagctgcgccaagaacgctccgcctaccaggagtatcagaaaatctgccgcgacatagacttcctcatcagaattcacatctccgccaagtatctcaagcaatgcgagaccctcaagacggtggaggctaatgagcacaaaatcgaggatcgcatagcgaactgcaaggccactcacgccaagaacctcgcagaggtcgagagcattgaaaactccgtgaaggagatgcagcaacagatcgatgcagagatgggtggctccatcaaaaatctcgaaacccagctcagcgccaagcgggcactagaagctaccgctacgggtagcttgaaggcggcccagggaacgattcagcaagatgagaagaaaattcgcatggcatccaaaaacattgaggatgatgaacgagccctggcaaaaaaagaagcggacatggccaaggttcaaggcgaatttgaaagcctcaaggaggcagatgccagggactcaaaagcctatgaggacgcccaaaagaagctggaggctgtctcgcagggactctccaccaatgaaaacggagaagcctcaacactgcaagaacaattgataggtatgtctgtcggggatgaaactaaatcattttaattacctatattcccgctttagtggccaaggagcagttcagcgaggcacagaccaccattaagacctcagagatcgagctgcgtcatacgcgtggcgtattgaaacagcgtgagggtgagacccagaccaacgacgctgcctatgtaaaggataagaagctgcatgatcagttggtggttgagattaagaacttagaacggcagctacaaagtctcgattacgagggcggtcatttcgagaagctaaagcagcgacgcaatgatctgcacatgcgaaagcgcgatctgaaacgagagctggaccgctgcaatgcctcccgctatgatctgcaataccaggacccagaaccaaactttgatcggcgtaaggtgcgtggtttggtaggcaagttgttccaggtgaaagacatgcaaaactccatggctctagtccagacagccggcggaagtgtaagttgttaaatctgatttgaaaagttatttctttaatcacgagttctatgttagttatatagctacgtgacggacgatgatgtgactagcaagaagatcttgcagaggggcaatcttcagcgtcgtgtcactttgattcccatcaacaagattcaatctggttcgctaaacagaaatgtggtagaatacgctcaaaacaaagtgggcgccgagaatgtccaatgggccatgtcactgattgactatgaccgctattacgagcctgtcatgaagttttgctttggcggaacacttatctgcaaggacctcattgtagccaaacaagtgagtatatatatttctttttctgtacatcttttaaatgcattttttttatctagatcagctacgacccccgtattaattgtcgttctgtgactttggaaggagatgtcgtcgatccccatggcacagtgtctggaggtgctgctcctaaaggtgctaacgttctagaagaattgcacgcaattaagcaaatagaaaaggagtacagggagatcgactctgagatagcccaagtggaaaagcaaattgcgtaggtgaaccagtaacttctcattgccaatacttacgcctatctgtttttagatccattgaaaaccaggccctcgcgttcaacaaaatgaaggaaaatcttgacttgcgacagcacgagctaaccatgtgcgagaacaggttggcccaaacaacctttcaacagaatcaggctgaaattgaagaaatgagggaaagggtcaagaccctagagcagcaaataattgactcccgtgaaaagcagaagacctcgcaagccaaaatagtggatatcgaggcgaagttggcagatgcaaagggttatcgcgagcgagagctgaatgcagccaccaacgagatcaaggtgaccaagcaaagggcggagaaatctcgtgcgaactggaaaaagcgagagcaggagttcgaaactcttcaattggaaattactgagctgcagaaaagtatcgaaactgcaaagaagcagcaccaggaaatgattgataacctcgaaaagtttaaggccgagctagacgctctgaaagtaaatagctccagtgccgcgtccgaggtgacggagctcgaacaggcgattaaggagcagaaagataaactgagagatcagaacaaggagatgcgaaatcagttggtcaagaaggagaaaatgttgaaggaaaatcaggagattgagctggaggtgaagaaaaaagagaacgaacaaaaaaagatcagttcggatgccaaagaggcaaagaaacggatggaagcccttgaggcaaagtatccgtggattccggaggagaagaactgctttggcatgaagaatactcggtacgattacagcaaggaggacccccacgaagcaggcaacaagctggcaaagatgcaggagaaaaaggacaaaatggaacgcactctcaacatgaacgctatcatggtgctggatcgcgaggaagagaacttcaaggagaccgagcgccggcgaaacattgtggcgatggacaaggagaagattaagaaaatcatagtgaagatggacgaagaagagcaggatcagctgaacaaagccgctaccgaggtgaacacgaacttcagtgggatctttagctcccttttaccgggtgctgaagcgaaactcaatcccgtccataccaatggctgtctgaccggtttggagattaaagtcggcttcaatggcatatggaaggagagtctcggtgaactttctggtggccagaagtccttggtggctctgtcccttgtcctggccatgcttaagttctctccggctcccttgtacattttggatgaggtggacgctgccctggacatgtcacacacccaaaacataggtagtatgttgaagcagcacttcaccaactcgcagttcttgattgtgtctctcaaggatggtctcttcaaccacgccaacgtcctgttccgcactctcttcgaggagggtgtgtccaccatcacccggcaggtcagcagacaggcgacaaccaacaaacgctgaaatggaactcgtttactttcttatcacttaataaaactttaaaaataccatataaaactgttcttatcattttaattgtgaattttttcaagtttttttaattcgcaaaaaaggttgtgtattacagcaatatacttatttcaagagccatcggtcaatatacttattgctacattacttaaatcaacgaaataagtaatttaactacaaatttaattttgtaacggtcgtttgcgcatcagctgatttccaaccgggcgggcgaaacgtcaaactggtgagaccgtcaaacgcacacacacacatacgcagcggacagaagaagaagaacgaaaggcagcaacagcaatgtttgagggagtgaaaaattaaacaaaagtccccggaattcagcagcaaaaactcgacggcggttgaaaaacaaaacatcaagatttcgagccaacgcagactgcttcaaaagctcaccatggtaatttgcaaggttccaaaaattacgaatcgtccgattcttttaccacacacacacacgacttgtgcgtgtgtgtgtgcggggagcagcaaaatattgtagacaccgctggcatttggataaacaatagcaacaattggagtggtgttcgaggcgggaaaagcaccgatttgtggaatttcattcattggaatgtgggattgctaatgaaccgttttactcttccaggatcgagtgaccaagccgcagaagaagatgctcatcacactgctgcgggaaaccaagtacatggagggcaaaaaggagaaggagtggtattgggagaagatccaagcggcccttaatactattggtcccaagaagacgattattcagtggaaaaaggtgcgtttacttgcctattaaatccaaaaataaactttaatcttcttccagtgctggcgcgatatgcgactgaccacaaggaaaaagctggcggaactgaagcgctgtcaactctctggaggatctccaccaccggggatcgaa

SEQ ID NO: 21605 - DNA, 3613 bp, DROSOPHILA
aattgcggcaaatttttgacgcggaatttaacgaaaagaacgccaggaattaaaaaaaccgcttagcataaaaatgtatgttaagaaactagtgctcgacggcttcaaatcctatggccggcgcacggagatagaaggattcgatccagaatttacggctatcacgggtctaaacggctccggcaagtcaaacatcttggatagcatttgtttcgtactgggaattagtaatctccagaatgtgcgcgcttcggctctacaggatttggtgtacaagaatgggcaggcgggcattaccaaggccactgttaccattgtgtttgacaacacaaatcccgcccagtgtccgcagggctacgaaaagtgccgggagatctctgtgacgcgccaggtggttgtcggaggcaagaacaagttcctcatcaatggcaagctggtgcagaacaagaaggtgcaagacttcttctgctccatccagctaaatgtaaacaatcccaacttcctgatcatgcagggcaagatccaacaagtgctaaatatgaagcccaaggaggttctgtcaatggtagaggaggcagcgggaaccagtcagtacaaaaccaagcgagatgccaccaaaaccctgattgaaaaaaaggagaccaaagtgcgggagaccaaggtcttgctcgacgaggaggtgctgccaaagctggttaagctgcgccaagaacgctccgcctaccaggagtatcagaaaatctgccgcgacatagacttcctcatcagaattcacatctccgccaagtatctcaagcaatgcgagaccctcaagacggtggaggctaatgagcacaaaatcgaggatcgcatagcgaactgcaaggccactcacgccaagaacctcgcagaggtcgagagcattgaaaactccgtgaaggagatgcagcaacagatcgatgcagagatgggtggctccatcaaaaatctcgaaacccagctcagcgccaagcgggcactagaagctaccgctacgggtagcttgaaggcggcccagggaacgattcagcaagatgagaagaaaattcgcatggcatccaaaaacattgaggatgatgaacgagccctggcaaaaaaagaagcggacatggccaaggttcaaggcgaatttgaaagcctcaaggaggcagatgccagggactcaaaagcctatgaggacgcccaaaagaagctggaggctgtctcgcagggactctccaccaatgaaaacggagaagcctcaacactgcaagaacaattgatagtggccaaggagcagttcagcgaggcacagaccaccattaagacctcagagatcgagctgcgtcatacgcgtggcgtattgaaacagcgtgagggtgagacccagaccaacgacgctgcctatgtaaaggataagaagctgcatgatcagttggtggttgagattaagaacttagaacggcagctacaaagtctcgattacgagggcggtcatttcgagaagctaaagcagcgacgcaatgatctgcacatgcgaaagcgcgatctgaaacgagagctggaccgctgcaatgcctcccgctatgatctgcaataccaggacccagaaccaaactttgatcggcgtaaggtgcgtggtttggtaggcaagttgttccaggtgaaagacatgcaaaactccatggctctagtccagacagccggcggaagtttatatagctacgtgacggacgatgatgtgactagcaagaagatcttgcagaggggcaatcttcagcgtcgtgtcactttgattcccatcaacaagattcaatctggttcgctaaacagaaatgtggtagaatacgctcaaaacaaagtgggcgccgagaatgtccaatgggccatgtcactgattgactatgaccgctattacgagcctgtcatgaagttttgctttggcggaacacttatctgcaaggacctcattgtagccaaacaaatcagctacgacccccgtattaattgtcgttctgtgactttggaaggagatgtcgtcgatccccatggcacagtgtctggaggtgctgctcctaaaggtgctaacgttctagaagaattgcacgcaattaagcaaatagaaaaggagtacagggagatcgactctgagatagcccaagtggaaaagcaaattgcatccattgaaaaccaggccctcgcgttcaacaaaatgaaggaaaatcttgacttgcgacagcacgagctaaccatgtgcgagaacaggttggcccaaacaacctttcaacagaatcaggctgaaattgaagaaatgagggaaagggtcaagaccctagagcagcaaataattgactcccgtgaaaagcagaagacctcgcaagccaaaatagtggatatcgaggcgaagttggcagatgcaaagggttatcgcgagcgagagctgaatgcagccaccaacgagatcaaggtgaccaagcaaagggcggagaaatctcgtgcgaactggaaaaagcgagagcaggagttcgaaactcttcaattggaaattactgagctgcagaaaagtatcgaaactgcaaagaagcagcaccaggaaatgattgataacctcgaaaagtttaaggccgagctagacgctctgaaagtaaatagctccagtgccgcgtccgaggtgacggagctcgaacaggcgattaaggagcagaaagataaactgagagatcagaacaaggagatgcgaaatcagttggtcaagaaggagaaaatgttgaaggaaaatcaggagattgagctggaggtgaagaaaaaagagaacgaacaaaaaaagatcagttcggatgccaaagaggcaaagaaacggatggaagcccttgaggcaaagtatccgtggattccggaggagaagaactgctttggcatgaagaatactcggtacgattacagcaaggaggacccccacgaagcaggcaacaagctggcaaagatgcaggagaaaaaggacaaaatggaacgcactctcaacatgaacgctatcatggtgctggatcgcgaggaagagaacttcaaggagaccgagcgccggcgaaacattgtggcgatggacaaggagaagattaagaaaatcatagtgaagatggacgaagaagagcaggatcagctgaacaaagccgctaccgaggtgaacacgaacttcagtgggatctttagctcccttttaccgggtgctgaagcgaaactcaatcccgtccataccaatggctgtctgaccggtttggagattaaagtcggcttcaatggcatatggaaggagagtctcggtgaactttctggtggccagaagtccttggtggctctgtcccttgtcctggccatgcttaagttctctccggctcccttgtacattttggatgaggtggacgctgccctggacatgtcacacacccaaaacataggtagtatgttgaagcagcacttcaccaactcgcagttcttgattgtgtctctcaaggatggtctcttcaaccacgccaacgtcctgttccgcactctcttcgaggagggtgtgtccaccatcacccggcaggtcagcagacaggcgacaaccaacaaacgctga

SEQ ID NO: 21606 - protein, 1179 aa, DROSOPHILA
MYVKKLVLDGFKSYGRRTEIEGFDPEFTAITGLNGSGKSNILDSICFVLGISNLQNVRASALQDLVYKNGQAGITKATVTIVFDNTNPAQCPQGYEKCREISVTRQVVVGGKNKFLINGKLVQNKKVQDFFCSIQLNVNNPNFLIMQGKIQQVLNMKPKEVLSMVEEAAGTSQYKTKRDATKTLIEKKETKVRETKVLLDEEVLPKLVKLRQERSAYQEYQKICRDIDFLIRIHISAKYLKQCETLKTVEANEHKIEDRIANCKATHAKNLAEVESIENSVKEMQQQIDAEMGGSIKNLETQLSAKRALEATATGSLKAAQGTIQQDEKKIRMASKNIEDDERALAKKEADMAKVQGEFESLKEADARDSKAYEDAQKKLEAVSQGLSTNENGEASTLQEQLIVAKEQFSEAQTTIKTSEIELRHTRGVLKQREGETQTNDAAYVKDKKLHDQLVVEIKNLERQLQSLDYEGGHFEKLKQRRNDLHMRKRDLKRELDRCNASRYDLQYQDPEPNFDRRKVRGLVGKLFQVKDMQNSMALVQTAGGSLYSYVTDDDVTSKKILQRGNLQRRVTLIPINKIQSGSLNRNVVEYAQNKVGAENVQWAMSLIDYDRYYEPVMKFCFGGTLICKDLIVAKQISYDPRINCRSVTLEGDVVDPHGTVSGGAAPKGANVLEELHAIKQIEKEYREIDSEIAQVEKQIASIENQALAFNKMKENLDLRQHELTMCENRLAQTTFQQNQAEIEEMRERVKTLEQQIIDSREKQKTSQAKIVDIEAKLADAKGYRERELNAATNEIKVTKQRAEKSRANWKKREQEFETLQLEITELQKSIETAKKQHQEMIDNLEKFKAELDALKVNSSSAASEVTELEQAIKEQKDKLRDQNKEMRNQLVKKEKMLKENQEIELEVKKKENEQKKISSDAKEAKKRMEALEAKYPWIPEEKNCFGMKNTRYDYSKEDPHEAGNKLAKMQEKKDKMERTLNMNAIMVLDREEENFKETERRRNIVAMDKEKIKKIIVKMDEEEQDQLNKAATEVNTNFSGIFSSLLPGAEAKLNPVHTNGCLTGLEIKVGFNGIWKESLGELSGGQKSLVALSLVLAMLKFSPAPLYILDEVDAALDMSHTQNIGSMLKQHFTNSQFLIVSLKDGLFNHANVLFRTLFEEGVSTITRQVSRQATTNKR

SEQ ID NO: 21607 - DNA, 2701 bp, DROSOPHILA
aagattacagtaaccaattcaaattacttacgaaatgattacgcaatgtctgtttgtattctggtgtacaaccgtaacccaaataacacttttaaacgaaacccattccacagattgccaccgatcccaagcaggccgttcaaaaggccaaggaactgtgggtctatctcagtgcagatgaacccgaaaatcaagcgaggcccgccactctggagcagttgattgtgctactgacccgcgaatcggctaggcgtgtggttcatctagtgaacttcagtgctcatgtggcagccaacatacccaggttggtagatcccgcctccatccttatctttccatgtgaaccccttcgaaccaaaccttacagaaacctggcgcacacgacaacagaggttgcccaccatattatctatatcaaccaccgcatcatcacaatctcacggctggacaaggttaaaaccatctccaaagaggaagctgaatctcttttcaagcgcatgctggcgttctatggtagccttcagggcctgaccaatgcctacctggtaagaaaggatgtgatactagcagtcagacggaagatgattatatatattaaatatattcgacaggagcgcgtggccagctttctatccggacgcatggaggccgagaaggtgacgggcagcgatggcggcaattccaaccaccggtcatcgcggaggaggcaggatccgaaccattattcagccacccacaataacatcaacggcgtctactagcattgaattctttattgctatcgtatttttatttctgtttctccgtgcatatacggaaaatacactaaacgatattgtacatctatttttaacataatgcatttgtcaataatataagcctaacttcacgcttaacaatacaacgcggacttttatccaaaattattatagactcatattgccaataaagcattaggtattgaaagaattcctagggtgctttaaattcttgctttaatttatttaaataagttcgctttgtaatacgcaagctctttgatgctttctcggatgtcgtccagactacgatgcgtgaaagattttttgggagcggaatccagaattgcgggatgccatcgcttggccagttccttgatggtggacacatcgacgatgcggtaatgcaggtaagcatctaccaatggcatgaatttcataatgaatagtcggtcggtgtagacggagttcccaccaagcggacaggcgcgctttggtatgttcttctcgagataggatagcactagattggaggcttcttcgagattcacatccgagctcttgcatcgatcaataagacctgaattgtaatgatgtttcatgcaccactcgttcatcgagtcgtagacctcctgcggatggttgatggcaaagcatggtccctccgacttcacgttcaggtcctggtccgtaatgatgcaggccacctcgaggattttgtccttttcaatgtccagcccggtcatctccaagtccatccacacgatgtccgtgtctaagccacaggtgctgctcattctgtcatttgaattgaatgcgatgtggctccgaatttggcggttcagggacaatccgacgcgtcgaaggtgagcaagcatatatagctgtagcgcaggtttctttttgctaaatgtaaatatgcggcggttttaccatgtgtttgataacatggtatcgttacgataacaactggtcacactacaggcacattgcccaacactgaaagggggattcctgtcattacaggaacaaaacaaatcgaatattatgttcatacccaaataattgcagaataatttgttcagcattcttatttgtatccaccaaagtcgaaagtaattgtaattaaagttaaaggttttatgcgataacgacttggagccattttaactacagcgaacggtaatttctaacaaaccgcgcacggtcactctgtcgagttgatatttttatcaaaaattgttgtacggaaaacgcaaaaggtgtcgttattgttgcagcatgtcctcctcgtcggccagagaccaaccgggaacctcccatgacaacttcgaggaattctacacagaagtaagtgtggcggacggaaccgcaggctcagtttttattctacactgggtcgggctccttgcacggcagccgctccaaataaactaaacccttgttattatgtacactttagtaaatgattttgtgcctatattgcaggtgaaagaaattgaaaaacgtgattcagttttaactccttctcaacaaattgatcgtttacttcgtccaggttcaacgtacttcaatctcaatccgtttgaggtgctccaaatcgagcccgaggtcgaattggcggatataaaaaagcgataccgcaccttgtcaatcctcgtccatccagacaagaatcccgacaaccaggagcgcgctcaaatggcattcgatattgtgtcgcgttcctggaaaatcctcgaaaacgaactcacgcgcaaaaggtgtctggaggtgtacgaggaggcaaaggggcgaacggatcaaatggtgagttccagttcctcggagcattaagctctatgatcgtccggctttagaataattgaaaatccaattgcaatggcacattttctttattgtactgtattatattaatttgttcgttacctttcagattgcag

SEQ ID NO: 21608 - DNA, 701 bp, DROSOPHILA
caaacacatggtaaaaccgccgcatatttacatttagcaaaaagaaacctgcgctacagctatatatgcttgctcaccttcgacgcgtcggattgtccctgaaccgccaaattcggagccacatcgcattcaattcaaatgacagaatgagcagcacctgtggcttagacacggacatcgtgtggatggacttggagatgaccgggctggacattgaaaaggacaaaatcctcgaggtggcctgcatcattacggaccaggacctgaacgtgaagtcggagggaccatgctttgccatcaaccatccgcaggaggtctacgactcgatgaacgagtggtgcatgaaacatcattacaattcaggtcttattgatcgatgcaagagctcggatgtgaatctcgaagaagcctccaatctagtgctatcctatctcgagaagaacataccaaagcgcgcctgtccgcttggtgggaactccgtctacaccgaccgactattcattatgaaattcatgccattggtagatgcttacctgcattaccgcatcgtcgatgtgtccaccatcaaggaactggccaagcgatggcatcccgcaattctggattccgctcccaaaaaatctttcacgcatcgtagtctggacgacatccgagaaagcatcaaagagcttgcgtattacaaagcgaacttatttaaataa

SEQ ID NO: 21609 - protein, 211 aa, DROSOPHILA
MLAHLRRVGLSLNRQIRSHIAFNSNDRMSSTCGLDTDIVWMDLEMTGLDIEKDKILEVACIITDQDLNVKSEGPCFAINHPQEVYDSMNEWCMKHHYNSGLIDRCKSSDVNLEEASNLVLSYLEKNIPKRACPLGGNSVYTDRLFIMKFMPLVDAYLHYRIVDVSTIKELAKRWHPAILDSAPKKSFTHRSLDDIRESIKELAYYKANLFK

SEQ ID NO: 21610 - DNA, 2838 bp, DROSOPHILA
tcctatccgatggccacaagcgcactattcgcgagatccgatggtctccatgcggtcagtacttggcctcggccagctttgatgccaccacggcgatctggtcgaaatcctcgggagaattcgaatgcaacgcaacattggagggtcacgaaaacgaggtgaagagcgttagctggtcgcgatccggcggactactggccacctgttcgcgggacaagtccgtgtggatctgggaggttgccggcgatgatgagttcgagtgcgccgccgttttgaacccgcacacacaggacgtgaagagagtggtgtggcatccaaccaaggacattttggcctccgcctcgtacgacaataccataaaaatgttcgcagaggagcccatagacaacgactgggattgcacagccactcttacttcacacacaagcacggtttggggcattgacttcgatgctgatggcgagcgcctggtttcctgtagcgatgacaccacaataaagatttggagggcctaccatcccggaaatacagccggagtggctacgcccgaccagcaaaccgtgtggaagtgcgtgtgcacagtgtccgggcagcactcgcgggctatctacgacgtgtcctggtgcaagcttacaggtctgatagcgactgcctgtggcgacgacggcattcgtatctttaaggagagcagcgactccaagccagacgaacccacgttcgagcagataaccgcggaggaaggcgctcacgatcaggacgtaaactcggtgcagtggaatcctgtggtggccgggcaactgatatcatgcagcgatgatggcaccattaaaatttggaaagtgaccgagtaacataaggattattgtttgatatatttaagtgggtaattctggaacttaatttttgtacagtgtctgcgtaataaaaaattaaagtattcaaatgatggatgaagtgtgtcatacacgattatgggatgcattacacctaatatggattgctatttgctgaggaacggttcctgcaacgttttgtacagcttcttggccttccggggacccagtcccatcacctgggagagtcgctcctcgctggcattgattatgttgcccaggttgccaaaggtgtgcagcaaggcggcagcatcagtcttgttcaccggcttgatgttggtgagagcagcgagtagctatggacattgggatattgcattacagtggcgatactggcaatgtaaacatgcgtaccttctggtgtggattagactccactcgctccatgatcaaatctggcggacgcttctcgaactgtttgtacgtctcaatgattttgcccgcctcctcagcgttccaggccaacatcattgtcaggtcggctaacagtgatatcctggtcaagctcttgagggcattgtttggctctggtgtgtccacctggaccagtagcacccgcagctcatacatcttgcccagagccttcaaacgctggcaaatgtagtcgggattgagattatggtactttagcgagaggtacagcacgcaggatgttcgaccgaccacataatcgggcacgatgtcgtcgcggaattccagcgggacattaagtatggatttcaggatggggttaccgcgctgtttgctgtgaacaaggacgcagtgcggatttgaagccggcttgccgggtgcgggtctgccggatccactaggttccgtactattgctaggagcaggattcactgctgtggccgctggggcatctactttcggttgctttgcagccgttggcatttccatggcgcccagaacatcgttaaaggaatcatcgtcgaagtcttccatttcggtatttaaataaaacaaactgaaaagctcaaggtgcgattagattatcaggtgacgaaggcacttaaaaactaaaattattacaccattttttgtaataaaagttccgggggtcataaggtagcttaattaaacgttaaaataattgaatgaagctatagattagttaaatttgtatagtcatacataagtattttagctgaatttaattgggttcatagcatttttaaattgttgccttgtattgcatttcgtcactaggtgcacttttatcgaaagcattcctgccctgacatttcgatatgtatttcagatgccgtgccacggtcacactaattgcggcaaatttttgacgcggaatttaacgaaaagaacgccaggaattaaaaaaaccgcttagcataaaaatgtatgttaagaaactagtgctcgacggcttcaaatcctatggccggcgcacggagatagaaggattcgatccagaatttacggctatcacgggtctaaacggctccggcaagtcaaacatcttggatagcatttgtttcgtactgggaattagtaatctccagaatgtgagtaccaattggatatgtctggggctggacttcaacgcttatctctgtgctaccaggtgcgcgcttcggctctacaggatttggtgtacaagaatgggcaggcgggcattaccaaggccactgttaccattgtgtttgacaacacaaatcccgcccagtgtccgcagggctacgaaaagtgccgggagatctctgtgacgcgccaggtggttgtcggaggcaagaacaagttcctcatcaatggcaagctggtgcagaacaagaaggtgcaagacttcttctgctccatccagctaaatgtaaacaatcccaacttcctgatcatgcagggcaagatccaacaagtgctaaatatgaagcccaaggaggtgggtagccagaaaaacacaaccataaatagttctccatctaacatagat

SEQ ID NO: 21611 - DNA, 780 bp, DROSOPHILA
atggaagacttcgacgatgattcctttaacgatgttctgggcgccatggaaatgccaacggctgcaaagcaaccgaaagtagatgccccagcggccacagcagtgaatcctgctcctagcaatagtacggaacctagtggatccggcagacccgcacccggcaagccggcttcaaatccgcactgcgtccttgttcacagcaaacagcgcggtaaccccatcctgaaatccatacttaatgtcccgctggaattccgcgacgacatcgtgcccgattatgtggtcggtcgaacatcctgcgtgctgtacctctcgctaaagtaccataatctcaatcccgactacatttgccagcgtttgaaggctctgggcaagatgtatgagctgcgggtgctactggtccaggtggacacaccagagccaaacaatgccctcaagagcttgaccaggatatcactgttagccgacctgacaatgatgttggcctggaacgctgaggaggcgggcaaaatcattgagacgtacaaacagttcgagaagcgtccgccagatttgatcatggagcgagtggagtctaatccacaccagaagctactcgctgctctcaccaacatcaagccggtgaacaagactgatgctgccgccttgctgcacacctttggcaacctgggcaacataatcaatgccagcgaggagcgactctcccaggtgatgggactgggtccccggaaggccaagaagctgtacaaaacgttgcaggaaccgttcctcagcaaatag

SEQ ID NO: 21612 - protein, 259 aa, DROSOPHILA
MEDFDDDSFNDVLGAMEMPTAAKQPKVDAPAATAVNPAPSNSTEPSGSGRPAPGKPASNPHCVLVHSKQRGNPILKSILNVPLEFRDDIVPDYVVGRTSCVLYLSLKYHNLNPDYICQRLKALGKMYELRVLLVQVDTPEPNNALKSLTRISLLADLTMMLAWNAEEAGKIIETYKQFEKRPPDLIMERVESNPHQKLLAALTNIKPVNKTDAAALLHTFGNLGNIINASEERLSQVMGLGPRKAKKLYKTLQEPFLSK

SEQ ID NO: 21613 - DNA, 4249 bp, DROSOPHILA
ttaccaatgggtgtggatgacgacagagatggccatgagggcgtccaatacctgggatggagctatgaaggcagctggaatgacggccagtaggccggcggacacaattcgctccacagtccagagcagggtgtggctggatccagcggaagccatgcggggcgcactcacggagatctcgcgcacgacgggctgcataagcagtcgaggattaccatttagtatgattagccaccactgaatttttcaactctaaacacttaccgctacaatcttggccacggccaggggctggaccaccgccttccgctggacattggccaccagggtggagtagctcttcaggggagtgatgcgagccgacttaacaagatttgcggctaattgggataccaacaaacggtttggttatataatgaaagctgttttgcgtccaataacaaggcgatttgccatccagtgggtccttaccattgcaacggacagcgccacgcagaagcaacgagagggacatgttgggatgtgtaaatattgagaattttcagctcaaaataaaaactctatcgctccgttcggtttgggccgatttgtctaaaaaattacacagcactgggctagtgcagtcagctgtcatcgatttgttatcggtaaacagtagcggtcaagatattgtcccacaataataagggaagcccagtaaaatattttgaactcaacaaacaattaaagggtgtaataaataataagaaaacatttagttcaaggcatttatttaactgctttaattatttgcacaatacatttgagattcgtttgggacggaatggctgttacacgtaaaaattgtgatgatcttacaaactaagtttaaaatttgcttaaaactttctaaaattcgcattctaaggcacgcaattgctcctaaaagtgactttatgttggttgtaaaatttttgtaaatttcgttggatggaatagttaaaaaatacttttgatattattaagctaataaactcctaacctggactaagaccacgataacgaggccagtcagttgaaattttagtgtcgctgctcctgctcggtaaaagtcccaatcaaatatgatgttggaggcatccgacggcttccaaggattcaatccgtcatcgaagtgcatgggacagtcgtcacgctccctttcgtactccacggcatcgatggctacggcagcgccctccgagtggttccacgaggtcacatcttgctccagtttgcagaatgcgcccacagcctgcgacatgaggacacggttgaggtcggcacgctgatagacccagcagcgatacttggacagcggatccaaatcgtcgtacgtaatcaggtaggacttgaggttctccttccagaagccaatgcacttcatgcggtaatcgggatcactgtagatatcaacgggacgacccaagtgatccaccgacaggcaatagttttcatccaccgccaattccttttgatctgtatcgcaaaccgataaatccgagatgttttgcttgcaatggatatcgggacgcggactcagagtgacaccaccaagaattctgtgaaatatacacattaattatacgtttcatgctacgattgcaaaacattacaaacctcgttctgaagggatgctctcctcgctgcgtaaagttgaattttcccgcaacggggcaacgaacaggcacaggatttcgagcaagaaacagatcatatttccatgcctccgaattggggaactgaacccaagagcagactgtactaaaatcgtccttgatcacagccaaacccttgcggtagcgaatgatgttgtggtggcggggcataaagtcaaagcacacgtaatccttctggcaaccgtcgacagtgaggcgagccatcatcacacgattaccccgtcgctctcggcaaacatagattgtctttcggtatcgagctttatccggatagtacgtctcgtttatgtgggtctcactgatcgagacatcggcatcaatgttggcagtgttcacccattctccgctaaagttttgtggtagcgtgcaaccgggttccacaaactcagccttcactggcgtcagctttagacgctccggtgacgtttctggcgtcttcagtgtgttacattcggccgtaatggaaacgcccacgtaaagatcatcgtcacgattcttaaggaagcagcggtacttctcatccttacgcgactcctttgtgttggccacggcaaagtagtggttcttgcccacaaaccaatcgcccaggcagctgaactccacggtgccggtgaatgtgccctccataccctcgcactgctgataggtgacgttgaacttctggttctggatgaggaactgcgttcctgccgtttgacaggactgaatgcgagcgtcgggcttatcgcatacgcccgtgaatcggaatcggttctataataaaagttcaaatcaagatcactaatcaacataaaatggatatgtttctagacccttaactaaaccgcaccatgtgcaaattatgtgatctatgaatctattttgatcttacctggtacgtaaaatgccacactccctccagcgacgatcggcagttgatgggcacaaagttctcgttaaagagcgttatcaactgctggtcatccttaacaccacgacacacatagtccacggtgggttcctgtccagcgggtatgcccacgcagggcccctcaaacttttcgaacacattaagggtgcggatgatggtcctgacacagtgatagcagtccttggatcgctccttgaagacaaatgagtactcgtcgcccttgtggcgcatgtagttgatgcagtagcctcggctggacatcgaggtggcgtcgatcaccgtcagcgtgggcaggcccgtttcccacgagaaccacgatccctgcaggatctttggaatgatgcagttgtccttctgcaccaggttgtactgaccgagggctgtaaaatggatgggctttagtttcgggtggccaattcacatgattcacttggagccttgggtgtggcttgggaatcgaatcactgacctgagcccattaagcccaccaggcagatagcagccaggtaataatgcattgcgtgtttggtgtcctcagaactaacaactaaacatatttattacaatttactttcaaatggaagcaaccaaaggcggttttagtcagaaacaatagcaaaacacgcaacaaacacaaattaccaatgatgggcaaaggcgaccttactaacactggctttaacgaagagctagctgcacagcactggctgatagctattaatccactctttatcaaattgagcgttactttttgaacttaaaaatagagattaatattatttacatatatgtatttttttacgacttttcctggataatctagactcaagtttatgctgtatgcagcataactacttcgttgtatgcaatagctaatacaaatatataatatcaactcttttaacaattcctaagaaaaatcgtttctattaaaacgctttttagacttactctataatcttaatgacacgtactcagacaacaaagagctgtaaaagattaacccaaccatacattttgtaatgaaatattattacttgaacctcaagtttaaatttttaattagcactagttgagctattacatacacattgccgtttaatacaattagatatgagatttattaataaagcttaatttataaaaaaaaatgtttccatatctatatatagatttgaataaacacgctttttgcagtctagggttaatggcaatggagtctggagccccagaaacgggcacatcgaacccgaggaagaacgcccccgcaattattcaacggactgcagtttgaaccttttcgtcacttgtgcggaattagcacagcaattttcgccattaccgctgctaatcgggtcatatatggtgcgattatgatcgctgtacagatattcctggaatgtgattcacatgcacggagttcctaagctgcagtccccatatagtacgttcgaactttggagtcccacactagtgcgaatggcgtgtttgctgataagtccggcggagcgtctaggtgaacggtgtttgtgcctccatccacgccttatctgctggcaaaggtcatcttggactccgagcatgatcggcgatcagacagcggcgatttggtgtgccaagtctatatggtagcagctcgatc

SEQ ID NO: 21614 - DNA, 1984 bp, DROSOPHILA
gtaatttgtgtttgttgcgtgttttgctattgtttctgactaaaaccgcctttggttgcttccatttgaaagtaaattgtaataaatatgtttagttgttagttctgaggacaccaaacacgcaatgcattattacctggctgctatctgcctggtgggcttaatgggctcagccctcggtcagtacaacctggtgcagaaggacaactgcatcattccaaagatcctgcagggatcgtggttctcgtgggaaacgggcctgcccacgctgacggtgatcgacgccacctcgatgtccagccgaggctactgcatcaactacatgcgccacaagggcgacgagtactcatttgtcttcaaggagcgatccaaggactgctatcactgtgtcaggaccatcatccgcacccttaatgtgttcgaaaagtttgaggggccctgcgtgggcatacccgctggacaggaacccaccgtggactatgtgtgtcgtggtgttaaggatgaccagcagttgataacgctctttaacgagaactttgtgcccatcaactgccgatcgtcgctggagggagtgtggcattttacgtaccagaaccgattccgattcacgggcgtatgcgataagcccgacgctcgcattcagtcctgtcaaacggcaggaacgcagttcctcatccagaaccagaagttcaacgtcacctatcagcagtgcgagggtatggagggcacattcaccggcaccgtggagttcagctgcctgggcgattggtttgtgggcaagaaccactactttgccgtggccaacacaaaggagtcgcgtaaggatgagaagtaccgctgcttccttaagaatcgtgacgatgatctttacgtgggcgtttccattacggccgaatgtaacacactgaagacgccagaaacgtcaccggagcgtctaaagctgacgccagtgaaggctgagtttgtggaacccggttgcacgctaccacaaaactttagcggagaatgggtgaacactgccaacattgatgccgatgtctcgatcagtgagacccacataaacgagacgtactatccggataaagctcgataccgaaagacaatctatgtttgccgagagcgacggggtaatcgtgtgatgatggctcgcctcactgtcgacggttgccagaaggattacgtgtgctttgactttatgccccgccaccacaacatcattcgctaccgcaagggtttggctgtgatcaaggacgattttagtacagtctgctcttgggttcagttccccaattcggaggcatggaaatatgatctgtttcttgctcgaaatcctgtgcctgttcgttgccccgttgcgggaaaattcaactttacgcagcgaggagagcatcccttcagaacgagaattcttggtggtgtcactctgagtccgcgtcccgatatccattgcaagcaaaacatctcggatttatcggtttgcgatacagatcaaaaggaattggcggtggatgaaaactattgcctgtcggtggatcacttgggtcgtcccgttgatatctacagtgatcccgattaccgcatgaagtgcattggcttctggaaggagaacctcaagtcctacctgattacgtacgacgatttggatccgctgtccaagtatcgctgctgggtctatcagcgtgccgacctcaaccgtgtcctcatgtcgcaggctgtgggcgcattctgcaaactggagcaagatgtgacctcgtggaaccactcggagggcgctgccgtagccatcgatgccgtggagtacgaaagggagcgtgacgactgtcccatgcacttcgatgacggattgaatccttggaagccgtcggatgcctccaacatcatatttgattgggacttttaccgagcaggagcagcgacactaaaatttcaactgactggcctcgttatcgtggtcttagtccaggttaggagtttattagcttaa

SEQ ID NO: 21615 - protein, 563 aa, DROSOPHILA
MSSRGYCINYMRHKGDEYSFVFKERSKDCYHCVRTIIRTLNVFEKFEGPCVGIPAGQEPTVDYVCRGVKDDQQLITLFNENFVPINCRSSLEGVWHFTYQNRFRFTGVCDKPDARIQSCQTAGTQFLIQNQKFNVTYQQCEGMEGTFTGTVEFSCLGDWFVGKNHYFAVANTKESRKDEKYRCFLKNRDDDLYVGVSITAECNTLKTPETSPERLKLTPVKAEFVEPGCTLPQNFSGEWVNTANIDADVSISETHINETYYPDKARYRKTIYVCRERRGNRVMMARLTVDGCQKDYVCFDFMPRHHNIIRYRKGLAVIKDDFSTVCSWVQFPNSEAWKYDLFLARNPVPVRCPVAGKFNFTQRGEHPFRTRILGGVTLSPRPDIHCKQNISDLSVCDTDQKELAVDENYCLSVDHLGRPVDIYSDPDYRMKCIGFWKENLKSYLITYDDLDPLSKYRCWVYQRADLNRVLMSQAVGAFCKLEQDVTSWNHSEGAAVAIDAVEYERERDDCPMHFDDGLNPWKPSDASNIIFDWDFYRAGAATLKFQLTGLVIVVLVQVRSLLA

SEQ ID NO: 21616 - DNA, 5218 bp, DROSOPHILA
catttccaccattccagtgctgtgcggcggcaatacgttcgtgcccaagattgcgaccagcacgccctcaaacgtaatcagctcgatctcggtaattggcagcacttacggcgcaagcagcagcagcaatggcagccgaagcactacttccaccgcatcctccgcaccagctgcttcgcttttggcggagacgggcagcctgaaatcgccaactccgccgctcgccacagttgatccggatccggagcccgtcgtggaacaaaagccggcgctgcggaatgccacgctgaagcggacgaaaaaggtgcagaacggcatcgaaacgtcgggcctgtgctcgatcatgtaaatcaaatcggccgtctgagtggagggacttggcgatattcctaatacgtttttactacgattacttttacacgttacttagttttagatagccaacggaacgttctccgccggagagcgacgcctcgccgcgatctgtaggtattcaaatccttttcgatgcggcgcgctcacattcgtatacataaattattaccgaaaagaagaataaaaaccacttgcagaataacataaatttgtgataaatttatagcactagcaagccaaacacattactttgaccaccaacaacaagcttaactaatatgtaatttttttatgcccattggaggaaacaataaacaaaatgaattcaaaagcacatacttaattgatttaattatgatttttagttgttagttgattaataatcgaaatataacaaataaagatatatattcaagctataaaccgtggtttttttatttgaagctgttttttcgattttcaatttacttggtttaattttaataatttaaatattctgccttgcgtataatttttgcgccaattttagggtggccgtgttgactcgcagtttcatagcattcagcctgttgatgtgcactcgccaaacagctgataccacaaaagtactaaatttggacacgcgccttatatgcacgtggagacgttccttcgtttaaattaagttttttatcaaaaatattgaattaaagccgcgcaactagttactttccacgatgtcgtcctctttcttcctcaagccaggcgccaagggcaccaagaagcgcaaggtaagtgaatcaagcagcgtagagagcggcacctgtaacgctttcaacagaatcccgcagcaacaacaaaaggaaaaccgcttaagaaaggcggaaaaccgggtaaatcaacgcccgcggctggtggaccagtgccaaagaagcagcgccgtcccaaggaggaggacgaggagatagctagcgacgatgaggagtacaacagcgatctgggcggcgatgacaacaccttggcattttcatccgacgagggcgaggaggaaacgccgcaggacaagcgcctgcgtctggccaaacagtatctgtcggagatcgagaagcaagaggcggaacgcgccgaggatcgggagctggcccaaagcgtggagcagcgcttgcaaacggaatacttggatagcgtgggcaaactgcgccggaacattgctggcagcctgaaagcctgcgaatcgagccgcatcctcaagcacaaactccaccacacgcctatctgtgcccttgcactcagtccggatggtaaattcctctacacgggagccaaatcgcaattcctacttaagtggtgcacggaaacggggaaggtgctggagaaatcggacgtgctgtcgcatcgcgaggaaccagaaacgggcaagaaaaggcgatcgcatgtcatcagcatatgcctgtcctcggacatgaagtatctggccttggccgaaggtggtccacacattcaaatttggtgtccccagacgatgaagcacattaagactcttaaaggccaccgggatagtgtggcaggtctggtctttcgcaaaggcacacatgacttgtactcggcagccaaggatcgatcggtgaaaatctggtccctggatgagatggcctatgtggagagtttgtgagtactatgctagttaatcccccttaatatcagacatttaacgagctcctcctttcagattcggtcaccaaacggcagtaactagcatagatgcactgagtcgagagcgcgccattaccgctggcggttcggattgctccttgcgcatttggaagatcacagaggaatcgcagctgatctacaatggacacaaagatagcattgagtgcgttaagtacatcaacgatgagcattttgtgtctggtggcatggatgggtaagttgggagtctggctaactaattcagtatggaagtaacaacaccattttacagagcaatcggtttatggagcgctttgaaaaagaagcccatttgtacaacgcaactggcgcacggagtgggcgagaatggcgtggccaactggataaccgccattgctgtggtggtcaacacggatttagtggcaacaggtgggaattgcgcatatttcttactgcgaactgtaattaaatattcatgattctaggttcttgtgacggttgcgtccgtctttggcagactaatcccaacgcgcgtaaaatgaacctaatccagagcatatccatcgccggcttcatcaacggactggctttcaatgccgatggcagcaagctgtttgtggccaccggacaggagcaccgcctgggtcgctggtggcgactcaaggaggcaaaaaaccaagtagttgtactcgacgttaagttacagagcgcggccagcagttaggttaacttctaagcttaagtaaagttgtatagtttttgtaacaagaaacggcctgaaaatatatacataaagatcatttgtatcttctacctgaaggttcttactttcaaacatataaaatttatttgttctttataaacaagatcaaacgaatgtttttgaatttattaaatttgcttcagattgaaatttaactccttatattaaagtaaggggtatctggtcgtctatttccattagctcaaatattttttctaaaaccgatattcggtttgttataaccgcaaatggttccttagtgttggctactttcaatagctagtcatggtcacactggccctgttacaaaacaataagtgctgaaatgttgccgaaattaaaaaccggtggagggttcttctcctattttaagactgaaaagggccgaaaactcgtattctacgcggcgggagccaccacagtgggcctctttcttggaaacttcctgccgcacacattcggcctgaaatattaccgcgatttcgtgcaatgctaccagtgggtgagaaaacttttggtgactggaagcgattctaacatcccacttcttttcatagacacggcgtggggcgtccagtgccggaggcagtgcagcagcgcctggaaaaggcattggatcagctgggcgtgacgccctttgagcgaaagtttgtgaagcccttcaccgtctttggattcgatgttttccaggcgggcaccactaagtttcgatttggaggcgctttgggcataccggtgaactatggatacgacagtctggaggagattaagcgggcagacattcggtttagagacaaacagatcaactggagttctcccagcggaaaactgctagaggaagccatcgttttgaatgaggatgaacagattttcggtcttagcaaggctgttctgcagatgcaaacccatcgggtactgctcaactccatctttcccagcgtcagctttcttatggtttacaccatgggtcactacctcaacctgcggctagatctcttcgcccgccatggaagcgtgagttttcaacctctctcacttttaaaattttttactgatttccgtttttcaactaccaggtgcggtttgtgctctacagcattctgggtctgtttggcttagggctctggtccttcatgaaagactacaatcaggtctctacggacgcagagattgaccagcgactggccacgatgggtccccaacttgtggcagctggagctagcttttacgacaaacatctaaagaagaacatcgcgctgagggagctgattggaaatgacgtttacactgcactgggcaacgaaaactatatgattcggcaaaagtccatgccgctaacagcacgaaaatctttcttcctggagaagctggaggaactcaaaaaggcgcaacagcctgaaacagagtaaacacacatttattgttacatttttattgccggttgaagaaaatatatatgtttccaataactttacaaatatccttgttgtgtagcctataacagtggatgatagttgtcctaaacctaacaaaatttcgagtggattatctcgcctaggagtctcgaaaattgactagaaatcatgttataaatctggaatgaccaatggccaatgcacttaaaacgcttcctcgcccacaacatcactgatggtggccaccaggcgacgtgcatgctccacggcgcatgtggcggttaccagtcccagatgaatgcaatacaactcgtagacgcgcactttggccggtgacagcttggggaagcacaactccgccagatcgtggtaatagtccattgtaagagcacctggttctgttggggatttcgaaccgttgccactggctgctcctgtggacagaaagtggtgctgcaaatccacgacggtactaagaacgccaccagacatgtcctcgaaccagaggaagtacgagtaatggaatgccttatccttccacatcactgtggtctggcccttcttaaggtaatttctcgcgatctccaccatgctccagagttttgtctttggcaccagctggttcggtcgcagatccggagcaagcatttgtcctcggctgcgattgacgtacataaagtgcaccagacccggaaaatcctccaaataagcatcaatggatatgttacgagtggccttaacggccagaaattcagcgaactccagtagcttggcttccacattcgctgccgtatcagagagttgatccagctcatggacacttgagctgtcgcagcaggccagtgtgaatatctgcttcagttcctctccgaacgagggcaaattcgactcaatcctcacgagcagctcccgctcaaagttcttgaagtactcagtgtacatcttgcgaagattctcccatttagcggcgaacttcttcgtgcagttctctagg

SEQ ID NO: 21617 - DNA, 2416 bp, DROSOPHILA
ccttatatgcacgtggagacgttccttcgtttaaattaagttttttatcaaaaatattgaattaaagccgcgcaactagttactttccacgatgtcgtcctctttcttcctcaagccaggcgccaagggcaccaagaagcgcaagaatcccgcagcaacaacaaaaggaaaaccgcttaagaaaggcggaaaaccgggtaaatcaacgcccgcggctggtggaccagtgccaaagaagcagcgccgtcccaaggaggaggacgaggagatagctagcgacgatgaggagtacaacagcgatctgggcggcgatgacaacaccttggcattttcatccgacgagggcgaggaggaaacgccgcaggacaagcgcctgcgtctggccaaacagtatctgtcggagatcgagaagcaagaggcggaacgcgccgaggatcgggagctggcccaaagcgtggagcagcgcttgcaaacggaatacttggatagcgtgggcaaactgcgccggaacattgctggcagcctgaaagcctgcgaatcgagccgcatcctcaagcacaaactccaccacacgcctatctgtgcccttgcactcagtccggatggtaaattcctctacacgggagccaaatcgcaattcctacttaagtggtgcacggaaacggggaaggtgctggagaaatcggacgtgctgtcgcatcgcgaggaaccagaaacgggcaagaaaaggcgatcgcatgtcatcagcatatgcctgtcctcggacatgaagtatctggccttggccgaaggtggtccacacattcaaatttggtgtccccagacgatgaagcacattaagactcttaaaggccaccgggatagtgtggcaggtctggtctttcgcaaaggcacacatgacttgtactcggcagccaaggatcgatcggtgaaaatctggtccctggatgagatggcctatgtggagagtttattcggtcaccaaacggcagtaactagcatagatgcactgagtcgagagcgcgccattaccgctggcggttcggattgctccttgcgcatttggaagatcacagaggaatcgcagctgatctacaatggacacaaagatagcattgagtgcgttaagtacatcaacgatgagcattttgtgtctggtggcatggatggagcaatcggtttatggagcgctttgaaaaagaagcccatttgtacaacgcaactggcgcacggagtgggcgagaatggcgtggccaactggataaccgccattgctgtggtggtcaacacggatttagtggcaacaggttcttgtgacggttgcgtccgtctttggcagactaatcccaacgcgcgtaaaatgaacctaatccagagcatatccatcgccggcttcatcaacggactggctttcaatgccgatggcagcaagctgtttgtggccaccggacaggagcaccgcctgggtcgctggtggcgactcaaggaggcaaaaaaccaaactgaaaagggccgaaaactcgtattctacgcggcgggagccaccacagtgggcctctttcttggaaacttcctgccgcacacattcggcctgaaatattaccgcgatttcgtgcaatgctaccaacacggcgtggggcgtccagtgccggaggcagtgcagcagcgcctggaaaaggcattggatcagctgggcgtgacgccctttgagcgaaagtttgtgaagcccttcaccgtctttggattcgatgttttccaggcgggcaccactaagtttcgatttggaggcgctttgggcataccggtgaactatggatacgacagtctggaggagattaagcgggcagacattcggtttagagacaaacagatcaactggagttctcccagcggaaaactgctagaggaagccatcgttttgaatgaggatgaacagattttcggtcttagcaaggctgttctgcagatgcaaacccatcgggtactgctcaactccatctttcccagcgtcagctttcttatggtttacaccatgggtcactacctcaacctgcggctagatctcttcgcccgccatggaagcgtgcggtttgtgctctacagcattctgggtctgtttggcttagggctctggtccttcatgaaagactacaatcaggtctctacggacgcagagattgaccagcgactggccacgatgggtccccaacttgtggcagctggagctagcttttacgacaaacatctaaagaagaacatcgcgctgagggagctgattggaaatgacgtttacactgcactgggcaacgaaaactatatgattcggcaaaagtccatgccgctaacagcacgaaaatctttcttcctggagaagctggaggaactcaaaaaggcgcaacagcctgaaacagagtaa

SEQ ID NO: 21618 - protein, 774 aa, DROSOPHILA
MSSSFFLKPGAKGTKKRKNPAATTKGKPLKKGGKPGKSTPAAGGPVPKKQRRPKEEDEEIASDDEEYNSDLGGDDNTLAFSSDEGEEETPQDKRLRLAKQYLSEIEKQEAERAEDRELAQSVEQRLQTEYLDSVGKLRRNIAGSLKACESSRILKHKLHHTPICALALSPDGKFLYTGAKSQFLLKWCTETGKVLEKSDVLSHREEPETGKKRRSHVISICLSSDMKYLALAEGGPHIQIWCPQTMKHIKTLKGHRDSVAGLVFRKGTHDLYSAAKDRSVKIWSLDEMAYVESLFGHQTAVTSIDALSRERAITAGGSDCSLRIWKITEESQLIYNGHKDSIECVKYINDEHFVSGGMDGAIGLWSALKKKPICTTQLAHGVGENGVANWITAIAVVVNTDLVATGSCDGCVRLWQTNPNARKMNLIQSISIAGFINGLAFNADGSKLFVATGQEHRLGRWWRLKEAKNQTEKGRKLVFYAAGATTVGLFLGNFLPHTFGLKYYRDFVQCYQHGVGRPVPEAVQQRLEKALDQLGVTPFERKFVKPFTVFGFDVFQAGTTKFRFGGALGIPVNYGYDSLEEIKRADIRFRDKQINWSSPSGKLLEEAIVLNEDEQIFGLSKAVLQMQTHRVLLNSIFPSVSFLMVYTMGHYLNLRLDLFARHGSVRFVLYSILGLFGLGLWSFMKDYNQVSTDAEIDQRLATMGPQLVAAGASFYDKHLKKNIALRELIGNDVYTALGNENYMIRQKSMPLTARKSFFLEKLEELKKAQQPETE

SEQ ID NO: 21619 - DNA, 2954 bp, DROSOPHILA
tcaaccgagtgagtcgcacagcgaatcactcttcgagctcagccgttagtgctggtgaaagttacagctgttgcgttcgctacgttcgctacctagtaaccgccacctgtgccccgattcctaatcctccagtcgacacctgttatttcaggctgccatgttcgcacgcgtttccttctaccccaccctgctgtacaatgtcctgatggaaaaggcatcggccaggaattggtacgatcgcatcgatgagcatgtgatactgggagcactgccctttcgcagccaggccaatgacgtaagtatccccacggaaccaagcctgaaatccttctaaatccttgtttaaccgctcagctcattgaaaaggagaacatgaaggcggtggtgtcgatgaacgaggactatgagctgaccgccttctccaacaacacggagaagtggcgaaagcttggcattgagttcctgcagctggccaccaccgacatctttgagtcgcccaatcaagaaaagctcttccgcggcgtggaattcataaacaagttcctgcctctaaagcaaagaattggtggcctaagttcctcctaccagccggagaacgtgggttctgtctatgtgcactgcaaggctggtaggacgcgaagtgccactttggtgggatgctacctcatgatggtgggttggttatctatttgcacgtagctcttaaaaaaaagctcacaacttatcctttgcagaagaacggatggactccggatcaggcggttgaccacatgcgtaagtgccgaccgcacattctgctgcacaccaaacaatgggatgccctccggttattctacacaaacaatgtggagacgaaatcatgaccaaacctggacaatagcccaaatttattgtttacagtagattaccatacgtaacaaaggtggtgcctgttacccaactactttagtgctgattttcttgttgaatatacaattttctacaaaacccgctctgtgcagctgtgactttttacaattctttatttaatgcttatcgcgaaactatgaataaataactggtgtttcgtggttcatcaactgattgctcctttgacatttaagccttctcggcatccttgcccttgatggcccagaagcgcttgataccattggccagacccacatcattttggatgaagtagaagaggccgcccagcgtggccaccgagatgatgatcagcgcaatgtgggctaccttgggcaggacgtttccaacgacagatggccgcatgtagtcaactaccatggcctccacgcccctgcgtttggtgaatgaggaaaatataagtaaaggtttaattttcctcaaggatatcttaccaatgggtgtggatgacgacagagatggccatgagggcgtccaatacctgggatggagctatgaaggcagctggaatgacggccagtaggccggcggacacaattcgctccacagtccagagcagggtgtggctggatccagcggaagccatgcggggcgcactcacggagatctcgcgcacgacgggctgcataagcagtcgaggattaccatttagtatgattagccaccactgaatttttcaactctaaacacttaccgctacaatcttggccacggccaggggctggaccaccgccttccgctggacattggccaccagggtggagtagctcttcaggggagtgatgcgagccgacttaacaagatttgcggctaattgggataccaacaaacggtttggttatataatgaaagctgttttgcgtccaataacaaggcgatttgccatccagtgggtccttaccattgcaacggacagcgccacgcagaagcaacgagagggacatgttgggatgtgtaaatattgagaattttcagctcaaaataaaaactctatcgctccgttcggtttgggccgatttgtctaaaaaattacacagcactgggctagtgcagtcagctgtcatcgatttgttatcggtaaacagtagcggtcaagatattgtcccacaataataagggaagcccagtaaaatattttgaactcaacaaacaattaaagggtgtaataaataataagaaaacatttagttcaaggcatttatttaactgctttaattatttgcacaatacatttgagattcgtttgggacggaatggctgttacacgtaaaaattgtgatgatcttacaaactaagtttaaaatttgcttaaaactttctaaaattcgcattctaaggcacgcaattgctcctaaaagtgactttatgttggttgtaaaatttttgtaaatttcgttggatggaatagttaaaaaatacttttgatattattaagctaataaactcctaacctggactaagaccacgataacgaggccagtcagttgaaattttagtgtcgctgctcctgctcggtaaaagtcccaatcaaatatgatgttggaggcatccgacggcttccaaggattcaatccgtcatcgaagtgcatgggacagtcgtcacgctccctttcgtactccacggcatcgatggctacggcagcgccctccgagtggttccacgaggtcacatcttgctccagtttgcagaatgcgcccacagcctgcgacatgaggacacggttgaggtcggcacgctgatagacccagcagcgatacttggacagcggatccaaatcgtcgtacgtaatcaggtaggacttgaggttctccttccagaagccaatgcacttcatgcggtaatcgggatcactgtagatatcaacgggacgacccaagtgatccaccgacaggcaatagttttcatccaccgccaattccttttgatctgtatcgcaaaccgataaatccgagatgttttgcttgcaatggatatcgggacgcggactcagagtgacaccaccaagaattctgtgaaatatacacat

SEQ ID NO: 21620 - DNA, 730 bp, DROSOPHILA
ttttagacaaatcggcccaaaccgaacggagcgatagagtttttattttgagctgaaaattctcaatatttacacatcccaacatgtccctctcgttgcttctgcgtggcgctgtccgttgcaatgccgcaaatcttgttaagtcggctcgcatcactcccctgaagagctactccaccctggtggccaatgtccagcggaaggcggtggtccagcccctggccgtggccaagattgtagcgcccgtcgtgcgcgagatctccgtgagtgcgccccgcatggcttccgctggatccagccacaccctgctctggactgtggagcgaattgtgtccgccggcctactggccgtcattccagctgccttcatagctccatcccaggtattggacgccctcatggccatctctgtcgtcatccacacccattggggcgtggaggccatggtagttgactacatgcggccatctgtcgttggaaacgtcctgcccaaggtagcccacattgcgctgatcatcatctcggtggccacgctgggcggcctcttctacttcatccaaaatgatgtgggtctggccaatggtatcaagcgcttctgggccatcaagggcaaggatgccgagaaggcttaaatgtcaaaggagcaatcagttgatgaaccacgaaacaccagttatttattcatagtttcgcgataagcattaaataaagaattgtaaaaagtcacagc

SEQ ID NO: 21621 - protein, 182 aa, DROSOPHILA
MSLSLLLRGAVRCNAANLVKSARITPLKSYSTLVANVQRKAVVQPLAVAKIVAPVVREISVSAPRMASAGSSHTLLWTVERIVSAGLLAVIPAAFIAPSQVLDALMAISVVIHTHWGVEAMVVDYMRPSVVGNVLPKVAHIALIIISVATLGGLFYFIQNDVGLANGIKRFWAIKGKDAEKA

SEQ ID NO: 21622 - DNA, 5333 bp, DROSOPHILA
gctggcccgtgcctgcgccgctcagacaaagtccaccttcctcaagctggcaggtccccagttggtgcaaatgttcatcggtgatggtgccaagctggtgcgcgatgccttcgccttggccaaggagaaggcgcctgccattatcttcattgacgagttggacgccattggcaccaagcgtttcgattcggagaaggccggtgaccgtgaggtccagcgaactatgttggagcttcttaatcagctcgatggcttcagttccactgcagatattaaggtgattgcggccaccaatcgcgtagacattctggatcctgctctgctgcgctctggtcgtctggatcgtaagatcgagttcccacatcccaacgaggaagcccgtgcccgtattatgcagattcactcgcgtaaaatgaacgttagcaatgatgtgaatttcgaggaattgtcccgatccacggatgacttcaacggcgcccagtgcaaagccgtctgtgtggaagctggtatgatcgcactgcgtcgctccgccaattcggttacgcacgaagacttcatggacgccatcatggaagtgcaggcgaagaagaaggctaatcttaactactacgcttagactaaaaatttgcagtttaacttcacattgtcagctcccattaaaataaaccatggaaatgtaaaatttttcagtttcgatctgagttgccccttgaagatcgcctttaaaataacatcgcaacggctcttaaaagtaactagaatgggagacgtactgaaatcaatacccaacctttttaaaataaacaaaaatatatatcaaatgtcgagcgattcattggtttatcagtacaacatttacattctgagtacgatattttttaaatatctaaaaaggtcggttttagaattaataaaaaatattacatcgggcgaaattagatgataaatatttacacgcacactaattaacctagagggatgatttaccaagttactaagactaaccagtgggatcgagtgtgttagcgccatccggcgccgcagatgtcgtgccacttcccccttgtgacgctgcatcgacaagggacgtggcagtggttgatgaggtttccgtagaggaggacgcggccacagcatcgtgagatgaaactgcggcggcaggtggtgtgacgcccacaccttcgaccactgcggctacaggtgctgcttccgctccaaccggcgccaagttaactggcgcagcagcaatgtcatctgcagctggctgctgtgccggctgatccggctgctgaaatggacgcctcatgtacatgatgatgcccagcagtagagttagaacggtaatcatgtacaagtcccaattggcagcaatattttcatccatgtagaagatgaacctgtaaggtgactaaaggggaacaacattaaaaagctagtaaacagtttatccatagggttgggtaatcacctccttgattgattcaatcgtggccaacatttgtagcttaaaaagcgcaatggccacaggcactttggcgtctgaattggtttccgcagccaaatcgtataatctctttgccagatgccagtctttcttcattccgagcccttgctcgtgcatgtatcccaagttgaacatggcttgggcattatattgctgctcagaggctttcctgtagggattgatgcggttataagtcgttttcacacttcatagttcatattcaactaacctgtaaagagcagcggcagtctcgaagtccgtcgaagtaccccaaccgtagtaatagtaatcgcccagcttgacttgggccgcagaatagccctgtccggctgctcgtttccagtagtagaaggcacgaatcagatcttcgtgccgatcgttgaacacatgcacctccttgcggtctagtaaaaaggcggcattactttgagccacctcatagcccatttcggccatcaacgagtactgcatgtaggcctcgtcgatgcggttatttttatagtcgctgtaggccatcatcaatcggctgctccaacggccacgctccgaaacagtcttgaagaactggaattagcaaatatgaaacgggttagaaaataattaacatattaattgaacaataaacttacttctactgctgctggacatgaacgcagcattcccataccgtaggcattcatcactcccagattataataggctaaaacatggcctgattgggtggccaggttgaagtacttaaaggctaacttgtagtcggtttttacaccattgccagctggaaaagaaatttaaattgtatggttcctagaaacccaatcaataaaatgaaggtttatttacttactgaaatacatgttgcccagctgcagttgcccatcaacccaaccttgatcagccgcctgagtgaaataggataatgccttgatggagtctttgggaacacctaaaccctttagatacatgaggcccagtccgctttgaccaactggatcccccatttcagcggccttggagaagtactaagaaaaatataataatacatattagaaatattaatcaaaaactgttatctacattatgcgcaccccaaatgctgcatcattatcggccctgatttgatcacttccttccagataaagcttgcctaaaaacgcgatgccaactgcactacctgcatcggcggccattttgaaatattccaaagccttttgatgatcttgctcggtgaccttgccgccctgatagtacacctgacccaatcccacctgcgactggatgtcgcctttatcggccagaagtttgtaatagtcgacaatctcagtttcggaactgccgggattctctaggtcatccagcagtcttacccgatgcacaaccggcccattggcgaaggttatcttggaagccacttttttggctactcgcttgtagtggatcagcgccttctcacagctaatgggcacattgatgccataaagatagcgataccccatggccatttgcgccggagtattatcaccgagggcagccaggctatagtggatcagtgccaggggctggcttacatttttaccgccaacgcccaccgaataaaggaatcccaggcccatgtgagcctctgggacgccttcgttggccagactctcaaactcatcgacagcatggttgaaatcaaagtccatccattgacccagtagggcggcccaggctagttccgccctcgccttgaggtgattaaatgcagcagccttcttaagcaaaatcatggctactcgcttatccgtgcttggcttggccaacatgtccattgcgttgtcgtacacggtttgagctggaaaaattgcaatcagcaactgcaaaacaaataaaacgatgcccacttaccttctatttggtctggggtaagttctaacacttcagtggatttgcgtttggcttcgatgcgctcgatctcggctttcagcttttgccgcctgatcagactttcgttccacaggcgttcgaacagggaagccggcataaccttcgtcctggaagcaaactttgtggactccttgggtttgtctgccttgcgttcgttgctttccgacggaacccgcgactctgattccgccgtggtcacctcctccgcctccgcctgggtggagggctcattgggcagcgttggcgtggctgttcccgtgcccaatcccgttcccgtacccgtacctgtggccgaacccaaactgctgcccgtaccatcaatgttgggcccttggagctcctccgctcgcagctgccaggcgagaagcagcgccagcaggcacatccagctgttggccttcatcgtcgcctatctgcctttctcgatggcaatgtggatgtacaacggcaattttggtcttcgcctttgctgcgtctatatggtgctcttccacttctgacgtgttgtgttatttactgttttcttggggcgcagggtcggcaaaaagagtggattgctgcttctgggtggattcgtttgacttactggtagctcattttggccacctcgacttggtggtggttggaataccttggttcggtttccttaatttttcacacgtaagattctttttaatcttttttgttgcaatgcttagtgctgcgaacgggccgaggtttgtgtgccagtgctgcaaagcaccgcgtctaaaacagtcttttccaggggcgtctccaaaaatattttcgcgaattaaaaaggagtaataaaatcgagacaggcttataaatatttagtcaggacgatatcaaaacttaattacaacttttttttattattacaagctacatttaataatattacaatttgcctaagcctgacggtaaaacataaaattttaaaaatatttgtacatttctttaaaacgtatatgcaccaaaatgtggaaattatgctcaacaattatttcccgggcaactgcgatagttaacgtctagaatgtcttaccccgaaaaattcccagggcttgctagctacgcccctggattttccggctgttgtttcgttatgcaaaggaacgcgcagagtttaaccagaaggaaatctgaattggaactgttgacgcgcaatcgaaagtgataattacgagcgggaataattagaatacgaggaagatttccgcccgtgtgaatcaccaacttttgtctcgtccaatccaagtcagccactgagcagccggcatggagatgagtgtaagtagaagctgcgacctgcgtgccagacacccagacccaaaagtcacagcccaaaaccaaattgaaaaccgaaaccagttccaacccgcgcttcaaccgagtgagtcgcacagcgaatcactcttcgagctcagccgttagtgctggtgaaagttacagctgttgcgttcgctacgttcgctacctagtaaccgccacctgtgccccgattcctaatcctccagtcgacacctgttatttcaggctgccatgttcgcacgcgtttccttctaccccaccctgctgtacaatgtcctgatggaaaaggcatcggccaggaattggtacgatcgcatcgatgagcatgtgatactgggagcactgccctttcgcagccaggccaatgacgtaagtatccccacggaaccaagcctgaaatccttctaaatccttgtttaaccgctcagctcattgaaaaggagaacatgaaggcggtggtgtcgatgaacgaggactatgagctgaccgccttctccaacaacacggagaagtggcgaaagcttggcattgagttcctgcagctggccaccaccgacatctttgagtcgcccaatcaagaaaagctctt

SEQ ID NO: 21623 - DNA, 2960 bp, DROSOPHILA
taatattattaaatgtagcttgtaataataaaaaaaagttgtaattaagttttgatatcgtcctgactaaatatttataagcctgtctcgattttattactcctttttaattcgcgaaaatatttttggagacgcccctggaaaagactgttttagacgcggtgctttgcagcactggcacacaaacctcggcccgttcgcagcactaagcattgcaacaaaaaagattaaaaagaatcttacgtgtgaaaaattaaggaaaccgaaccaaggtattccaaccaccaccaagtcgaggtggccaaaatgagctaccagtaagtcaaacgaatccacccagaagcagcaatccactctttttgccgaccctgcgccccaagaaaacagtaaataacacaacacgtcagaagtggaagagcaccatatagacgcagcaaaggcgaagaccaaaattgccgttgtacatccacattgccatcgagaaaggcagataggcgacgatgaaggccaacagctggatgtgcctgctggcgctgcttctcgcctggcagctgcgagcggaggagctccaagggcccaacattgatggtacgggcagcagtttgggttcggccacaggtacgggtacgggaacgggattgggcacgggaacagccacgccaacgctgcccaatgagccctccacccaggcggaggcggaggaggtgaccacggcggaatcagagtcgcgggttccgtcggaaagcaacgaacgcaaggcagacaaacccaaggagtccacaaagtttgcttccaggacgaaggttatgccggcttccctgttcgaacgcctgtggaacgaaagtctgatcaggcggcaaaagctgaaagccgagatcgagcgcatcgaagccaaacgcaaatccactgaagtgttagaacttaccccagaccaaatagaagctcaaaccgtgtacgacaacgcaatggacatgttggccaagccaagcacggataagcgagtagccatgattttgcttaagaaggctgctgcatttaatcacctcaaggcgagggcggaactagcctgggccgccctactgggtcaatggatggactttgatttcaaccatgctgtcgatgagtttgagagtctggccaacgaaggcgtcccagaggctcacatgggcctgggattcctttattcggtgggcgttggcggtaaaaatgtaagccagcccctggcactgatccactatagcctggctgccctcggtgataatactccggcgcaaatggccatggggtatcgctatctttatggcatcaatgtgcccattagctgtgagaaggcgctgatccactacaagcgagtagccaaaaaagtggcttccaagataaccttcgccaatgggccggttgtgcatcgggtaagactgctggatgacctagagaatcccggcagttccgaaactgagattgtcgactattacaaacttctggccgataaaggcgacatccagtcgcaggtgggattgggtcaggtgtactatcagggcggcaaggtcaccgagcaagatcatcaaaaggctttggaatatttcaaaatggccgccgatgcaggtagtgcagttggcatcgcgtttttaggcaagctttatctggaaggaagtgatcaaatcagggccgataatgatgcagcatttgggtacttctccaaggccgctgaaatgggggatccagttggtcaaagcggactgggcctcatgtatctaaagggtttaggtgttcccaaagactccatcaaggcattatcctatttcactcaggcggctgatcaaggttgggttgatgggcaactgcagctgggcaacatgtatttcactggcaatggtgtaaaaaccgactacaagttagcctttaagtacttcaacctggccacccaatcaggccatgttttagcctattataatctgggagtgatgaatgcctacggtatgggaatgctgcgttcatgtccagcagcagtagaattcttcaagactgtttcggagcgtggccgttggagcagccgattgatgatggcctacagcgactataaaaataaccgcatcgacgaggcctacatgcagtactcgttgatggccgaaatgggctatgaggtggctcaaagtaatgccgcctttttactagaccgcaaggaggtgcatgtgttcaacgatcggcacgaagatctgattcgtgccttctactactggaaacgagcagccggacagggctattctgcggcccaagtcaagctgggcgattactattactacggttggggtacttcgacggacttcgagactgccgctgctctttacaggaaagcctctgagcagcaatataatgcccaagccatgttcaacttgggatacatgcacgagcaagggctcggaatgaagaaagactggcatctggcaaagagattatacgatttggctgcggaaaccaattcagacgccaaagtgcctgtggccattgcgctttttaagctacaaatgttggccacgattgaatcaatcaaggagtcaccttacaggttcatcttctacatggatgaaaatattgctgccaattgggacttgtacatgattaccgttctaactctactgctgggcatcatcatgtacatgaggcgtccatttcagcagccggatcagccggcacagcagccagctgcagatgacattgctgctgcgccagttaacttggcgccggttggagcggaagcagcacctgtagccgcagtggtcgaaggtgtgggcgtcacaccacctgccgccgcagtttcatctcacgatgctgtggccgcgtcctcctctacggaaacctcatcaaccactgccacgtcccttgtcgatgcagcgtcacaagggggaagtggcacgacatctgcggcgccggatggcgctaacacactcgatcccactggttag

SEQ ID NO: 21624 - protein, 819 aa, DROSOPHILA
MKANSWMCLLALLLAWQLRAEELQGPNIDGTGSSLGSATGTGTGTGLGTGTATPTLPNEPSTQAEAEEVTTAESESRVPSESNERKADKPKESTKFASRTKVMPASLFERLWNESLIRRQKLKAEIERIEAKRKSTEVLELTPDQIEAQTVYDNAMDMLAKPSTDKRVAMILLKKAAAFNHLKARAELAWAALLGQWMDFDFNHAVDEFESLANEGVPEAHMGLGFLYSVGVGGKNVSQPLALIHYSLAALGDNTPAQMAMGYRYLYGINVPISCEKALIHYKRVAKKVASKITFANGPVVHRVRLLDDLENPGSSETEIVDYYKLLADKGDIQSQVGLGQVYYQGGKVTEQDHQKALEYFKMAADAGSAVGIAFLGKLYLEGSDQIRADNDAAFGYFSKAAEMGDPVGQSGLGLMYLKGLGVPKDSIKALSYFTQAADQGWVDGQLQLGNMYFTGNGVKTDYKLAFKYFNLATQSGHVLAYYNLGVMNAYGMGMLRSCPAAVEFFKTVSERGRWSSRLMMAYSDYKNNRIDEAYMQYSLMAEMGYEVAQSNAAFLLDRKEVHVFNDRHEDLIRAFYYWKRAAGQGYSAAQVKLGDYYYYGWGTSTDFETAAALYRKASEQQYNAQAMFNLGYMHEQGLGMKKDWHLAKRLYDLAAETNSDAKVPVAIALFKLQMLATIESIKESPYRFIFYMDENIAANWDLYMITVLTLLLGIIMYMRRPFQQPDQPAQQPAADDIAAAPVNLAPVGAEAAPVAAVVEGVGVTPPAAAVSSHDAVAASSSTETSSTTATSLVDAASQGGSGTTSAAPDGANTLDPTG

SEQ ID NO: 21625 - DNA, 3548 bp, DROSOPHILA
agacaacgccaagaagctggcacagatcgtctgcgccacggttatggccggcgaattgagcctgatggcggcgttggtcaatagcgatctagtcaagagtcatatgcggcacaatcggtaagttttacatctactacatgttattgatgacggtgaaattctaacttgtgatccttttcttgcagatcctccatcgcagtgaacagcgccaacaatcctctcaacgtgaccgtgtccagctgcagcaccatcagctaagattgggcgctgcaggggcgccgacttctacccttttgtacatagagtctctttgaacgtgcaggccaggcgttgcaactcatttctttaggtgttaccttgtagttgaatgtttcacaaattgcttgatagatatcctgattggcctggccagggtaccgtacagccagcgtcctccacatcggcaaatcgctccaagccaatgctgagggcataggatgggttgatattcgatatccactcctgctgctacttccacttagattgtacttttcgtcgtaacgctatttttttctaccaatacataactgaatactgagtgatgatccgctggaatccacaccagatgccagtcagtggagctatgaccaggactagtgcaagcgctgaacttgtaaaaattatttcctaagcgaaaagtagtacatagggtttgtatagtgattaaattaaaacttttaattagagcgtgtacgatcgatatcgatatcttaatttcggttttcatttttaacaaaaaattataaacacaaagcgtaatggataaatgtcttttgtcgacgctgctcacgggtttacaaatcagcacttcatttattttatttttaataataataattattaataaattattataattaatttataataattcacggcgcgctttattaattagtgtttgttgtgagtgttttatttctccatgtatgaatcgtataaaaagaacaagagcgagcggcggttaattctgatcggttgactccttggcctcggcctcagcatcctcgtcgccctcctcaacgggcggcacagggacatcggcgctgctatcgggctggacgatcaccttcttgggactcgggccgtagctgtctgcctctgctgaaatggcaccagacggtccgggagcagcatcctcatcctcgtcgtcgtgagtcgtcgactccggttgcaagctagccgctgcctcagaggcgacgccgtttttcgcttcctctacggaacactcctcgggatgtgagaccttgcgcttggcaatccgttcgctgagcgccttgtgtagctgggcaatgtccgccggtcggcccatggccaggaagatcttgacaacgccagagttgtcgatggccgttagtcgtagggacttttggctggctcgctccgccaccatggcggcccagactttggtgttgagaagcaggcgcagattgccagaagtgcggaacaccacgcgcgagtcgccccttaagtccttggcgtcgtttaagcgcagactgccgcgaccacgctcctcccagttgctgttaagaaaggcgaatagcttgcagctcacgtcgataatgttgatctcgtcctcctcgccggtgaaggtctcgacctcctcgtatttgcgtttctgagcgcggctctcctcatactcccgggccacatccgtcaggctcttggcctcggcggactccttgttgttgctgctgctgctgcaaatggatgaggaggcagcggcctcgctggtctctgtggtctgggcagcgttctgaatgacgcttgagaagagcaatggcgccgaggacgacgtagcagcggtggaggaggaggcagcctcctgggctgataccgagctggctgccgtatctgcatccggctcagcggtgacctgttcagcattgggggccaccacacgttcatgcacattctggccgaagacgaacccgctggactgaacatttggcatgttgttcttggctgctgcaaacatgctggagcgctcaatgccattgctacgcagcttggtcagcggatccggccgctcgtcgacatcgtcgtcctccttgtcgccagtggactcggctgccgcagatccggtggccaccacctcctcgtcatcgtcgtcgtccttggactcgcgcagaaacggattattcagcagggcgctgtcttcacctgcacttggggatgtggaactattgttggagccgctgctgtttgccaagactgctgggcgcaggacagcaccgcccaggcgagaagccttcaaggtgaagccacctcggaaacagttagtttcgactgacgcttctggaaacaagggggaaaaaacaagactcgtttgtcagtttgttgcgaactcttcaagggcacaagattcgcgatatttggcaactttaagttatagcaagcattacagcttgttttgctacgcttaccattattttcagacattgcaaactagtctacttgcaattttaaaatataaattgccaaatcttttacagaatagagcgttctgtgtaaagcctgccgtattgttatcgctgtgttatcgctgtcactatcgataagcgccggcgatggcgctctgttgtcaacactgactttttcagtgttgcttacttgccgctgaaaaacaagaaatttacaagtcatcgacagagtgtttgcccaaaaagatcggcaataatagcattttaacaaagaattacattcagcaacggctaatcaacaatcgtattagacatggctcagactctggaggataagtcaatctgggaggacggggaggagtccctgggcgaggaggtgatgcgtatgtccaccgatgaaattgtgagcaggactcgcctgatggacaacgagatcaagatcatgaagagcgaagtgatacgcataacgcacgagattcaggcgcaaaatgagaagatcaaggacaacaccgaaaagatcaaggtagggatgacaatgaaacgccaccctgccaaatagcctcatttgttaagtacttccccattaggtcaacaagacactgccctacctggtgtccaatgtaatagagctgctggatgtggatccacaggaggaggaggacgacggctccgtcaccgttctggacaaccagcgaaagggcaagtgcgccgtcatcaaaacatccactcgacaggcgtatttcctgcccgtcatcggcctggttgatgccgagaaactgaagccaggtgatctggtcggagtcaacaaagactcctatttgatcctggaaaccctgccggcagagtatgatgcccgcgtaaaagccatggaagtggacgagcgacctacagagcagtactccgacattggaggtttggacaagcagatacaggagctcatcgaggcagtggtgctgcccatgacgcacaaggagaagttcaaaaaccttggcattcacccacccaaaggtgggtatctcactcgaacaaatgtcacacaaccatattaatccttgccatttacaggtgtccttttgtacggcccccctg

SEQ ID NO: 21626 - DNA, 1420 bp, DROSOPHILA
acacagaacgctctattctgtaaaagatttggcaatttatattttaaaattgcaagtagactagtttgcaatgtctgaaaataatgaagcgtcagtcgaaactaactgtttccgaggtggcttcaccttgaaggcttctcgcctgggcggtgctgtcctgcgcccagcagtcttggcaaacagcagcggctccaacaatagttccacatccccaagtgcaggtgaagacagcgccctgctgaataatccgtttctgcgcgagtccaaggacgacgacgatgacgaggaggtggtggccaccggatctgcggcagccgagtccactggcgacaaggaggacgacgatgtcgacgagcggccggatccgctgaccaagctgcgtagcaatggcattgagcgctccagcatgtttgcagcagccaagaacaacatgccaaatgttcagtccagcgggttcgtcttcggccagaatgtgcatgaacgtgtggtggcccccaatgctgaacaggtcaccgctgagccggatgcagatacggcagccagctcggtatcagcccaggaggctgcctcctcctccaccgctgctacgtcgtcctcggcgccattgctcttctcaagcgtcattcagaacgctgcccagaccacagagaccagcgaggccgctgcctcctcatccatttgcagcagcagcagcaacaacaaggagtccgccgaggccaagagcctgacggatgtggcccgggagtatgaggagagccgcgctcagaaacgcaaatacgaggaggtcgagaccttcaccggcgaggaggacgagatcaacattatcgacgtgagctgcaagctattcgcctttcttaacagcaactgggaggagcgtggtcgcggcagtctgcgcttaaacgacgccaaggacttaaggggcgactcgcgcgtggtgttccgcacttctggcaatctgcgcctgcttctcaacaccaaagtctgggccgccatggtggcggagcgagccagccaaaagtccctacgactaacggccatcgacaactctggcgttgtcaagatcttcctggccatgggccgaccggcggacattgcccagctacacaaggcgctcagcgaacggattgccaagcgcaaggtctcacatcccgaggagtgttccgtagaggaagcgaaaaacggcgtcgcctctgaggcagcggctagcttgcaaccggagtcgacgactcacgacgacgaggatgaggatgctgctcccggaccgtctggtgccatttcagcagaggcagacagctacggcccgagtcccaagaaggtgatcgtccagcccgatagcagcgccgatgtccctgtgccgcccgttgaggagggcgacgaggatgctgaggccgaggccaaggagtcaaccgatcagaattaa

SEQ ID NO: 21627 - protein, 449 aa, DROSOPHILA
MSENNEASVETNCFRGGFTLKASRLGGAVLRPAVLANSSGSNNSSTSPSAGEDSALLNNPFLRESKDDDDDEEVVATGSAAAESTGDKEDDDVDERPDPLTKLRSNGIERSSMFAAAKNNMPNVQSSGFVFGQNVHERVVAPNAEQVTAEPDADTAASSVSAQEAASSSTAATSSSAPLLFSSVIQNAAQTTETSEAAASSSICSSSSNNKESAEAKSLTDVAREYEESRAQKRKYEEVETFTGEEDEINIIDVSCKLFAFLNSNWEERGRGSLRLNDAKDLRGDSRVVFRTSGNLRLLLNTKVWAAMVAERASQKSLRLTAIDNSGVVKIFLAMGRPADIAQLHKALSERIAKRKVSHPEECSVEEAKNGVASEAAASLQPESTTHDDEDEDAAPGPSGAISAEADSYGPSPKKVIVQPDSSADVPVPPVEEGDEDAEAEAKESTDQN

SEQ ID NO: 21628 - DNA, 3867 bp, DROSOPHILA
acaacaaactaagcgagcgattggctgaaggaacgctgcctgtggcagccacttgacatgcgacgtgcgttttatgggcgcaaacccaaggggcggggcgtggcggtgcggtattggccatatgggttatggatttgggtgatatggctggctcggctggaaaagcgctgggcgagcagcattcaagtggccaacgccgcatccaatttattggaccctcgccgaccaatggctatttatcgcgttcggtcagacaaagagctggcatatagctttcatcatcagaagtcagggaaaataacctgcatacgcgtgcgttttatatcacaaattgtattttaagtgccgcattcccaattatgtttgaactttgcactcactgcgagagtcgtagcatgatgaaaataaacgtattttgagattacataaacggggttttaagctatgaaagcattaaacaaaaatgttgattaaaaattaatataaataatttaatatgtttaaatatatcacactttttctttcataaagatatattgaaaaactgccttcctacctcattattattcattattattatttccttttgcatcactttcttttaaccaaataaataaaattaaaattataataaatcttaacataaataaacttataagcgtatgtatctatcagttttaaatatttttttttcattaggcttaattaagaataaaagcaacctagagaattaccatgggtaattcccaaattaccaaatgggaattaccaaaaggggtatatctatgttcgatttaatcgaaatttcactgtgcaattcctgaataggggaatacatacattttaccttctgttagcatgattacaattatttctactaactgtatacatttttattggaagcccaaacatgaaaggaacatcatcaatgaagacacatctcccgtagcaatgtcctaatcgctctaccatttgttgcttccattttgcagatggtcgaatgggcctgtccatcttgcccctggctgctctcctcgccggcacactattcaccgtgggcatagcggtgctatccgtggtggtcatcgccgttcgcaggcgccgtggccaaggagcccgcaacatgtgcgatgacaaggacaaacacctgggtgggtaattgcagcacacgcacggacatgtggagggcacccaaataccctggcaggggatcaaatagtttcctttgatggcccgtcatcaagtgttgaggtttttcagtttctattaggtgatccgctcccattatacaaatcctatacagcttctaaatgtatcctgactttatgaagaagtatcctcaatctaaaactttaatcaaatcgtatctaccagaactgcgttacttaactaattacaatacatttcgaattaatgatgaattaataatgatgaacttgatgtcaaaaatcaagttctagatagttagttagttagctatcttggcagtgaaaaagatcagttttaaggatggttccaagtaacatgctgcaagggtatttagaaccacacagtgctgagccaaccctatatgctgttgctctttttgctaatgctccactctcccgacaggcatggatgtgacggtgactgcgcccttggaaacgggagctggccaccagcgactcgtggtggcctacaccctgaagcagggcatcgagaagcagccggacatattgagcgcccagaagagtgctccaactggcggtgacgcctcgtcgccgctgggaaatcggccgagtggtttgttcgctggcggaggaggaggcggaggaggtggtggtgggggcggccggccttgcatctgccgctcccatgacgggcaacactggtggccacaaaaccacggattatgtaagtgccagtgggcaggaggaggcgttgccctttaactatgccatttatgtatgtagtcgacaacacaggcgtttattgtaaacgggcaggactttatagacatcctttacattgcattttcagtatgttccccccaataatatgaaaatgatactcaaaaaaaaatgttaaattaattatcgaaagtacattcattgatgggaacattacacaaaaaacgcaatgcagaggaaatgtagtatttatcttttattaaatcgtttttttaactgggtttctgtttagcgactagccatctaatcccattttcattgcaggatggcaatgcgccgcacctgaacagcccgccctcacagtccagcaccttgaagctggagagtgaccccgcggcgggtggtggtggcctggtcggtgcccggagtggcgggagcaacccaccgcttctctacgacgccatgcccacgctgagtcgctacgagcagctgggcctgagcatggccagctattcagccggagcgggcacgggcggcagcagcagcaccctcagctccgccggcagcacggtgagcaatgcgatggccgccaacggaagtgcgggcccgggtggctatgccgcccacctgcaccacacactgccccacaacatggctcctcagcggggccacgatccgctcaacctggccgactacctgaccaccagcagccttatagactacggcctcaacaagccgcccgctgcccacatgacgctgcccaagggcatgggtctgggcctggggatgggattgggagtgggcgttggagcaggaatgggcgtcggtcctggaccgggaatgggcatgggcatggcatcgacgatggccggcacgagcctgtcgccgtcgcagctaaacaccatcacgcacaagtcggcggcaggacgaaaccacatcatcacggacacactgcccgggccggagagctgcgtctaagcaccatcctgtcgtcctggcatggaaaccaaaagactggcgcacagcagtagcccaaaaacacagccgaatcagagtgacaccgaacaactactagtcatgtgaagctgcggtcaagtttgcggtgaaggggttgaatgcgttagttaatccaggtcaagccacccttataagtttactgattctacagaccaagtttgagagtatggagtataaagtatacatggttttatagaaaaatttaaatctatttcgaagaagatacgtgttgtttttagtaaacattcggtaaattttaaatgtttatgtttgtaaaacaacatatcctaaatttacgaactacactgtaaactaaataattttaggattccagaaatcacattttgttagttgtatagcgttttgtaagctctattatctgattaatataagattattctaaactagaaatgaaatggagattatcattgtcaaaacgaaactttcttagaataaatctgttgtaaaattaaaagtgctgtaagaaagccaattttaagttggttttgagtttggtcttaagcgaatttgaaaagagggtactaccaacttgaccgcagctgtacatttaaaaaccttgttcgacagcgtcgcttagaagtaattactagatgtagaggagtagctaaagtacgaatatgtatatgtaatacgtgtgtctgtgtctccgttcgtttgtaaatgtttaagctaagtgtaaccgtagatgtacttgtatactatatcctccgactggtgtaggtcgtagcccctcccagccccgcgcctcgtggttcagtctttaatttaaggggcgacccccaaggtgaaactaatcttccacgacctgtacccattgcgaggccgagtggctgggagcagggctctccaactcgaaactcgttgttgaatctgtttgtcccggctaaagtgagaagaacacatcccccggaaaacatagcccctcctgccgcagacgcac

SEQ ID NO: 21629 - DNA, 1119 bp, DROSOPHILA
atgggcctgtccatcttgcccctggctgctctcctcgccggcacactattcaccgtgggcatagcggtgctatccgtggtggtcatcgccgttcgcaggcgccgtggccaaggagcccgcaacatgtgcgatgacaaggacaaacacctgggcatggatgtgacggtgactgcgcccttggaaacgggagctggccaccagcgactcgtggtggcctacaccctgaagcagggcatcgagaagcagccggacatattgagcgcccagaagagtgctccaactggcggtgacgcctcgtcgccgctgggaaatcggccgagtggtttgttcgctggcggaggaggaggcggaggaggtggtggtgggggcggccggccttgcatctgccgctcccatgacgggcaacactggtggccacaaaaccacggattatcgactagccatctaatcccattttcattgcaggatggcaatgcgccgcacctgaacagcccgccctcacagtccagcaccttgaagctggagagtgaccccgcggcgggtggtggtggcctggtcggtgcccggagtggcgggagcaacccaccgcttctctacgacgccatgcccacgctgagtcgctacgagcagctgggcctgagcatggccagctattcagccggagcgggcacgggcggcagcagcagcaccctcagctccgccggcagcacggtgagcaatgcgatggccgccaacggaagtgcgggcccgggtggctatgccgcccacctgcaccacacactgccccacaacatggctcctcagcggggccacgatccgctcaacctggccgactacctgaccaccagcagccttatagactacggcctcaacaagccgcccgctgcccacatgacgctgcccaagggcatgggtctgggcctggggatgggattgggagtgggcgttggagcaggaatgggcgtcggtcctggaccgggaatgggcatgggcatggcatcgacgatggccggcacgagcctgtcgccgtcgcagctaaacaccatcacgcacaagtcggcggcaggacgaaaccacatcatcacggacacactgcccgggccggagagctgcgtctaa

SEQ ID NO: 21630 - protein, 372 aa, DROSOPHILA
MGLSILPLAALLAGTLFTVGIAVLSVVVIAVRRRRGQGARNMCDDKDKHLGMDVTVTAPLETGAGHQRLVVAYTLKQGIEKQPDILSAQKSAPTGGDASSPLGNRPSGLFAGGGGGGGGGGGGGRPCICRSHDGQHWWPQNHGLSTSHLIPFSLQDGNAPHLNSPPSQSSTLKLESDPAAGGGGLVGARSGGSNPPLLYDAMPTLSRYEQLGLSMASYSAGAGTGGSSSTLSSAGSTVSNAMAANGSAGPGGYAAHLHHTLPHNMAPQRGHDPLNLADYLTTSSLIDYGLNKPPAAHMTLPKGMGLGLGMGLGVGVGAGMGVGPGPGMGMGMASTMAGTSLSPSQLNTITHKSAAGRNHIITDTLPGPESCV

SEQ ID NO: 21631 - DNA, 11667 bp, DROSOPHILA
caagaccacaggtctcaacatcataaaaaatccggcaaagggtgctccattgcccttgaacttctcatagattggcgttacaatgtcgatgaaatgtttgtttttccgaaatccctccatattccccacgggaaaccgggccggctcactgccaatgccccgccgggtccagtagctatatctcgtccgcacgaaccagaagcccactgccagggcaataagcagtagagccactacatccagcatcctctccccgaatagattcactatgaactgaacactggaccaacgcctctattcgctccgcttacaatcagctgcagtagtgtaaacagacctaggcagataacctcgtctcatagaatttaggcgcactgaaaacaaatcgaactgaagctcggacttgacgagcttttaacggtgattcaagttaatgcaattgatatagtgagagataactgtagaacacccgccttgaagaaaaagtctatgcaatatatgcatttattctctgcttactatatgagcgtaattaaaagtatgataagaattttgcatttcttatctgttttttttctttctttttttatctgatctaatatcagacttattatatagtcttcttgaacttctcgactatcagatacccgttacttggctagaagaaatgaagttaaagaaacaatactaattttcggatcgcccactaccgccacctggtggtatattaattcaattggcaacgcctataaaattaaatagtgcatattgcattaaaactaaataaataaaacacttctaacattaatttcttttttaattagttatactgcaattttaaaggcactttaaaatttaacatttctagtggttggcaacgcggtttaatgcaaaaaataccttaatggtatatttttagtatatttccttaaataaaaattgtataaaatgtataatttccatttcacgtcgacggccacacttttaagtgtaagtcatcaaaaatacatcgcagttgttacgtgagagttttcaaaagctaatttttatatagtagcagtgcttttgtgaaattttttcctcgcaaaagtgtctggcagtgattgtacaaatgtattagcttaaaaaggtatgtttttaaatgttctgcagcgcgaaaaagtaaattgaagtcgaactgataactcgcgtgtgtatgtagtggtaacacaaacgtggctttgtctgggaaaatctccgttaaatcaatttaagcaacgagatagtttcactaaaacgtaaatatttcgtgaaagcgtgaaatgcgatgtacagaaaggaaaaacaagcactttattggttaatttattcgggcaggccacacatgcgaaaatatgctcatggccgccatattgaattttcgtcgtcattccgtacgtgtgtgtgtgtatatatgtaagagattaccttgtgtttgtggacgcgcgtgattgtttacgtctggtacgaattacatacatagatacgctgtatacaggattatctatccacatagtgcagcctaagatttcagtgcatcacggtttattacaaataaaatgggcagagatgaagatatcgctaacaaacatcgcaaccttaatacattattcatccaaaatatcccgacaaaatcccattaatagtgcaaactttttcacacaaattacctttgcttttcatgtcatttaattactttgttatattttcccttgcagtcgaaacatagcaactgcgactacttcaaaccaaataacttgatcaatatccggatcaagatctggaatacagagtccacaatggagcagctatttcagaattaccgcgacgatgagcgaaggatcggcgaggagtatctgtcaagtctccaggacctcaactgcaacagcaagccattgatcaatatgctcacgatgcttgccgaggagaacatcaactacgcccacatcatagttaaagtggtggaatattacatcagccaggttaacaaaacaaaagcgtatttacttaaaaacaaagacactccagcttacacacagctaatagacggtcgacactaaaagtgattctccatatcgaaattgtgatagaatgtgcagtttattgattgcggttgccctttgattgcagagaaacccaacgaaggccacacatatgcgtttctaagactcggttctttcagttgggtttttctgcaaactcttgggcacaaatggtagataggttcctaataatcttagtatatatctcataatttgggttataaaccgtgactgattttaatcatctacaaaggtaagaagtttaaccaacctgctcctcgtttcttatttctttctactttggatcccagagtttaaagctaaggaataacaaacaacctttaaaaaaatattgaaaaataaataaaaagagaaaatgcttaaacaattgtcaccaagttgtcttttattttatacaaaaactttgactgcttacaatcaatataaaaaaaattgatgtgcagcaatttttgtattacaaaaagaaaagtgcaagttttcgtaaaagtaaaaaaaactgcagccaaacaaaaacaaatgtccataatacgtaagagtagtaaaagcctttgtttctgccacattgtcactgcgattttcattcatattcactcggctaagggaacagaccgctaacatcatacgccaacactgtaacccttaatgtttggagatccttagacaccgcgtttcctcattcaacacccaatgcttaggaaaatatttctctgtaggctaggatattgtttgagttcgaccgccttggcatgaaggcacccaccaccagcagatgaggatgatgacttcggtggacgatcgctgaccctgctcttgtgttgtccatcggcctgtctcattagttttcttccaacctatccgtttgaatctccgctagcgacgttccgtagacacttattcttctttatttcttacctattttactaaacttctaacaggtggcgcccgaatttaaattgcccatactatatttaattgattcgatagtaaagaatgtgaaaagcagctacgtccaattgtttggacagtgcatagtcaacatattcctccacgccttcgaatcggtaagcgaaatcattttcttaatgtcaatccaatggttcattaatgttatttcaatcctgcaggtccagcactcacagtcgcaggttttggaaaaggtgcgggaacgcatgtatgccctgcgtcagacctggaacgaggtgttcccgccatccaagatgtacgcgctggacgttaaggtgaagcgcctagataacaactggcccattactgccaaacagccaactaacaaaattcacgtcaatccggccattcatgttaatccggatttcttaaaaccggtaagtgccccaaataactattaatccctttagttagaccaatgtatccattcaattgtaaaaagggtttggttcctgggatgcctggtaaccccacaatcaccagcgacatggaggagattttgcaagcaaaaactcgtgagttgctggagctcaagaagcgcaaactggaactggagctggagcaaaccaaaaagcatttagaggagcaggagcgtcagctgacccaaaccacggacgcgatggttggagcaccgattattatgcctgctcccactccagcagcaatttgtccgccaatcacggatcccggtatagcagtgcataatcaacgagctccaggagtaatgggcaatgttggtcccgtaatgcataacatgccagtggctccgcaggtaaattgtgaaatatgatggtggaagctataaaaaatctaattcaactatggaattacagctttttgcgaataaaccaaaagtccatcctgtcaatccggcactgttgaactcggtgcgccaacgagatccgagactagcccgccagatgcatgcggcatcctcacatccagctgcgccggcacgaaacgatcctcggctggaggccaaatctagctcctcacagaagtctagtcggtcgcgcagcaaatcgcctgtgcgcaacagcagcagtcggtctggaaagagtggaagctctagccacagcagttcgtcgagccgcaagcgaagtgagtcaaagagctccacgacttcctcatcttcgtcgagctctgatgttcggcacaagggtgtcactgcaagcagctccaaccagccaacagttaagcggtccggtaagatcacgtctaaggattcggatcgctatgttcgcaatggatctcctttgggatccgcgaaacgcaagagcagctcaccaagtagctcgccctccaaatccaagcgcagcacgtcgcacaagtcatcctcgtcgcgaggaaagacctcttctctgcgttcccgcagtcgatctccagtttttatggacgtcgacctacgcaccggagttcgaagcaagtcaccagagagcagggcagttgccccatcatccttaccactggcgggcgcatcactaccagcatcagctaaagcaccaaaagatttagagaaacgtaagaaacaacttttaattctaatctcacacttgttagcgaacaaccaagtctggtttgacttggaacctagagctacagacagcttagttgaaaatttagaatatatcaaccagaatggcggcactcgatggcttaggttggtggaagggcgggttattgggaccgtatgtggttgacaagtggaaatcttctgctcaactctaaccgaagtctgtgataagtacaattgtgataccaaagtggcgttcccaacaatggaatgtgttaaactatagattttgcttgaattctgataaatatcatattaaattactactgaacaacaatttgagatggttataaaagcgaccattgccagtattacttactgatcaacattattgacaaagatgtctataaaaagattccactaactgctgaaatttggttcttcgttcgttgttttttggcccagtttattggaagcaggaaatttgtttcgttttaaagcaactaaccgccaacaattaattaaatatttatgatatattttttcttataaatacttaagcgtcgtttagaaaaatctaacaagttttatcgaatcaaaagcaaagtgtaaataaaatgtgttgaaaaccttttgcattccaagttgttttaattgatgcaaaatgtagccaggtgccgcctttggtatgattttgaaaatgattttcgatttgtgaatgtcaaaacaataagtacaactaaattgaaagcgaaccaaaaataaaccaaaatgatttaactgtgaagtattttttgtaccttaaacttcctattgataaacaattattagatgaagagaaactcaataaaataaagactgcagttttaatttcctgttaacaaacgtgtaaacccgaagtgaacaaacatttttaaactaaaatccaagtctatggaacatctagaaccagattaagtttacttttattttaagcatattttgtagttggctttaatgtatatacaagccagctagtgttgaatttgtatatgtatttatattgttttgtatttgtagaacggcacttttatcccttttaattaattttaattactatttatatttttatagtctaacctagattttgcattggttccccaacggagcccgtggattccctaagttattatttatgcattagttgctatcagtttctctagcctgattgttgtgcctggtgtttgttggccctgttgtgtccccccctttataattttgttatgattttccaaccactttcccgattttctttgcttagaattctctgcctaatttaattcacattttgttatcctcttgcttttatctgataaactaccttcctctgccgtaagaaaagaaaatgttagtccacaagcaaaatcaattttctagctacatttcaaatactcgaaccaggccatcctccagctcctccaagtccgccgattatagatgtatcgagtatggacattgacttgaggcggccaaagacgccgcctcctccgacattcgactcagtggatagcctcgaccagaaggatacaactagcggtcacatcagcagcacaataatacaagctagtggcgcctccaacgcctccccatcaggcgcgtccacttccaaattgcccgcaaaagtgtcgttcaaaatacaaaaacagttcaataaattagaaaaatctacagcgaatctatcaacagtatcaatgctcaactcaaatcccacgacttcaggaacaccagcggcatctctagtcaggcaatcgtcgcccagtccttcgtcctcgtctatttcctcgcagggtaatgtatcggacgccctgcagctgtcgattaacaagttgctccaggtgcaaggcggtgccggcgagaaacgtcccgccgacgcactgccgccacatatcgacggtgaagagcaaccgccgcagcaaaagcgcagcaagtcagccaaactggacgcgtaagtaattctttaaagtatttcaggcatatatttgctaacaccgtttggttttcatagtctctttggcagtgaggatgtcgacctgcgacgcgagattctagttgtcaagccaggagttattgttgtcgaagacgactctatggacgaatgcgatgtagacaaggtaggattggcatgagtcgtcttgattgttgtattgtaaggctaaattcttttactttgatccctagcccacaaagaaatctgggtcgccgcccaagaaggcaacgttggaggagctgcgcgccaagttggctaactcggctcgaatccagaataagcagggaaagtctggtaagtaatcacagtatagtttcagtgtatatcctaaaaagcagtccacatttgaatgcatgtgaaagtttgctaaaaattttacttacttaatcttaatctctaccctttagacaaatccagggatcaggccgtgtcacaacgccttaagcagctggcggagcttaaagtcaacgacgattcgcaggaggcgcacgacgagaaggtgcgcaccattctcagccaggcgcaggagatgtatgagaataacggcatgaatcaggaacagtacaaggatctggtccaaaaagtagtggccatcaatgagaatagcaaaataaaagagtcccggcgccgagacaacgatctcgagcgcaatgcggccagggatgcagtgctacgcaaacgtattcccaagctgaagggcaacgaaaatcattctgcgggctcaccgcataccgatggatcgcccaggtacgatgatcagccggcagctgccccggagaagccctcaaacaaacgggataagaccaagagggagatgaagcgtcgcaagcccaccaaatggggcgaacaagtggatgcaggggcagcacaacgcactgcctggcaactggccaatgtcaacaataataataataataacaacaacaagcggggcggtatccaattgcccgttcagcctcaggctggattccgtggcatgccctggcagcagccaccagccatggtgttgggccagtccgcagttccgccgccaccgcaaccgccgtcgatgattagtatgcctcccgtgccaccggtgaccatgaccaaggccataaattcccttgacaatccaatggctgatgtagtgcgaagcatcacgatcgacggtggctccaaggagatacgcttctacaaccaggtggccatcattttcatggatggcgatcagccgcatgaaattggcttccagccgggtcagcgggtgatcttcattgatcacaatgaaccgctaccgctttgcttcaacgacgattacaagcctttccacttggatggacagcttcaccggattcggtttggctttccatcgcgcgaactttatatcgacgagcactggtacgagatctactttggcggtccagccgtatccgtgcccattggcaacaaactgcatataatcaaagctgagggtccaccgcccaacgtggacattggtcgagtgcgaagggatctggttgtgggcaaaatcaatatgattgcggatgcgcatactatagtgccactctttctggacgccagacagcagaccttccagctcggcgccgagcagcattcactgcagttcgtggacagtttccaatatgctctgctcgacggccagctgcagaagatggagtatggtggtctcccaaaaggaatgatgctgaacggcggtcgcagctgcttcattaggtttggaacgctgcccaaaggagtcattgctggaaaaacccatgtggccgatatggtgtacattaagactgatgctcctgcagagcctcccaagccgccgccaattattgtgaaaccaccgccagtggtggagcaaccgaagcccgctccagttgctgttgctcccatttcccttccagcagcagccgccgcacttgagagcttaaacatcaatgatttgtttcaaaagcttgtctcgtctggaataattggtggtgcaactgcagcaccaactctccctgccgcagactcatcagcggccaaagagccaaccgcttctgccaccgaaccctcaactgcatctgcaaccgttgcgcctgctacactgcctgctggtccccccgcggagccgatcaagcgcatcgatctccgcaagccagagtccatcaagacacgccaggcggctgtggtggccgttctttacctgggaatgcagtgcagcagctgtggagttcgtttcccgccagagcaaacaattaagtacagccaacatttggactggcacttccgacagaatcgtagagagcgggattccactaggaaagccacttcgcgaaaatggtattacgatctcaacgactggcggcaatacgaagaaatcgaagatgtggaggagcgagagaagaacttcctcgaggctcagggacagccaggtggcgttgaggcccttgatgaactctcacaacaacgctcgctggattcgcccgtgccaacatgtgctgctggaagggatgatgtggatcactgctgtgacatgtgtcacgagaaattcgagcagttctacaacgaagagctcgaggagtggcatctgcgtagcgctattcgtgtggaagataagatctatcatcctctatgctacgaggactacaaggcctcgttgaatcctccaacggaggtaaagtccgaccaggatgtggacatgaacaacaccgatgacaatgccatggacacactaatcaaagtggaggatgatgaagatgaaggtgggtttagatttaatgaatgcaaataagacggtatgttgtattaaacccattttcaataggtacgccaaactcatcacaacccatttttgaagacgacgatgacgatgtcattgtgctgcccaatgaagagccaagtgtcacggaaatcgtcgacgacgacgatgaggacgaatacgttccgggcaatgtgacacgtgcggacatgggcaacgagtcacaggacaaaacagagtccaactccgagaccaaagaaccgaagaaagatcaggttgagctcggtgaacagcagcaaaacgaatcggccaatgaatcggatgtcgaaatccaagagccgaacattcctttcacggatctggacacttatgtggagaaagagatggatgaggcgaccagggcggcgctactgaacgtaaagatcaaggaggagcccaaggatgagtatgaggaggacgaggatgatggattcgaagacgtgggcacggtggtttcacttttacctctgcccgaggacgagatctccatacacagcagcggtaagtttctaaacctttaactgtcctgtcctcagtatcacattagttgctcaatcatctggcatcctggcagaaactcaaacacacaccatcggctcgtcagcctcgccggccaccatcgagcggccagcatcggtgacctcgctctccctgcccgccaatgaggcggacgagttggagcagggtgatgcaaacaccgatacggatgcggaattgaatggcgagaagcaggaggccacgcataacctgagcgcagtgggtccggcgttacctttggctagcatagttaataaaataaagataaatatcactaagaatacgagtagtaatagtcataatagtgcctccaacaccacgacaacggactcgcaagtctcggccataagcgtcatcggtggatcaggagcagctggcggtgcatccggagcaggagaccctgtccagcaggtgaatgccattcaaaccatttccaccattccagtgctgtgcggcggcaatacgttcgtgcccaagattgcgaccagcacgccctcaaacgtaatcagctcgatctcggtaattggcagcacttacggcgcaagcagcagcagcaatggcagccgaagcactacttccaccgcatcctccgcaccagctgcttcgcttttggcggagacgggcagcctgaaatcgccaactccgccgctcgccacagttgatccggatccggagcccgtcgtggaacaaaagccggcgctgcggaatgccacgctgaagcggacgaaaaaggtgcagaacggcatcgaaacgtcgggcctgtgctcgatcatgtaaatcaaatcggccgtctgagtggagggacttggcgatattcctaatacgtttttactacgattacttttacacgttacttagttttagatagccaacggaacgttctccgccggagagcgacgcctcgccgcgatctgtaggtattcaaatccttttcgatgcggcgcgctcacattcgtatacataaattattaccgaaaagaagaataaaaaccacttgcagaataacataaatttgtgataaatttatagcactagcaagccaaacacattactttgaccaccaacaacaagcttaactaatatgtaatttttttatgcccattggaggaaacaataaacaaaatgaattcaaaagcacatacttaattgatttaattatgatttttagttgttagttgattaataatcgaaatataacaaataaagatatatattcaagctataaaccgtggtttttttatttgaagctgttttttcgattttcaatttacttggtttaattttaataatttaaatattctgccttgcgtataatttttgcgccaattttagggtggccgtgttgactcgcagtttcatagcattcagcctgttgatgtgcactcgccaaacagctgataccacaaaagtactaaatttggacacgcgccttatatgcacgtggagacgttccttcgtttaaattaagttttttatcaaaaatattgaattaaagccgcgcaactagttactttccacgatgtcgtcctctttcttcctcaagccaggcgccaagggcaccaagaagcgcaaggtaagtgaatcaagcagcgtagagagcggcacctgtaacgctttcaacagaatcccgcagcaacaacaaaaggaaaaccgcttaagaaaggcggaaaaccgggtaaatcaacgcccgcggctggtggaccagtgccaaagaagcagcgccgtcccaaggaggaggacgaggagatagctagcgacgatgaggagtacaacagcg

SEQ ID NO: 21632 - DNA, 5967 bp, DROSOPHILA
aaaaatacatcgcagttgttacgtgagagttttcaaaagctaatttttatatagtagcagtgcttttgtgaaattttttcctcgcaaaagtgtctggcagtgattgtacaaatgtattagcttaaaaagatggagcagctatttcagaattaccgcgacgatgagcgaaggatcggcgaggagtatctgtcaagtctccaggacctcaactgcaacagcaagccattgatcaatatgctcacgatgcttgccgaggagaacatcaactacgcccacatcatagttaaagtggtggaatattacatcagccaggtggcgcccgaatttaaattgcccatactatatttaattgattcgatagtaaagaatgtgaaaagcagctacgtccaattgtttggacagtgcatagtcaacatattcctccacgccttcgaatcggtccagcactcacagtcgcaggttttggaaaaggtgcgggaacgcatgtatgccctgcgtcagacctggaacgaggtgttcccgccatccaagatgtacgcgctggacgttaaggtgaagcgcctagataacaactggcccattactgccaaacagccaactaacaaaattcacgtcaatccggccattcatgttaatccggatttcttaaaaccgggtttggttcctgggatgcctggtaaccccacaatcaccagcgacatggaggagattttgcaagcaaaaactcgtgagttgctggagctcaagaagcgcaaactggaactggagctggagcaaaccaaaaagcatttagaggagcaggagcgtcagctgacccaaaccacggacgcgatggttggagcaccgattattatgcctgctcccactccagcagcaatttgtccgccaatcacggatcccggtatagcagtgcataatcaacgagctccaggagtaatgggcaatgttggtcccgtaatgcataacatgccagtggctccgcagctttttgcgaataaaccaaaagtccatcctgtcaatccggcactgttgaactcggtgcgccaacgagatccgagactagcccgccagatgcatgcggcatcctcacatccagctgcgccggcacgaaacgatcctcggctggaggccaaatctagctcctcacagaagtctagtcggtcgcgcagcaaatcgcctgtgcgcaacagcagcagtcggtctggaaagagtggaagctctagccacagcagttcgtcgagccgcaagcgaagtgagtcaaagagctccacgacttcctcatcttcgtcgagctctgatgttcggcacaagggtgtcactgcaagcagctccaaccagccaacagttaagcggtccggtaagatcacgtctaaggattcggatcgctatgttcgcaatggatctcctttgggatccgcgaaacgcaagagcagctcaccaagtagctcgccctccaaatccaagcgcagcacgtcgcacaagtcatcctcgtcgcgaggaaagacctcttctctgcgttcccgcagtcgatctccagtttttatggacgtcgacctacgcaccggagttcgaagcaagtcaccagagagcagggcagttgccccatcatccttaccactggcgggcgcatcactaccagcatcagctaaagcaccaaaagatttagagaaacgccatcctccagctcctccaagtccgccgattatagatgtatcgagtatggacattgacttgaggcggccaaagacgccgcctcctccgacattcgactcagtggatagcctcgaccagaaggatacaactagcggtcacatcagcagcacaataatacaagctagtggcgcctccaacgcctccccatcaggcgcgtccacttccaaattgcccgcaaaagtgtcgttcaaaatacaaaaacagttcaataaattagaaaaatctacagcgaatctatcaacagtatcaatgctcaactcaaatcccacgacttcaggaacaccagcggcatctctagtcaggcaatcgtcgcccagtccttcgtcctcgtctatttcctcgcagggtaatgtatcggacgccctgcagctgtcgattaacaagttgctccaggtgcaaggcggtgccggcgagaaacgtcccgccgacgcactgccgccacatatcgacggtgaagagcaaccgccgcagcaaaagcgcagcaagtcagccaaactggacgctctctttggcagtgaggatgtcgacctgcgacgcgagattctagttgtcaagccaggagttattgttgtcgaagacgactctatggacgaatgcgatgtagacaagcccacaaagaaatctgggtcgccgcccaagaaggcaacgttggaggagctgcgcgccaagttggctaactcggctcgaatccagaataagcagggaaagtctgacaaatccagggatcaggccgtgtcacaacgccttaagcagctggcggagcttaaagtcaacgacgattcgcaggaggcgcacgacgagaaggtgcgcaccattctcagccaggcgcaggagatgtatgagaataacggcatgaatcaggaacagtacaaggatctggtccaaaaagtagtggccatcaatgagaatagcaaaataaaagagtcccggcgccgagacaacgatctcgagcgcaatgcggccagggatgcagtgctacgcaaacgtattcccaagctgaagggcaacgaaaatcattctgcgggctcaccgcataccgatggatcgcccaggtacgatgatcagccggcagctgccccggagaagccctcaaacaaacgggataagaccaagagggagatgaagcgtcgcaagcccaccaaatggggcgaacaagtggatgcaggggcagcacaacgcactgcctggcaactggccaatgtcaacaataataataataataacaacaacaagcggggcggtatccaattgcccgttcagcctcaggctggattccgtggcatgccctggcagcagccaccagccatggtgttgggccagtccgcagttccgccgccaccgcaaccgccgtcgatgattagtatgcctcccgtgccaccggtgaccatgaccaaggccataaattcccttgacaatccaatggctgatgtagtgcgaagcatcacgatcgacggtggctccaaggagatacgcttctacaaccaggtggccatcattttcatggatggcgatcagccgcatgaaattggcttccagccgggtcagcgggtgatcttcattgatcacaatgaaccgctaccgctttgcttcaacgacgattacaagcctttccacttggatggacagcttcaccggattcggtttggctttccatcgcgcgaactttatatcgacgagcactggtacgagatctactttggcggtccagccgtatccgtgcccattggcaacaaactgcatataatcaaagctgagggtccaccgcccaacgtggacattggtcgagtgcgaagggatctggttgtgggcaaaatcaatatgattgcggatgcgcatactatagtgccactctttctggacgccagacagcagaccttccagctcggcgccgagcagcattcactgcagttcgtggacagtttccaatatgctctgctcgacggccagctgcagaagatggagtatggtggtctcccaaaaggaatgatgctgaacggcggtcgcagctgcttcattaggtttggaacgctgcccaaaggagtcattgctggaaaaacccatgtggccgatatggtgtacattaagactgatgctcctgcagagcctcccaagccgccgccaattattgtgaaaccaccgccagtggtggagcaaccgaagcccgctccagttgctgttgctcccatttcccttccagcagcagccgccgcacttgagagcttaaacatcaatgatttgtttcaaaagcttgtctcgtctggaataattggtggtgcaactgcagcaccaactctccctgccgcagactcatcagcggccaaagagccaaccgcttctgccaccgaaccctcaactgcatctgcaaccgttgcgcctgctacactgcctgctggtccccccgcggagccgatcaagcgcatcgatctccgcaagccagagtccatcaagacacgccaggcggctgtggtggccgttctttacctgggaatgcagtgcagcagctgtggagttcgtttcccgccagagcaaacaattaagtacagccaacatttggactggcacttccgacagaatcgtagagagcgggattccactaggaaagccacttcgcgaaaatggtattacgatctcaacgactggcggcaatacgaagaaatcgaagatgtggaggagcgagagaagaacttcctcgaggctcagggacagccaggtggcgttgaggcccttgatgaactctcacaacaacgctcgctggattcgcccgtgccaacatgtgctgctggaagggatgatgtggatcactgctgtgacatgtgtcacgagaaattcgagcagttctacaacgaagagctcgaggagtggcatctgcgtagcgctattcgtgtggaagataagatctatcatcctctatgctacgaggactacaaggcctcgttgaatcctccaacggaggtaaagtccgaccaggatgtggacatgaacaacaccgatgacaatgccatggacacactaatcaaagtggaggatgatgaagatgaaggtacgccaaactcatcacaacccatttttgaagacgacgatgacgatgtcattgtgctgcccaatgaagagccaagtgtcacggaaatcgtcgacgacgacgatgaggacgaatacgttccgggcaatgtgacacgtgcggacatgggcaacgagtcacaggacaaaacagagtccaactccgagaccaaagaaccgaagaaagatcaggttgagctcggtgaacagcagcaaaacgaatcggccaatgaatcggatgtcgaaatccaagagccgaacattcctttcacggatctggacacttatgtggagaaagagatggatgaggcgaccagggcggcgctactgaacgtaaagatcaaggaggagcccaaggatgagtatgaggaggacgaggatgatggattcgaagacgtgggcacggtggtttcacttttacctctgcccgaggacgagatctccatacacagcagcgaaactcaaacacacaccatcggctcgtcagcctcgccggccaccatcgagcggccagcatcggtgacctcgctctccctgcccgccaatgaggcggacgagttggagcagggtgatgcaaacaccgatacggatgcggaattgaatggcgagaagcaggaggccacgcataacctgagcgcagtgggtccggcgttacctttggctagcatagttaataaaataaagataaatatcactaagaatacgagtagtaatagtcataatagtgcctccaacaccacgacaacggactcgcaagtctcggccataagcgtcatcggtggatcaggagcagctggcggtgcatccggagcaggagaccctgtccagcaggtgaatgccattcaaaccatttccaccattccagtgctgtgcggcggcaatacgttcgtgcccaagattgcgaccagcacgccctcaaacgtaatcagctcgatctcggtaattggcagcacttacggcgcaagcagcagcagcaatggcagccgaagcactacttccaccgcatcctccgcaccagctgcttcgcttttggcggagacgggcagcctgaaatcgccaactccgccgctcgccacagttgatccggatccggagcccgtcgtggaacaaaagccggcgctgcggaatgccacgctgaagcggacgaaaaaggtgcagaacggcatcgaaacgtcgggcctgtgctcgatcatgtaa

SEQ ID NO: 21633 - protein, 1945 aa, DROSOPHILA
MEQLFQNYRDDERRIGEEYLSSLQDLNCNSKPLINMLTMLAEENINYAHIIVKVVEYYISQVAPEFKLPILYLIDSIVKNVKSSYVQLFGQCIVNIFLHAFESVQHSQSQVLEKVRERMYALRQTWNEVFPPSKMYALDVKVKRLDNNWPITAKQPTNKIHVNPAIHVNPDFLKPGLVPGMPGNPTITSDMEEILQAKTRELLELKKRKLELELEQTKKHLEEQERQLTQTTDAMVGAPIIMPAPTPAAICPPITDPGIAVHNQRAPGVMGNVGPVMHNMPVAPQLFANKPKVHPVNPALLNSVRQRDPRLARQMHAASSHPAAPARNDPRLEAKSSSSQKSSRSRSKSPVRNSSSRSGKSGSSSHSSSSSRKRSESKSSTTSSSSSSSDVRHKGVTASSSNQPTVKRSGKITSKDSDRYVRNGSPLGSAKRKSSSPSSSPSKSKRSTSHKSSSSRGKTSSLRSRSRSPVFMDVDLRTGVRSKSPESRAVAPSSLPLAGASLPASAKAPKDLEKRHPPAPPSPPIIDVSSMDIDLRRPKTPPPPTFDSVDSLDQKDTTSGHISSTIIQASGASNASPSGASTSKLPAKVSFKIQKQFNKLEKSTANLSTVSMLNSNPTTSGTPAASLVRQSSPSPSSSSISSQGNVSDALQLSINKLLQVQGGAGEKRPADALPPHIDGEEQPPQQKRSKSAKLDALFGSEDVDLRREILVVKPGVIVVEDDSMDECDVDKPTKKSGSPPKKATLEELRAKLANSARIQNKQGKSDKSRDQAVSQRLKQLAELKVNDDSQEAHDEKVRTILSQAQEMYENNGMNQEQYKDLVQKVVAINENSKIKESRRRDNDLERNAARDAVLRKRIPKLKGNENHSAGSPHTDGSPRYDDQPAAAPEKPSNKRDKTKREMKRRKPTKWGEQVDAGAAQRTAWQLANVNNNNNNNNNKRGGIQLPVQPQAGFRGMPWQQPPAMVLGQSAVPPPPQPPSMISMPPVPPVTMTKAINSLDNPMADVVRSITIDGGSKEIRFYNQVAIIFMDGDQPHEIGFQPGQRVIFIDHNEPLPLCFNDDYKPFHLDGQLHRIRFGFPSRELYIDEHWYEIYFGGPAVSVPIGNKLHIIKAEGPPPNVDIGRVRRDLVVGKINMIADAHTIVPLFLDARQQTFQLGAEQHSLQFVDSFQYALLDGQLQKMEYGGLPKGMMLNGGRSCFIRFGTLPKGVIAGKTHVADMVYIKTDAPAEPPKPPPIIVKPPPVVEQPKPAPVAVAPISLPAAAAALESLNINDLFQKLVSSGIIGGATAAPTLPAADSSAAKEPTASATEPSTASATVAPATLPAGPPAEPIKRIDLRKPESIKTRQAAVVAVLYLGMQCSSCGVRFPPEQTIKYSQHLDWHFRQNRRERDSTRKATSRKWYYDLNDWRQYEEIEDVEEREKNFLEAQGQPGGVEALDELSQQRSLDSPVPTCAAGRDDVDHCCDMCHEKFEQFYNEELEEWHLRSAIRVEDKIYHPLCYEDYKASLNPPTEVKSDQDVDMNNTDDNAMDTLIKVEDDEDEGTPNSSQPIFEDDDDDVIVLPNEEPSVTEIVDDDDEDEYVPGNVTRADMGNESQDKTESNSETKEPKKDQVELGEQQQNESANESDVEIQEPNIPFTDLDTYVEKEMDEATRAALLNVKIKEEPKDEYEEDEDDGFEDVGTVVSLLPLPEDEISIHSSETQTHTIGSSASPATIERPASVTSLSLPANEADELEQGDANTDTDAELNGEKQEATHNLSAVGPALPLASIVNKIKINITKNTSSNSHNSASNTTTTDSQVSAISVIGGSGAAGGASGAGDPVQQVNAIQTISTIPVLCGGNTFVPKIATSTPSNVISSISVIGSTYGASSSSNGSRSTTSTASSAPAASLLAETGSLKSPTPPLATVDPDPEPVVEQKPALRNATLKRTKKVQNGIETSGLCSIM

SEQ ID NO: 21634 - DNA, 2794 bp, DROSOPHILA
catcatttacgcataaaaaaaactattacaaatagttggaatgttgaaataaatttacatcaattacaaaccaaggaataataattaattaggtttttattagcttaattcgctgccatccttaatcttttgaatgaatgcacttaattcttgcgccgaatacgatttctttcggctcttcttcggcggcgcggcttccatagatgacggttcacgtttggtctgagaatagattgaatttttttagaactgcaattacaggaaatgttttaagaacctacgaagtgtctgtactcgggcgaaatggactccagttgcagcagtctattttccactcgtttgattctactgaaaatgttttcctcgttgtcggtggttagacccatgtacgattcaattgcctgtagtcgtgaattgggtagcgatttcctcatttctttggttggatccgtttgaccgtcacgcgatcccattagtttattcagttcgagttcgtagttgggtcgcatttccatttgctgaggtccgcatcggttgtttactcgtcggactgtgataggttgtttgtagaccaaagtggctatagttatgaaaatagagcatcgtttacccaccttttaaatggcaatttgactgctcctgcttaataattgtgctctgcgttcgagcgcaggaatcgctcaagttttggtctgagctgacaaaagacgatttgaagtcaattacattttgtgagtttatttcgtctcgttttctgttgacaaaacattctaaacgcttggttaactcagcgtcattaactctaatttgcaccagagttcgcgggacgtcatgtgactcctcaactttgcagggacaagcggcgtagttgaagccacttttcgatttctctacaatgtacatgcacagatgagagagaagccaataaaatcgtaaacgctcgattgttaattatatttacaagtgtacaaataataagaatacatgtcatgctggctactcataagatcttactaggcctgatggactccttgttctccttccattcgctgtcgttatcgccgtcgtagatttcctttttccagatgggaacccgagtttttagctggtctattgcaaaagatactgattctaaggcctcagaacgatgtggtgacgaggcggctataactacactggcttcgcatacgggcactgttcccaatcgatgatatatgactatgtgcttcagatcgagccacttagatcggagatctgagcatattttattcatttccttgagtgccatgctatcgtaggcctcgtacgccaatgacagcacctgaaaggtcgaaaagtacaaatgaatcaatgaaatcaattgattgagataatgaagccacctttttcccttgaaaattatcgcgcgtagtgcccacgaaaacggatgaggctccacagccttcatcggccagcaactgatggatatgagcgatatctatggggtcgtttaccaatttcacgtgatccatggcggaaaggttagcctccactcagtggcggtatgatggcgagttcgtctccttccttaaacagaattctatcactcaggttgtcaatgtacgactcgttgtgggccaaaatcaagttatcccggatggaggtcaggccaaatttggacaccaggtggtccagcagttcggtggcagtaatttcagtaggaacttccactgtcgaccggggagtgtttgctaattcacgggatttagcaaagaacaacacgtgcacgttgacaacaggtccatccgcattcatatttacaaatgaagattggcgatgacacagcagttccattttccgactacctatgtatcgatttcttatcggaacgaagtggaatagtccacggaaagggaaacagctgactgaaactttattaaatgcttaataactttttagataaatcaaagaagcttcttactcattgcataaacaatacaaatatttaatacatagtaattatacagcgaattcattctgacaatccgaatcatcaacagcatacaatcgatatattttgtttaaagttcgtccatcgcaatttacaccgatacttaatttcgcaagtgaataaaattgttattattccctattaaactaatttaacttatctaacgtagatagcgaacttgtgaatatttaatgataagttaagttgccagatagattcttttttcttcactttccgtgttgacatcgtcaactttccataaagaaccatgaagacacgtttcaataccttcgatataatctgcggagtggcggaactgcaaaagtatgtaaaaaatccggataattccgatgcccaggaataatggtacatctacatttatattccaggctggtcggctggcgagtgaatcagatctatgacgtggataacaagacctacctcttccggatgcaagggaccggtgcagtggagaaggtcactctgctaatagaatctggtacaagattccataccactaggttcgaatggcccaagaacatggctccgtccggtttcagcatgaagttgaggaagcacttgaagaacaagcgcctggaaaaggttcaacagatgggtagcgatcgtattgttgactttcagttcggtaccggtgatgccgcctaccatgttattttggagctctacgatcgtggtaatgtgatcctcaccgactacgagctgaccacgttatatattttgcgtccgcatacggagggcgagaacctgcgcttcgccatgcgcgagaaatatcccgtggaacgg

SEQ ID NO: 21635 - DNA, 733 bp, DROSOPHILA
atgaatgcggatggacctgttgtcaacgtgcacgtgttgttctttgctaaatcccgtgaattagcaaacactccccggtcgacagtggaagttcctactgaaattactgccaccgaactgctggaccacctggtgtccaaatttggcctgacctccatccgggataacttgattttggcccacaacgagtcgtacattgacaacctgagtgatagaattctgtttaaggaaggagacgaactcgccatcataccgccactgagtggaggctaacctttccgccatggatcacgtgaaattggtaaacgaccccatagatatcgctcatatccatcagttgctggccgatgaaggctgtggagcctcatccgttttcgtgggcactacgcgcgataattttcaagggaaaaaggtgctgtcattggcgtacgaggcctacgatagcatggcactcaaggaaatgaataaaatatgctcagatctccgatctaagtggctcgatctgaagcacatagtcatatatcatcgattgggaacagtgcccgtatgcgaagccagtgtagttatagccgcctcgtcaccacatcgttctgaggccttagaatcagtatcttttgcaatagaccagctaaaaactcgggttcccatctggaaaaaggaaatctacgacggcgataacgacagcgaatggaaggagaacaaggagtccatcaggcctagtaagatcttatga

SEQ ID NO: 21636 - protein, 90 aa, DROSOPHILA
MNADGPVVNVHVLFFAKSRELANTPRSTVEVPTEITATELLDHLVSKFGLTSIRDNLILAHNESYIDNLSDRILFKEGDELAIIPPLSGG

SEQ ID NO: 21637 - DNA, 4371 bp, DROSOPHILA
gaacgcgatatgaatagcacaccccaatccgaaagatacgggttcaaaacccgcgcggggcgaactcattaaatatttttagatctatgtgaaccacatgtttttgtgtattttattaaatatacatttcccatttttgattgcagggaatcacttggggctgcgcctacagaataacaggcagcacggcactggattatctcaagcagcgggagtgcacactgggtaagtaaatcgaattgaagagaagtggggaccatcatttgagctaacccacgatgactccaacaggtggctatgcaacaatcgataccaagttcttcccgcgcgtcgcctcgcaggacacgcccttcagcggcgaggcggtcgaggtactggtctatgtggcgacgccagagaatatctattggttgggcgatgacccggtcgaggagattgcccagcagatcgtatcctgccgcggtcccagcggacacaatgccgagtacctgttgcgcctggccctgttcatgcacgaggagattcccggcgtgagggacgatcatctgttcgagctggagcaattggttttagaggaactgtaccgccgccaaatacctctgtcatctgtgatgggccgcaatccagataggatacgccgcgactcgcacgaggacatccgccgcccgccatccttcgagttcacctcccgtgtgcccgacaccaagctgcgttgcctgaacatttgatttctggtgtgctggcggccaagtgctatgcaggtcgcgttttttgctacagcaaattccaaattattgatcgacattttagcttgttaggtaaccagagtctattgccaaatttgacgtatttctttaaattgtaaataatcctaggcctaatcataagcagcaactcctccataagtgatctgatttagccaataagctaggattaagcacaaaaaaactttttacacgcaactgtcagggagttaaattacatatgaaaagaaatgaatacagtatttgggtttttaattaaatacaaaagcattcgcgcaaaatgtgaatatgtgggatcgtctagatcaggcgaaactaaaactaattggtgaggatttcggcggcacgattctccatcagtttctccatgttcgtgatggcgcccatccatgtgtccagagtgctggccatgccgacaatctggctgcggttgaggacgcgtggttgcacccacgacatgttaaccactccagccacttggtcaatctcgccgcggacgagatccaaagccagagccttcatgataagcagttccacttccttggcgggcagtttggtctcttgcgcgatgtcggtaaaggagatggctcgctcgatggctgagcgcttgaaggtcatctccatgaggcaaaggagggagatcttctggcgcaacttgacctcctgggcagccaaatcgggaatcttggaccagattttcttcatgtcattaaacctgcaaaggaataatagaaagtgttagttactgcagatattaaattgctattactacacacttgttaatatcgcccgtgttgaaggctttaagaagttccatgagccactcattttccgtgcccttaagcgactcaagaatgggatgagccagcaattcgcctatgttgtagacaccatcgcccaagagagcagccagacccaagaagaatgcctgctgggcccattgatcacgggggtactcatccatggagcagcccagaaactgtaggccacatcggtagtaatcgctgtgcttgcccactcgccgataatactgggatgccagcatgtagtatttgccgtgaacgggcgtcacattacccgcttcctctaggacatcacgcagttcctcgatgatcttcttggtggcattcagatcgttcaggttgctgaggtacagattaccctgcatcacctgcagataccaaacggcctcgtcgcagatcttcaccttgtccttcatcttctccaagaactcgatggcctccttcttgtcaccgatgttgtcaaccaccacctcgagaatctggatgaggccataggggtttattctgcaaatacaatacattagattctgccgagtcatttgcagaagccgactcacttggtctcgaaggtggacaggaaattctggtagagctgcagcagcgcagtttcgtcctgcaaggattcgtggcgcacaaaggtcaccagtttgatggtcagctcattccagagtctgtaaaataattgtattacaagaggaaaattgaaatttaaagcccagatctaacttttcattgtagagctcctcgatgagcgtccattcggcggcgagttctttgttggtggtcttcttctgggtcgccagataggcggtgacattaggctgaggattggacatcgcaactgcgctttgtgttgaattaatttcaaatgtaatgtttaatgtattcccaaactacaaaaattgcaaatcacaatcgccgacgcagctgtcacattgacagatcgcttgtgtggccgtttgtttttttttagcttattttggtattttgtatttttgggcgaatttttatgtaaaatttatttatgaactaaaaaaggcttacataataacaaatggctgtattttttatttttatatcacatggaaagcattatttatgatattatttcagtgcctagaaactactcgatgactcattcgataacaacagctgcggggcttgggcttacgttgtactcaccgtctggtcacactaaccgaacagctgtttctgcgtgaagttgtgtacgcggaagaaacaacgtttcaattcgttttggagctcgcagcgaaacagtttatatttccgcactccaggattccacttggcagagagtcgccgcgcagccaattagccagttagcccgatccgcgagaatatcgatatttaaccgggccacagcagcactgccaacaaaaccaaatacaacaactcgagtgtgcgccctgaactaactaaaaaaaagtaaagctgtcgtgtgttttgcacatttaactatttgttagccaaataaagtagcaatcgaatttcgcgaacgaaagtgccgcaattagtggttatataaatgtaagccaaacaacgcgtcgtgcaagaaactatgtggatttgttcgcagaaagttgacaaactgagaagaactagttagcgaccacaacgaccgctccaactggaaaccgcactccgccaaaagagatcctcattagcatttcttttgtggattaaggcgcgtgtcaactatttgtcaccgatctccaagcaaacgatcgattcctcgtcgaaaagcaaggttagttctgggttctattttcgactttttgggggtcactactctgcccgacgaggttcccccttttggcttcgaaattccaagcagcatggccctactgattgggccagcggttcccattggatacgatcgcgttccattgagaactgcataattggttgtacattgtatcccactatttggttagtagacagttatgcaattggggctccccaatcttatcactcagtgggcaccacgtcgccgccgtctattaaaagttcttggcttgcaatgggtgttggacaactttctctttgaaaagcaaaagccacttgagcacaggagcgttgggtaaagaaacgataattaaattactttcgagctgatagagaatttggaactcaaaaagctattgaattggaagattcaacatttgtatggatttgtacataaacgaaatatatcaaccgaattgtactgcattttacagtatgtaaatgccttctttttgagtaatattgcacagatgtcgcctattttgtgcgtccttcgcagtaaaaaaaacacttgaaccaaatcggccagagtttactgtaacatcctgctgcgctgtcaacatttcttttcatttcctgacgccactgtgcgtttttggtagaaagaaagtactactactttctcgatgtagcagttgatttccttggcctgttccccactttaccaatttaccaaaatcgaaatgggcgacatctggcagcgacagaaacgatgcacaactataatatatatatatatggatatgtatggtatatatgaaaaccggctgaaggcgtattacggttatgtgaagagcggcaatttcaaaaatccaaaacaaattccgaaaaaaaaaacgccgtcggatgacgacttcatcttcatctccgtcccagacgacagacagcaacagcatctggctattaaaagcaaaagtgaaaaatgccacacagtcgccgccgatgcagtggccacaaaaaccaaacaaaagcaaaagaaaaagatgtagaaaaaacat

SEQ ID NO: 21638 - DNA, 1861 bp, DROSOPHILA
acccccaaaaagtcgaaaatagaacccagaactaaccttgcttttcgacgaggaatcgatcgtttgcttggagatcggtgacaaatagttgacacgcgccttaatccacaaaagaaatgctaatgaggatctcttttggcggagtgcggtttccagttggagcggtcgttgtggtcgctaactagttcttctcagtttgtcaactttctgcgaacaaatccacatagtttcttgcacgacgcgttgtttggcttacatttatataaccactaattgcggcactttcgttcgcgaaattcgattgctactttatttggctaacaaatagttaaatgtgcaaaacacacgacagctttacttttttttagttagttcagggcgcacactcgagttgttgtatttggttttgttggcagtgctgctgtggcccggttaaatatcgatattctcgcggatcgggctaactggctaattggctgcgcggcgactctctgccaagtggaatcctggagtgcggaaatataaactgtttcgctgcgagctccaaaacgaattgaaacgttgtttcttccgcgtacacaacttcacgcagaaacagctgttcggttagtgtgaccagacgttgcgatgtccaatcctcagcctaatgtcaccgcctatctggcgacccagaagaagaccaccaacaaagaactcgccgccgaatggacgctcatcgaggagctctacaatgaaaaactctggaatgagctgaccatcaaactggtgacctttgtgcgccacgaatccttgcaggacgaaactgcgctgctgcagctctaccagaatttcctgtccaccttcgagaccaaaataaacccctatggcctcatccagattctcgaggtggtggttgacaacatcggtgacaagaaggaggccatcgagttcttggagaagatgaaggacaaggtgaagatctgcgacgaggccgtttggtatctgcaggtgatgcagggtaatctgtacctcagcaacctgaacgatctgaatgccaccaagaagatcatcgaggaactgcgtgatgtcctagaggaagcgggtaatgtgacgcccgttcacggcaaatactacatgctggcatcccagtattatcggcgagtgggcaagcacagcgattactaccgatgtggcctacagtttctgggctgctccatggatgagtacccccgtgatcaatgggcccagcaggcattcttcttgggtctggctgctctcttgggcgatggtgtctacaacataggcgaattgctggctcatcccattcttgagtcgcttaagggcacggaaaatgagtggctcatggaacttcttaaagccttcaacacgggcgatattaacaagtttaatgacatgaagaaaatctggtccaagattcccgatttggctgcccaggaggtcaagttgcgccagaagatctccctcctttgcctcatggagatgaccttcaagcgctcagccatcgagcgagccatctcctttaccgacatcgcgcaagagaccaaactgcccgccaaggaagtggaactgcttatcatgaaggctctggctttggatctcgtccgcggcgagattgaccaagtggctggagtggttaacatgtcgtgggtgcaaccacgcgtcctcaaccgcagccagattgtcggcatggccagcactctggacacatggatgggcgccatcacgaacatggagaaactgatggagaatcgtgccgccgaaatcctcaccaattagttttagtttcgcctgatctagacgatcccacatattcacattttgcgcgaatgcttttgtatttaattaaaaacccaaatactgt

SEQ ID NO: 21639 - protein, 382 aa, DROSOPHILA
MSNPQPNVTAYLATQKKTTNKELAAEWTLIEELYNEKLWNELTIKLVTFVRHESLQDETALLQLYQNFLSTFETKINPYGLIQILEVVVDNIGDKKEAIEFLEKMKDKVKICDEAVWYLQVMQGNLYLSNLNDLNATKKIIEELRDVLEEAGNVTPVHGKYYMLASQYYRRVGKHSDYYRCGLQFLGCSMDEYPRDQWAQQAFFLGLAALLGDGVYNIGELLAHPILESLKGTENEWLMELLKAFNTGDINKFNDMKKIWSKIPDLAAQEVKLRQKISLLCLMEMTFKRSAIERAISFTDIAQETKLPAKEVELLIMKALALDLVRGEIDQVAGVVNMSWVQPRVLNRSQIVGMASTLDTWMGAITNMEKLMENRAAEILTN

SEQ ID NO: 21640 - DNA, 3494 bp, DROSOPHILA
gaacgcgatatgaatagcacaccccaatccgaaagatacgggttcaaaacccgcgcggggcgaactcattaaatatttttagatctatgtgaaccacatgtttttgtgtattttattaaatatacatttcccatttttgattgcagggaatcacttggggctgcgcctacagaataacaggcagcacggcactggattatctcaagcagcgggagtgcacactgggtaagtaaatcgaattgaagagaagtggggaccatcatttgagctaacccacgatgactccaacaggtggctatgcaacaatcgataccaagttcttcccgcgcgtcgcctcgcaggacacgcccttcagcggcgaggcggtcgaggtactggtctatgtggcgacgccagagaatatctattggttgggcgatgacccggtcgaggagattgcccagcagatcgtatcctgccgcggtcccagcggacacaatgccgagtacctgttgcgcctggccctgttcatgcacgaggagattcccggcgtgagggacgatcatctgttcgagctggagcaattggttttagaggaactgtaccgccgccaaatacctctgtcatctgtgatgggccgcaatccagataggatacgccgcgactcgcacgaggacatccgccgcccgccatccttcgagttcacctcccgtgtgcccgacaccaagctgcgttgcctgaacatttgatttctggtgtgctggcggccaagtgctatgcaggtcgcgttttttgctacagcaaattccaaattattgatcgacattttagcttgttaggtaaccagagtctattgccaaatttgacgtatttctttaaattgtaaataatcctaggcctaatcataagcagcaactcctccataagtgatctgatttagccaataagctaggattaagcacaaaaaaactttttacacgcaactgtcagggagttaaattacatatgaaaagaaatgaatacagtatttgggtttttaattaaatacaaaagcattcgcgcaaaatgtgaatatgtgggatcgtctagatcaggcgaaactaaaactaattggtgaggatttcggcggcacgattctccatcagtttctccatgttcgtgatggcgcccatccatgtgtccagagtgctggccatgccgacaatctggctgcggttgaggacgcgtggttgcacccacgacatgttaaccactccagccacttggtcaatctcgccgcggacgagatccaaagccagagccttcatgataagcagttccacttccttggcgggcagtttggtctcttgcgcgatgtcggtaaaggagatggctcgctcgatggctgagcgcttgaaggtcatctccatgaggcaaaggagggagatcttctggcgcaacttgacctcctgggcagccaaatcgggaatcttggaccagattttcttcatgtcattaaacctgcaaaggaataatagaaagtgttagttactgcagatattaaattgctattactacacacttgttaatatcgcccgtgttgaaggctttaagaagttccatgagccactcattttccgtgcccttaagcgactcaagaatgggatgagccagcaattcgcctatgttgtagacaccatcgcccaagagagcagccagacccaagaagaatgcctgctgggcccattgatcacgggggtactcatccatggagcagcccagaaactgtaggccacatcggtagtaatcgctgtgcttgcccactcgccgataatactgggatgccagcatgtagtatttgccgtgaacgggcgtcacattacccgcttcctctaggacatcacgcagttcctcgatgatcttcttggtggcattcagatcgttcaggttgctgaggtacagattaccctgcatcacctgcagataccaaacggcctcgtcgcagatcttcaccttgtccttcatcttctccaagaactcgatggcctccttcttgtcaccgatgttgtcaaccaccacctcgagaatctggatgaggccataggggtttattctgcaaatacaatacattagattctgccgagtcatttgcagaagccgactcacttggtctcgaaggtggacaggaaattctggtagagctgcagcagcgcagtttcgtcctgcaaggattcgtggcgcacaaaggtcaccagtttgatggtcagctcattccagagtctgtaaaataattgtattacaagaggaaaattgaaatttaaagcccagatctaacttttcattgtagagctcctcgatgagcgtccattcggcggcgagttctttgttggtggtcttcttctgggtcgccagataggcggtgacattaggctgaggattggacatcgcaactgcgctttgtgttgaattaatttcaaatgtaatgtttaatgtattcccaaactacaaaaattgcaaatcacaatcgccgacgcagctgtcacattgacagatcgcttgtgtggccgtttgtttttttttagcttattttggtattttgtatttttgggcgaatttttatgtaaaatttatttatgaactaaaaaaggcttacataataacaaatggctgtattttttatttttatatcacatggaaagcattatttatgatattatttcagtgcctagaaactactcgatgactcattcgataacaacagctgcggggcttgggcttacgttgtactcaccgtctggtcacactaaccgaacagctgtttctgcgtgaagttgtgtacgcggaagaaacaacgtttcaattcgttttggagctcgcagcgaaacagtttatatttccgcactccaggattccacttggcagagagtcgccgcgcagccaattagccagttagcccgatccgcgagaatatcgatatttaaccgggccacagcagcactgccaacaaaaccaaatacaacaactcgagtgtgcgccctgaactaactaaaaaaaagtaaagctgtcgtgtgttttgcacatttaactatttgttagccaaataaagtagcaatcgaatttcgcgaacgaaagtgccgcaattagtggttatataaatgtaagccaaacaacgcgtcgtgcaagaaactatgtggatttgttcgcagaaagttgacaaactgagaagaactagttagcgaccacaacgaccgctccaactggaaaccgcactccgccaaaagagatcctcattagcatttcttttgtggattaaggcgcgtgtcaactatttgtcaccgatctccaagcaaacgatcgattcctcgtcgaaaagcaaggttagttctgggttctattttcgactttttgggggtcactactctgcccgacgaggttcccccttttggcttcgaaattccaagcagcatggccctactgattgggccagcggttcccattggatacgatcgcgttccattgagaactgcataattggt

SEQ ID NO: 21641 - DNA, 1325 bp, DROSOPHILA
ctgcgtcggcgattgtgatttgcaatttttgtagtttgggaatacattaaacattacatttgaaattaattcaacacaaagcgcagttgcgatgtccaatcctcagcctaatgtcaccgcctatctggcgacccagaagaagaccaccaacaaagaactcgccgccgaatggacgctcatcgaggagctctacaatgaaaaactctggaatgagctgaccatcaaactggtgacctttgtgcgccacgaatccttgcaggacgaaactgcgctgctgcagctctaccagaatttcctgtccaccttcgagaccaaaataaacccctatggcctcatccagattctcgaggtggtggttgacaacatcggtgacaagaaggaggccatcgagttcttggagaagatgaaggacaaggtgaagatctgcgacgaggccgtttggtatctgcaggtgatgcagggtaatctgtacctcagcaacctgaacgatctgaatgccaccaagaagatcatcgaggaactgcgtgatgtcctagaggaagcgggtaatgtgacgcccgttcacggcaaatactacatgctggcatcccagtattatcggcgagtgggcaagcacagcgattactaccgatgtggcctacagtttctgggctgctccatggatgagtacccccgtgatcaatgggcccagcaggcattcttcttgggtctggctgctctcttgggcgatggtgtctacaacataggcgaattgctggctcatcccattcttgagtcgcttaagggcacggaaaatgagtggctcatggaacttcttaaagccttcaacacgggcgatattaacaagtttaatgacatgaagaaaatctggtccaagattcccgatttggctgcccaggaggtcaagttgcgccagaagatctccctcctttgcctcatggagatgaccttcaagcgctcagccatcgagcgagccatctcctttaccgacatcgcgcaagagaccaaactgcccgccaaggaagtggaactgcttatcatgaaggctctggctttggatctcgtccgcggcgagattgaccaagtggctggagtggttaacatgtcgtgggtgcaaccacgcgtcctcaaccgcagccagattgtcggcatggccagcactctggacacatggatgggcgccatcacgaacatggagaaactgatggagaatcgtgccgccgaaatcctcaccaattagttttagtttcgcctgatctagacgatcccacatattcacattttgcgcgaatgcttttgtatttaattaaaaacccaaatactgt

SEQ ID NO: 21642 - protein, 382 aa, DROSOPHILA; identical to SEQ ID NO: 21639

SEQ ID NO: 21643 - DNA, 6896 bp, DROSOPHILA
agggctcaccgtcctggaagttttccgtcaagtactggaaaatgtggaacagcttggtgcggtcgctccgcgtctgcgactggcaggtggtgtgctcgaagaatgactgcagaatctggggaatctgggcgcgcggtagagctttcatgtgaaccagggcgtcgattccatcgataatggctggcattacgttgtgatggtcgcgcaggcggtccatgtaaaaggtgctgaggaactccagctgccgctcttgcagcagatcctggggcagtgctatcaacacggcggagagcaagttggttccggccacacgctcctccatgtccggagaggacagggcgaagcccagtgcctcggccagagcagatatgtcatatgccttggcggtcagatctggaggaaacaaagaatctctatgagaagggcacattcgacacggatgcgggtgtaaacctgcccttggctatctgtgtggcggaattcacaagcttctggtcgcttttcagagccttttccagggtggcgcgcgtgggcgttgtcattgcggcaccgtcgcttgagtggtgtctaaatttaaatgagtttaagcacgttaagccgaaatgttaagaaccgataaccgatgacttgtcgtactggccttatctatatcacagcgatgccagactggtgttacagtagtgcaaatgttttagcgattaatatagcttttattgcagtggcgctcagggatggtaatgtgtggctcggagacaaattctagaactggaaaatatacttacatattgtatattgatttataatcgatagacacgatacggagattttctttttattttcttgtaattcgttgtaaatttagaaatatatttttagcagctctggaaacaatcgatagtcgccgactgttgcacacagggaacgcaacagggtggtcaagtgtccgcgccgatgtatcgataagccccgcatcaccagagcacgcacatcactagtattacaaacacaggcaggcagcagtttattttagctaccgcagcaccttaaactctgaattaaatagtttacgcattcattttgcgctcggaacgccgcgtaacaaagctagtacactaatgtccataaccgtaagtcgcccgcgaactgctcagctgcaattgtaggtgtgcggcggcgagacgtcagcgctgctgttgttgttgctcttgtggttgctgcagctgcagacgcccccacatagctggaaataaaataagaagcataagaataagaaatacggtgaagtgtcgaatgcaaagtgcagtttgctgtgtccagaggcttgcaattaactcaaattctatttagatcgcattaattcgacccattgtgcgcccgtgtgcgtgtgtgcgaaagtgtgtgttgtgtgccgctgaaacctgagctgagtgtgcgtgtgtgtgtgcgagcgttaattttgttgtttttactattgtgttttttgtttttttttttttttttgcatacgacgatttgagtcgagttgaaagaatcattcaaagccaacaaggtcgaacgccttattcggctcataactacctaatacattttccaatcggcatttggcccacgtcccgccttggaggcggaattgaaaatcggagcgcgttgcgtttaaatttggtgacaagtcggcggctgtgcgcctgataatttataattagcagctcacttgggtcgttgccactggcatcttctattattcgcaattgtcgccgggttttccactttattcgcttctggctgggaggcgcactttccatttttacctgcaaggcgagccagcgaatgacgaagtcgcttccgttctattgttccccttcccacccagcaacacttggagaaactcacgcactcgagcgctttaattggaactaatctctgtctctcgtttttggctacaatgacgacaacctgttccgatcgccagttactgcgaggtggcaagcaaaagacaaccacttgcgtaggaatgaccgtaatggccaagactacgtttgaagaaatatgcgagaatgccaaattagcacgggacatggctctgacgggcaactacgactcagcctgcatctactatgagggcctccaggggctgctcgcccgccagctgaaggccaccgcggatccgctacgcaagggcaagtggagcatggtaagacattcctatcaccacctccagatactgtcaactaccatgccaatgaatgcgaatggtgacggttatgacaaacaaaggacttagtcataacatcttgtcaacgccattcaaaattgcccaagaggttttgtgtaaacgagttatctagatcgttaacgtgcatataaagatttaatttaatcagaacactaccgaatgactaaaatttgaattacaaagtaatttctagcactactggcacaaagtaactggctaaaactccaatagatcataataaaccaagtattttcaaaaagtttaatatttaccataccggacgatttcattgacatcatttaactaactgatcttcgatttgcagatcaaccagcagattagccaggagcacgccaaaatcaaggccattcagagaaccctacaagacatctcgctggacctacagtcaaccaaatttgcacacaagctgcgacaccagctcagcgaagaaagcaccaccagtaaagatccatctgcctggttcaagccggaccccgacatttggacgcctccgcccaaggatccagatgtgtggggtccgccgaagccaccacccaccactcaggccgttggccgaagagccgcaccgaacaaccgccgcaccactccggcaacgcaaaacagccgccccagcagcacaatcccgcagagcactgcccggaatggtccggcctcgacacgcaattcccgcaactcaacgtccgccacagcaccgagcggcggagcacgcaccaccaatggaagggctggcggtcgcaagctatccacatcgaacaccaacgaggctagggacgacgactccaccgctgcaggcaacaatggcggagcggctggcgatggagaaaacggcgatccgcaggccgcccaagaggaagagcgcaagtttcagcccaacaaccacatcgaagccgagctagtcgacattcttggtaggtgcctaaatcgttgccgcaaggtttgcctcgttcaaaatttggtgatgtgctagtcttatttattaagcaaagctaatgcattactctacttgctttaagatttgtggctatttcaaaaatggtagtagttatgaaaatttgggtctagtatagctacatttattacatgccaacgctctcttttcagaacgtgatattcttcaaaaggatcccaaagtgcgctggagcgacattgccgacctgcacgacgccaagcggttgctggaggaggccgtcgtgctgccaatgctcatgccggactacttcaaggtgcgtcacccccgctgtttgttttctgtgaatcacattctgccaaacgcttatctcgcgatgggtcaacaaacgcgctttattatagtgctcagggcaatgtgtatttgatcaactattctgaactgtcacgaaatgcatcgccttgcagctttatccctcttaactaggtggtggaacttgtcaacacattctacttttacttggggcggtttaaaagtttccattgttgaaattatgctgattatgatgtacctctatctatgttatcttatcaaactatgtgtgcgttcaaaagaatatcgatccataataacctgtcgaaaaaaaataaataattatgtatatattatgtatatatatggaatgctgaccatgtgtttctaacgcctttaagtcacattaaaaatcactgatccaaacacctgagactgagctcgattgctatgttgaccgtgttgtaccatatatgtaagaatatttgttgttttcaaatatttccgtccaacaaatattttccccatctaaaatgtggataccatgaaattttgcgtgggcgaaagatgtttgaaatgggcatcagagaagcctacagcaccatttttcgatttaccatcttactgaataaacaatagcaagaaagatagacttaacgtggatagtagataattagatatttatgtttgattggaagaaatggtactcacttctccaatgtagattatttaattaattagaattaggcaaatgacacagcctaaaacagtggttcagatcaaaacaatcggaaagtatacaattaatatatactgaaagtttgtaaacattttaaagcaaaagtacataatcacttcttgctttctacaacagggtatccggcgaccgtggaagggcgtgttaatggtgggacctccaggcacgggcaagacaatgctcgccaaggcggtggcaaccgaatgcggaactacgttcttcaacgtgagctcggccacgctgacgtccaagtaccgaggtgagtcggaaaagatggtgcggctcctgttcgagatggccaggttctacgcgcccagcacaattttcatcgacgagatcgactccctgtgctcgcgccgaggatcggaatcagagcacgaggcctcgcgacgagtgaagtctgagctgctggtccaaatggacggcgtgggcggcggagaggaacaggccaaggtggtcatggtgctggccgccaccaactttccttgggacatcgatgaagcgcttcggcgtcgtttggaaaaacgcatttacatcccactgccatcggatgaaggtcgcgaggcgctgctcaagatcaatctccgcgaggtcaaggtggacgatagcgtcgatcttacctacgtagccaacgagctgaagggatattccggagctgacatcacaaacgtgtgcaggtgagttcagaatacactaatttaaaatggcgtagtcagttccaaatcatgtcaatggaataaaatgcgtgctcttctttttccagggaggccagcatgatgtcgatgcggagaaagatcgcaggactgaccccagagcagattcggcagttggctacggaagaggtggatttgcccgtttccaacaaggatttcaacgaggccatgagtcgctgcaacaagagcgtgtcccgggcagacctggacaagtacgagaagtggatgagggagttcggatcgtcatgatggcgctgcagacgcgaatggctagcgattgtaggagtatatttttgaatagccttaaacacgcgcttaagtcattaagcttttaaagtgagaaccgaaccgatccgagccgaacggaagagttgaacatattttatatataacattttgcaaatacgatacaatctatatatttacatatatacattgaaccggaggccgttggaattagaaaagactaaccgctctcaaagaggaaacacaaatggaaaactgaaattgaaattgaattgcaatgaagtcgagagataggcaatacgtttatgtatacatagcgaaaaccacccacacactccatgagcacaaaccttccaacaaatcgttaacccacaatcacactatatgcaataaggaatcgctttaatcgccgcctagccttggcctcatactcccacaatatgcacactccaatccgtatcattttttatcgaaagtttttattttaacaagaaatgtccactgtctaatattaatgttaattttcgcttaatttatactttcacatatacatatatatcatagtttagtgcaggcagagatgtgtgtaccagaaagttccctctgatttgcaattaacccactgtaatcagaagatgaaactgaagcaatatgtacttaaagagaggattctgaaattttaaacaataaagaagtttttaactttacggcattaagagttgtgacttttttgggtgctttctgcaaggataaataaggataaaggtcttgcaaatgatgctgatgatgttatgatttgattattattacaattaaatcactgttacgaaaatgctgtgatccccaaagagaatttatatctagatactaagcggatgttgcatttgtatgacacagcggtaattaatcttttctagaaatcaagagtcagggaaaagcactttattatgaaatccaagaacgtttatctgatgaaagcacccttcgttcaccgcttaccaaatgtacaaacttgcctgctgcagactgatgcgccatggcagttaattcgctgaggaccaaggaccaaggaccaagacctcagtacggtctggatggcggtggcatgggcatcaggggacccatgattgggtaaggggcggagcccccagacgcgggatagaatccgctggagggcacgtttccgtaggctggcagagaagtatttgggcccggaccctggcgctgtttgcgcatcagctcctgcattttttcggccttgaggcgacgcaggtgcatggtcctccggatagggaggaacgcgtccagaaagtcctccacgccgatatcgctgtcgttgaacttcttgaccatctcctcggtctgctcctcgctctcggaggcagctgtctgcagcagggccagcgccgtttcaaggcccactccgcccgacttctccttgagctgtgagagtttctcctggacagaggagcacctggtgcgcccatcctccgagagttctgccagctgcccccgcagctcgatgatctgcggctcccgctcgatattgcgctccgcccgactcctgttgtcctcgaaaacactggtcttttgtgttcggagcacctggagaacttcgtcaaccttctcgtccagcttgtcgtcatcgttcagcagttccttcagctcctcgtggcacatcggggtgatggtggcccgcagttggta

SEQ ID NO: 21644 - DNA, 2538 bp, DROSOPHILA
caaacacaggcaggcagcagtttattttagctaccgcagcaccttaaactctgaattaaatagtttacgcattcattttgcgctcggaacgccgcgtaacaaagctagtacactaatgtccataaccttactgcgaggtggcaagcaaaagacaaccacttgcgtaggaatgaccgtaatggccaagactacgtttgaagaaatatgcgagaatgccaaattagcacgggacatggctctgacgggcaactacgactcagcctgcatctactatgagggcctccaggggctgctcgcccgccagctgaaggccaccgcggatccgctacgcaagggcaagtggagcatgatcaaccagcagattagccaggagcacgccaaaatcaaggccattcagagaaccctacaagacatctcgctggacctacagtcaaccaaatttgcacacaagctgcgacaccagctcagcgaagaaagcaccaccagtaaagatccatctgcctggttcaagccggaccccgacatttggacgcctccgcccaaggatccagatgtgtggggtccgccgaagccaccacccaccactcaggccgttggccgaagagccgcaccgaacaaccgccgcaccactccggcaacgcaaaacagccgccccagcagcacaatcccgcagagcactgcccggaatggtccggcctcgacacgcaattcccgcaactcaacgtccgccacagcaccgagcggcggagcacgcaccaccaatggaagggctggcggtcgcaagctatccacatcgaacaccaacgaggctagggacgacgactccaccgctgcaggcaacaatggcggagcggctggcgatggagaaaacggcgatccgcaggccgcccaagaggaagagcgcaagtttcagcccaacaaccacatcgaagccgagctagtcgacattcttgaacgtgatattcttcaaaaggatcccaaagtgcgctggagcgacattgccgacctgcacgacgccaagcggttgctggaggaggccgtcgtgctgccaatgctcatgccggactacttcaagggtatccggcgaccgtggaagggcgtgttaatggtgggacctccaggcacgggcaagacaatgctcgccaaggcggtggcaaccgaatgcggaactacgttcttcaacgtgagctcggccacgctgacgtccaagtaccgaggtgagtcggaaaagatggtgcggctcctgttcgagatggccaggttctacgcgcccagcacaattttcatcgacgagatcgactccctgtgctcgcgccgaggatcggaatcagagcacgaggcctcgcgacgagtgaagtctgagctgctggtccaaatggacggcgtgggcggcggagaggaacaggccaaggtggtcatggtgctggccgccaccaactttccttgggacatcgatgaagcgcttcggcgtcgtttggaaaaacgcatttacatcccactgccatcggatgaaggtcgcgaggcgctgctcaagatcaatctccgcgaggtcaaggtggacgatagcgtcgatcttacctacgtagccaacgagctgaagggatattccggagctgacatcacaaacgtgtgcagggaggccagcatgatgtcgatgcggagaaagatcgcaggactgaccccagagcagattcggcagttggctacggaagaggtggatttgcccgtttccaacaaggatttcaacgaggccatgagtcgctgcaacaagagcgtgtcccgggcagacctggacaagtacgagaagtggatgagggagttcggatcgtcatgatggcgctgcagacgcgaatggctagcgattgtaggagtatatttttgaatagccttaaacacgcgcttaagtcattaagcttttaaagtgagaaccgaaccgatccgagccgaacggaagagttgaacatattttatatataacattttgcaaatacgatacaatctatatatttacatatatacattgaaccggaggccgttggaattagaaaagactaaccgctctcaaagaggaaacacaaatggaaaactgaaattgaaattgaattgcaatgaagtcgagagataggcaatacgtttatgtatacatagcgaaaaccacccacacactccatgagcacaaaccttccaacaaatcgttaacccacaatcacactatatgcaataaggaatcgctttaatcgccgcctagccttggcctcatactcccacaatatgcacactccaatccgtatcattttttatcgaaagtttttattttaacaagaaatgtccactgtctaatattaatgttaattttcgcttaatttatactttcacatatacatatatatcatagtttagtgcaggcagagatgtgtgtaccagaaagttccctctgatttgcaattaacccactgtaatcagaagatgaaactgaagcaatatgtacttaaagagaggattctgaaattttaaacaataaagaagtttttaacttta

SEQ ID NO: 21645 - protein, 554 aa, DROSOPHILA
MTVMAKTTFEEICENAKLARDMALTGNYDSACIYYEGLQGLLARQLKATADPLRKGKWSMINQQISQEHAKIKAIQRTLQDISLDLQSTKFAHKLRHQLSEESTTSKDPSAWFKPDPDIWTPPPKDPDVWGPPKPPPTTQAVGRRAAPNNRRTTPATQNSRPSSTIPQSTARNGPASTRNSRNSTSATAPSGGARTTNGRAGGRKLSTSNTNEARDDDSTAAGNNGGAAGDGENGDPQAAQEEERKFQPNNHIEAELVDILERDILQKDPKVRWSDIADLHDAKRLLEEAVVLPMLMPDYFKGIRRPWKGVLMVGPPGTGKTMLAKAVATECGTTFFNVSSATLTSKYRGESEKMVRLLFEMARFYAPSTIFIDEIDSLCSRRGSESEHEASRRVKSELLVQMDGVGGGEEQAKVVMVLAATNFPWDIDEALRRRLEKRIYIPLPSDEGREALLKINLREVKVDDSVDLTYVANELKGYSGADITNVCREASMMSMRRKIAGLTPEQIRQLATEEVDLPVSNKDFNEAMSRCNKSVSRADLDKYEKWMREFGSS

SEQ ID NO: 21646 - DNA, 2973 bp, DROSOPHILA
ttagaggcgccccgccattagacgacattggcggttctctaaggcagaaggacgctgccgcaggccacgcccctccccttttttttttaattttcgtgagttttcaacgcgattttccgctcaatgtgaagcgtgtttgtgaaaggcttagttcaaatcaaataaattgaattttacctggccagcgattagtgtgggttggtgggggaggtggtggcataaattagctttcggggagctcaacaattcgttaatgtgacacatttagtggaaaatccggccccccgtccacagatcccatcaatggcagccacttttctattgagttatagttgcaacggccgagaaaaaagcgagaaattgagcaaaaaaataaataaaataggagaggccgaaataaaaatagtcaaagaattgtgtttatttatcgctgctcaggcacaatatatatctttggaaatcacctttaaatcttccccagcgatattgtaaatcttttgtcttaggaccgtggtttgctcgagcactttccatcttcatttttccacttttcccttctcgtctttttccatttcgtattttctcctcacattttccatcttgccgtactttgatggatgctttgttttgattcggtctgatggtattttggtggcaaagactatttgttgtgccacacgataatcccaattgtaaatttaatcattatcggcctttgttttcgggcagtgtactgtcaacgcacaaatgtaactcagaaaagaacgtttaaaaaatcaaaatcattaagtaaattcgatttattgtgttattaatttaatcaaataaataaaatacatattaaaactcattcttatgtgcatatttgattttactggctacttgattgaattttccataattccataatccacaaaaaaaacacattcactcatacaaacaaaatgcattcacatattaacaaacaccatacactagtcgagattccttagcaagaaagttatggcttcaaatttgcctttatccatgagaaaaatgctccagtctttgtgtaaacacctggttttctatctccgcaattctcacttccatatgaaacgataccggccagatatacgatatcctggtaatcattattaagggttaacatcaagggacctccggaatcaccctcacaggagtcttctcctcgaatgccagaagcacagatttgtgattcgttgcggaagaacgatatcttgtcttggcaataatatctgttttcataaacggtgttatgcaacaacacctgactatattctctgtttttcgtgtagccccaaccggcgatttgcaatgggtgattatgcaaggggatgggatctttcggcacacaaatcggtagaatttcgtgggtatatctaaggaaataaaaactttggttcataatagtcagaaaatgatgccttatattgcaatactcaccgaactggcgtttgaagacgcaccaaggcgatatcgctttcaaaccttgaggtgttgaaatattgttcgtggacattgaaatactcgatgccgatctctacaaagggggcagcgcagtttcctgtaaagtcgcaatccggattggtggtaatatcatgctcgcccagccgcactctcctgagcaccaaatctgtgttcaccattttatccttgaccacacagtgtgcagcggtgaggacgtagcgtttgttaatcagggagccactacagttgttggtcatggtcgatagtctgcgattctcgtagataagcatggccatccaaggatattcatttggcctcgccgctgtgccatatgccattcgataaagaggcggagcttgtccacaggacgttggtagaacgttacctggttccgggcagcagatgtagtggcgcttatccgaatctattcttctggtatcgatggcacactgtctgttatccattaaattggccccatcttccatcgtagtattatggatacgaagacacttgtccaatcttatgcatttttcatcggctggacaatctggaaattctataactatttcgattagtaagtggttaaatgatagacttttgttttgcacttaccctgcttaggacagcagtaggtattaatgccgcattgcctgctcattaatatgttctgggcctttttccgtttaagctttagaaaagggcagctatcgcggcttctacatatctcatcgtattggcaaggaaaaatctctgtaagggctaagaattagtaatcgatagatcgggtattatacgaaaagcattaccttgtctttgacagtttacgtagacccttcttcgtaccaatggctggaagtgatcgatataacatattttatttattatggatttcaaaatatcactcgtccatttccggccattaaactggggacagtcattgagcatgacgcattgttcattggatcttctttcatagcctggtaaagttcgaaattagaaaataatggcaaaagacttcgatttggtcagccatttaccttcttttcggcagcagtagctattataaccacattgtttgtcccgcaatattgcttctctggcccaacttatatccgccgattgcagaaagtatttcaagggtgggcatgctttaaggtgtgtacagtcctcattgacatcacactttttccatgaattgtaaacctgcaactgaactgaacaaaatatgatccgtgaaatacatacgtgtacagaatataaaaaaaatggctatttgtgcgactttgtgtttcttgccacgcacattttgaacttcattgaactcttaaaatgattatgataatgataatgatgactgaaaagcaaattatttcaacactattattaattattcgtaccacgcccaaatgacagcgacagtagaaacccttgtataagaaagcaaacagatacttcgaccatgtcaatatgtggacgttcaaactt

SEQ ID NO: 21647 - DNA, 909 bp, DROSOPHILA
atggaagatggggccaatttaatggataacagacagtgtgccatcgataccagaagaatagattcggataagcgccactacatctgctgcccggaaccaggtaacgttctaccaacgtcctgtggacaagctccgcctctttatcgaatggcatatggcacagcggcgaggccaaatgaatatccttggatggccatgcttatctacgagaatcgcagactatcgaccatgaccaacaactgtagtggctccctgattaacaaacgctacgtcctcaccgctgcacactgtgtggtcaaggataaaatggtgaacacagatttggtgctcaggagagtgcggctgggcgagcatgatattaccaccaatccggattgcgactttacaggaaactgcgctgccccctttgtagagatcggcatcgagtatttcaatgtccacgaacaatatttcaacacctcaaggtttgaaagcgatatcgccttggtgcgtcttcaaacgccagttcgatatacccacgaaattctaccgatttgtgtgccgaaagatcccatccccttgcataatcacccattgcaaatcgccggttggggctacacgaaaaacagagaatatagtcaggtgttgttgcataacaccgtttatgaaaacagatattattgccaagacaagatatcgttcttccgcaacgaatcacaaatctgtgcttctggcattcgaggagaagactcctgtgagggtgattccggaggtcccttgatgttaacccttaataatgattaccaggatatcgtatatctggccggtatcgtttcatatggaagtgagaattgcggagatagaaaaccaggtgtttacacaaagactggagcatttttctcatggataaaggcaaatttgaagccataa

SEQ ID NO: 21648 - protein, 302 aa, DROSOPHILA
MEDGANLMDNRQCAIDTRRIDSDKRHYICCPEPGNVLPTSCGQAPPLYRMAYGTAARPNEYPWMAMLIYENRRLSTMTNNCSGSLINKRYVLTAAHCVVKDKMVNTDLVLRRVRLGEHDITTNPDCDFTGNCAAPFVEIGIEYFNVHEQYFNTSRFESDIALVRLQTPVRYTHEILPICVPKDPIPLHNHPLQIAGWGYTKNREYSQVLLHNTVYENRYYCQDKISFFRNESQICASGIRGEDSCEGDSGGPLMLTLNNDYQDIVYLAGIVSYGSENCGDRKPGVYTKTGAFFSWIKANLKP

SEQ ID NO: 21649 - DNA, 3190 bp, DROSOPHILA
tggatctgccgaagggaaatgagaccgccatgcaggagtggcttctcgccaatggtcccatttcgatcggtaagtcgatgcagaaaattaaccccaaagcccacttaaccagatcatttctctaggcatcaatgcgaatgctatgcagttctatcgcggcggagtttcccatccgtggaaggccctgtgctccaagaaaaacctcgaccacggtgttctagttgtggggtatggcgtctccgactatcccaatttccacaagaccttgccctactggattgtgaagaactcgtggggtccgcgctggggagagcagggctattatcgcgtttatcgtggtgacaacacttgcggcgtcagcgaaatggccacttcggctgtgctggcctagacttgctttgagtccaattatatacaagcatacgactatatctaggttaataatttagccagtaactttgtgtacaattaattctgtttccatgttcttcaaccgtcacgataaggagtcgttgagtttcaaagcttcgcctatatagtataatcatttcagacatctgtaatctcacgaaaaagtctgcatccacatattccgctttaattgaaaataacaataaattgtacaagaattaaaacctggttgggtttattattgaatccatgacagctctggccgcagcaacagttggtcaagattgatggttggttggatcaagaaaaatgttgaatttatgtgagatgtattcaaattattcgattaaaatggtttgattaaatatgggtgccagagtattattggctgttaagaaatatttataactgcttcaattactggaacatttgacccagtgattttgatgattgattttcaaacactttgtcagtgtgtagaagtgcaatatgttaattagatttagaccagggccgtcgcaccgtgggaagccatagaaaatgagtgtttctggtgcagaaccagccagctcagtagcagcttgaagcgcatcgcgggcggtagcggagcaatggccatggacgactacgatgatgacagtaagtgaacacagacaaaaggatgcagatacaaaattgcgtaaaaatcattacccagtgagcagcgtgggcgtgaccacggcccgaatcgagaaccagcaccaacagcacccccaccagcagggtcagcatggacaccaccaacagggccagggtcaaagccagtacagcgcaggggcggtcaaagtgggcggatggcgatacgaggacgccagtcgctacatcggcgagtggaaccagcgtggccaaaagcacggcatcgggcatctgcagttcgccgatggcacccgctacgatgggcagttccaggagggtcttagtcaaggagtgggctgcctctggttcgcggatggagcaaagtcagtttcaataatattagtgatgtaaacctaaacgaaatattgtagcacttgaaaactattcttgtagccactactcggggagtaagaggaaatgctagtatatatattcttgatcagaaatggtttagctataatttacctagggtttgcatccagtgaagaaaattgtatatgatgattcattttgcacatttttaagacagatacgaaggcgagtttcatcagggctggtttcatggtaatgggatcttctggagagccgatggaatgaagtacgagggcgagtttcgaggcggcaagatctggggcctgggattgctgacgttccaggacttcacgcacggctttcccagaaacgagggattctttcaagactgccgctttatgagacgacgtcgatgtcccgaggtggtgcagcgtgcacaaaagtgcgctcttatggcccgttcccagtgcgaacacccatactgaacagacacttcagattggttaccagttggtattgataaacacgtacagtttaaaaatacaaattttagtaaccgactgtaagagtctcaagtcataaaacagaaaaaggtgcctttaagaaaagaaataagcatttctttcttaacatcttaaactttaatacatttgcgcataaacgttcgtaaatgtatctaagtaatataaaatgcatacaatttcgcgtttactttataattttgctttttccaaattctttatcaaaaattcttcaacgcaccctaataaaaacaacaagaaaattatgaagaatttgtgcgtgtgcttattggattataatattaacaagaacggagttgtttctctgctaattcggactaggcgcaccgaccaggtaccacgcattcctggccttcaccgctgtgttccgcaccagacgcttgggatcatccaaggcggcggccagggccagagtaacatcgactttgtggggcaacaggacgaaggtaggatactttgtcacatcgtagagcagctgcagcgccgcaattcgcacttgctataagaaagaaaatgagtttaagttttgtgttcgacattttcctttacaagttaagaaacctcctcaattaactatcaaatctttataataatatgtgcatgtttaacttaccatggtatgctgagccttgtatttcgacagctccagacagctgggtatgaggtgggccaaatgcccttggaaatacgtgtcctgctgcgccacaaacttttcacagatgcccaatgcaatgcacagcgactgcgcctcgttgtgctcctccaagctcttgaaaagcagcggaccgagctgctcaatgtttagcttaataaccgcctgtggcgtggctttcagtacgtagacaaaagccttcaagtggtgcacacagtagttggcaagtttgctgcccatttttcccatgatagtgtggaaaagcttctgcttgtagaggaatttaacgacaggcaaatccaattctgggtactcggcggcaatgatgtcgaatcccaaggcagcggcagtgctcaaactgggatgttttagtagatccgagagctttaatgagacaatattatttcacgaataagaactagagaactaaaatggctatactagtacatacatcaccaacaacatcggcagcctcatcgaatcctgcgactactaggcccttccccacccatgcaaggatctccaccgcccgaacatcgccctttttaatagccaccttcagttgctccgtgatttttttgaccttccttagattagc

SEQ ID NO: 21650 - DNA, 926 bp, DROSOPHILA
catcgcgggcggtagcggagcaatggccatggacgactacgatgatgacatgagcagcgtgggcgtgaccacggcccgaatcgagaaccagcaccaacagcacccccaccagcagggtcagcatggacaccaccaacagggccagggtcaaagccagtacagcgcaggggcggtcaaagtgggcggatggcgatacgaggacgccagtcgctacatcggcgagtggaaccagcgtggccaaaagcacggcatcgggcatctgcagttcgccgatggcacccgctacgatgggcagttccaggagggtcttagtcaaggagtgggctgcctctggttcgcggatggagcaaaatacgaaggcgagtttcatcagggctggtttcatggtaatgggatcttctggagagccgatggaatgaagtacgagggcgagtttcgaggcggcaagatctggggcctgggattgctgacgttccaggacttcacgcacggctttcccagaaacgagggattctttcaagactgccgctttatgagacgacgtcgatgtcccgaggtggtgcagcgtgcacaaaagtgcgctcttatggcccgttcccagtgcgaacacccatactgaacagacacttcagattggttaccagttggtattgataaacacgtacagtttaaaaatacaaattttagtaaccgactgtaagagtctcaagtcataaaacagaaaaaggtgcctttaagaaaagaaataagcatttctttcttaacatcttaaactttaatacatttgcgcataaacgttcgtaaatgtatctaagtaatataaaatgcatacaatttcgcgtttactttataattttgctttttccaaattctttatcaaaaattcttcaacgcaccctaataaaaacaacaagaaaattatgaag

SEQ ID NO: 21651 - protein, 198 aa, DROSOPHILA
MAMDDYDDDMSSVGVTTARIENQHQQHPHQQGQHGHHQQGQGQSQYSAGAVKVGGWRYEDASRYIGEWNQRGQKHGIGHLQFADGTRYDGQFQEGLSQGVGCLWFADGAKYEGEFHQGWFHGNGIFWRADGMKYEGEFRGGKIWGLGLLTFQDFTHGFPRNEGFFQDCRFMRRRRCPEVVQRAQKCALMARSQCEHPY

SEQ ID NO: 21652 - DNA, 16175 bp, DROSOPHILA
ctgtggctggagtattgttgagattatttcaagcgttcaagcttaaagtagtacatttcaatagaagatagagtatacattttcttagtgctaaagtcaatcttcataagcggaaggcgtttcacccattccacaacgttccccgatgacaacgaaccggttttccgttttgttttgttccgattccgcccggccggcgaatgagaaaaaaaacaaatagctggaaaagattttgtaaacatacgttcagagcaaaacaaaatcggataagcggacattctctcagttaaattaaagtgccaaagagaagagcacccgatcgactgccgatcgagcgactacgaacaccaaaacttttggggcctcgggaaaacttctcgctgcagtttaatcagttgctcaccaactgcgagaccagttagatgtgctgcgatgtaatgaggaaagaatatttatcaaggaacacacatgaaatttgaatttttcgtcaaattttttgggcattctcaaaagacaattatcattataacttataaacacatttcatgtgagatgatagtaaaagcaccaaactgcattgaaatgatgttacaatcttggtcttaagtaactttggttacaggtgatagaactaagttaacaatcctagcaactaacgttcgtattatcctaggttatgatgaacccaagaagaatgctgatataatgaacaaattaaatacaattacatatattttaaatgattatataacctcataagtcaaatggcgataatccgtatcttttattccggcttcagaattttctgaaataagacggataagaggatgtgaatacattatagggtcggaaagactatcgttctctcagctgtatagaatgccgaagacgagaaaagccgaaggcatacgaaaagagccgatcggacgactatcaaaatcaaatttttcggggtctcgaggaaaacttctcgctgcggtgccatcagttgctcgagaagagccatccagtgcggttggatgagctccaccaaaggaatacgaaaagaacagtgaaaaaagtgaaatacagcagataagaaagtgaaatacatacataagtgaaccgggaaagaaagagatagaaccggaagtggtccgtggagaaaggactgtcgttatcgcagcgcgggtgcttgaactctcggcacaatggggcacggagtggcctccattggggctctgctagtaatcctggccatctcctattgccaggcggagctaacgccaccatatttcaatctggccacgggcaggaagatttatgccacagctacgtgtggccaggatacggatggaccagagctctactgcaaactagtgggagccaatacggaacacgatcatatcgactattcagttatccagggacaggtaactataatcgacatccagcaacgcccaaaaatcttttcagtatacacacatgatgagataatctttaactttacactgaaaaaaagttaatgtttaatttcaaaataaagctgaatcaggagagataacaaattacaatcgattatattggttatccaacttaattaagaatttcttcaaactattatttagttaaaaatcaaaactttatatttcaagtgtgcactgcatttagacgtcccccacatgtgttgaacattcgaattgggctctaaaaatactctggactgaatttggattccattttctttttctaacatgtgttttctgcgtttttgtaggtctgcgattactgcgatcccacggtgccggagaggaatcatccgccagagaacgcgatcgatggcaccgaggcctggtggcagagtcctccgttgtccaggggcatgaaattcaatgaagtcaatttgaccatcaacttcgaacaggtaagcagcagagaacataaaagataccaaaggtatccgcctaagaaacgcatagagacggggagacggtggatggatgcaactcgttttcgggttcgaccgatgggatcggatcgtaaaatttgaaaacaattttaatgggttttcatttcgtcgacgtcgacacagcaaaaactgaacgaaaaaaatgttgctgagctcgagtatttgttgttggcaaaggggaaggctttggagttgtgggttatcagtatgtcagcagtccctacatacaatatacacagagatatgtacgaacatacatacacacacttttgaatgggagttctcggtttacaggctgcttagaaaccgactcggagcattgactttttcgagcggttcattcggaatggttttttttagcgataaaggcattatgtttcttaaggcacaccagcatgcgacaaatatgaattgagagcagcctgataatgggcccgagtcgcaagaaactacagtcttatcatcagattgtttctcagtttgttctataaaaagttgtgcctcggactcgcctacgttcttatctcacttgcaacggaagcgagtaatccacgaggtcgggaatttaattttgagaataattgcgctaagatttcaacagctcagcatgatctcattcgtgttaattccttagttgcacttttcctaattcacaaaatgcaactgaatatgagacattggtttatatatagactgcgaaacaccaggaatgctggcaactcgaatgctaaatttgtgagatacatatttgcagaattatgtacatcgacgtttttttgcttcaaaatcatgaacttccacatgggtgaaactaatgaaaacacagaaaagtaaacaaatctctgaaaccaaacatgtgcgcctgtgtacaaagatattaacgcatggctgtatctttgtatatgtgtggaccttcgtatctctcagttcgctttcaattgaagccaaattaaaaagcaaacataacccaagacaatataaataaacgatgaaaaagtggccggttctactgcagaacatttggagttaatttccccacagtgatctcatgttgtcgtctcacatttgtctgtgaggcgatgtatgtacatatataatcgtaatgtgtacgctggactaataaatttcaatgaatttgcttgttcaaaatgaattttgtgtcttgggggagacttgaaaaaactaaagtgggtaaaattgttgaagactcttatattgaaattgaaatgagtaaatcttatctttaacatatttggggttactcaataacatttttaatttaacaatgtgtgtaatatgtaatatattttctgatctctacactgttcgctttttcaggaattccatgtggcctatttgttcattcgcatgggcaactcccctcgtccgggtctctggacgctggagaagtccacggattatggcaagacctggacgccttggcagcacttttccgatacccccgccgattgtgagacgtactttggcaaggacacctacaagccaattacccgcgacgacgacgtcatctgcaccactgaatactcaaagattgtgccgctggagaacggcgagattcccgtgatgctgctcaatgagcgacccagttccaccaactacttcaactcaacggtgctgcaggaatggactcgtgccactaacgtcaggattcgtctgcttcgcaccaagaatcttttgggacatttgatgtctgtggctcgacaagatcccacggtgacgcgtcgctacttctactcgatcaaggacatctcgatcggaggaaggtgcatgtgcaatggacacgccgacacctgtgacgtcaaggacccgaagagcccagtccgcatcctcgcatgccgttgccagcatcacacgtgcggcatccagtgcaacgagtgctgtcctggattcgagcagaaaaagtggcgccaaaacaccaatgcccgaccattcaactgcgaacgtaagtattgtgtagtcttttgaacggacatctctcttgagcggacagagacccggatctttatttccgaattttattactagcctgcaactgtcatggtcacagcaacgagtgcaagtacgatgaggaagtgaaccgcaagggactgtccctggacattcacggacactacgatggtggtggtgtttgccagaactgtcagcacaataccgtgggaattaactgcaacaagtgcaagccgaaatactatagacccaagggcaagcactggaacgagaccgatgtctgcagccgtaagagccagttataatttaaaggaatccgtaataccatcgttctcccatccatttagcctgccaatgcgactacttcttctccaccggacactgcgaggaggagaccggaaactgtgagtgccgtgctgccttccaaccgccaagttgcgactcctgcgcgtatggatactatggttaccccaattgccgggagtgcgaatgtaatctgaatggaaccaatggctaccactgcgaggctgaaagcggacagcagtgcccgtgcaagatcaatttcgcgggggcctactgtaagcagtgcgccgaaggatactacggattccccgagtgcaaggcatgcgagtgcaacaaaatcggctcgattaccaacgactgcaacgtgaccactggagagtgcaagtgcttgaccaatttcggaggcgacaactgcgagcgctgcaagcacggatacttcaactaccctacttgctcatgtaagaaattaataatattttaaagttgaaaaaccaactgatgctgattatgattctccttggcagactgcgactgcgacaaccagggcacggagtcggaaatctgcaacaagcagtctggccagtgcatctgtcgtgaaggttttggaggcccaagatgcgatcagtgcttgccaggattttacaactatccggactgcaagccatgcaactgctccagcacgggtagttcggcgatcacctgcgacaacacgggcaaatgtaactgcctcaacaactttgccgggaaacagtgcacgctctgtactgccggatactacagctatccggattgtctacgtatgtaccctcagccatcagatttcatttcaattttaataacctctaatttatcttgatttgcagcttgtcactgtgactctcacggatctcagggagtgtcctgtaattcagacggacagtgcttgtgtcagcccaactttgacggacgtcagtgcgattcctgtaaggagggcttctacaacttccccagctgcgaggactgcaactgtgatcctgcaggagtgatcgataagttcgccggatgcggatcggtgcccgtgggtgagctctgcaagtgcaaggagcgagtgacgggcaggatctgcaatgagtgcaagccattgtactggaacctgaacatcagcaatactgagggatgtgagatttgcgattgttggacagatggtactatttccgcactggacacctgtacctcgaagtccggacagtgtccctgcaagccgcatactcaaggcaggcgctgccaggagtgtcgggatggtaccttcgatctggacagtgcctcgctgtttggctgcaaggactgcagttgcgatgtgggcggctcgtggcaaagtgtttgcgacaagatcagcggacagtgtaagtgccacccgaggattacgggtctggcatgtacccagccactgaccacccacttcttcccaacgctgcatcagttccagtacgaatacgaggatggatcactaccatcgggcactcaggtgcgctacgactacgatgaggcggcattccccggatttagcagcaagggctatgtggtgttcaacgccattcagaacgatgtacggaacgaggtcaatgtctttaagtcatctctgtatcgtattgtcctgcgatatgtgaatccaaatgccgagaatgtcactgccaccatttcggttacttcagacaatcctctggaggttgatcagcagtaagtatttgtagaactttgctagagaaagatcttaagtattccggttttacagcgttaaggttctactgcaacccacatcggaacctcagttcgtaactgttgcgggtcccttgggagtgaaaccctcagccattgttttggatccgggtcgttatgtatttaccaccaaggccaacaagaatgtgatgcttgattactttgttctcctacccgccgcttactacgaagccggaattctaacgcgccacatctcaaatccctgtgaactgggcaacatggagctgtgccgtcactacaagtacgcctctgtggaagtgttctcaccagcggcaactccattcgtcatcggtgaaaactccaagccgaccaatcccgtcgagacgtacactgatccggagcatctgcagattgtgagccatgtcggtgatattcccgtactgagcggatcccaaaatgagctgcactacatcgtggatgtgccacgaagtggccggtatatcttcgtgattgactacatcagcgataggaacttccccgacagttactatatcaacttaaaactaaaggataatccagattcggaaacatccgtgctgttgtatccatgcttatactcgactatttgccgaacatcagttaacgaggatggtatggagaagtcattctatattaacaaagaggatttgcagccagtcatcatctccgtgagttcgaaatattaatcaagctattaacagcaaaataatcactttcctattttgttcaggctgacatcgaagatggttctcgtttcccgattatctcggtgacagcaattcccgtcgaccaatggtccattgactacatcaacccaagtcccgtctgtgtgatccatgatcagcaatgcgccactccgaaattccgttccgttcccgattccaagaagatcgagttcgaaactgatcatgaggaccgtattgccaccaacaaacctccatatgcctcactcgatgaacgagttaagctggtccacttagacagtcaaaatgaagcaaccatcgtgattgagtgagtttgtcacttctttatattatattatatattatttatttatttatattattttatatacagatcaaaggttgatgctacaaaaccgaatctatttgtgatcctggtgaagtactaccaaccgagccaccccaaataccaggtgtactacacgctgacagcgggcaagaaccagtacgatggcaagttcgacattcagcactgtccatcgagttccggatgccgcggtgtgatacgccccgccggagagggttcgttcgagattgacgacgagttcaagttcacgattacggtaagactattataaaatacaatcttaagctactttaaaaccgcaaattggttttagaccgatcgatcccagagcgtttggctggactacctggtggtggttcccttgaagcagtacaatgatgacctactggtggaagagaccttcgaccagaccaaggagttcattcagaactgcggccatgaccacttccacataacccacaatgccagtgatttctgcaagaaatccgttttctctctaacagccgattacaatagtggagcattgccttgcaattgcgactacgccggatccacgagcttcgagtgtcatccgttcggaggtcagtgccagtgcaagccgaatgtgattgagcgcacgtgcggagcctgtcgcagtagatactacggattccccgactgcaagccatgcaagtgtcccaatagcgccatgtgtgagcccaccactggtgagtgcatgtgtccgcccaatgtcattggggatttgtgcgagaagtgcgcccccaacacctatggattccatcaggtaagatttttgactagccttcaacagcaggtgctaaaaatcgcatttcattgtccaccaggtcattggctgcgaggagtgtgcatgcaatcctatgggcattgccaatggaaactcccagtgcgatctgttcaatggaacctgcgagtgtcggcaaaatatcgagggcagggcctgtgatgtttgctccaatggatactttaacttcccgcactgcgagcagtgcagttgccacaagcccggcaccgaactggaggtgtgtgacaagatcgatggcgcatgcttctgcaagaagaatgtggttggaagggactgtgaccagtgtgtcgatggaacatacaatctgcaggagtcgaatccggatggttgcaccacttgcttctgctttggcaagacttcgcgatgcgacagtgcctatctcagagtttacaatgtgagcctgcttaagcatgtgtccatcactactccggaattccacgaggagagcatcaagtttgatatgtggcccgtacccgcggatgaaattcttctgaatgagaccacgctgaaggcagactttaccttacgggaggtcaacgatgaacgacctgcgtactttggggttctggactatctgcttaaccagaataatcacatctctgcttatggcggagacctggcttatactttacatttcacttctggcttcgacggcaaatacattgtggctccggatgtaattttgttcagtgaacacaatgccctggtccatacaagctatgagcagcccagccgaaatgaaccattcaccaaccgcgtcaatatagtggaatcgaatttccagacgatttccggaaaaccagtttcacgagctgatttcatgatggttctgcgggatctaaaagtaatctttatcagagccaactattgggaacagaccttggtgacccacctgtccgatgtgtatctaactctagccgatgaggatgcagatggcactggcgaataccagttcctggccgtggagcgttgctcctgcccacctggttactccggacactcgtgcgaggactgtgccccgggctactaccgagatcccagcggaccttatggtggttactgcattccctgcgagtgcaatggacattcggagacctgtgattgcgctaccggaatctgttcaaagtgccagcatggaacagagggtgatcactgtgagcgctgtgtgtccggttactatggaaacgccacgaatggaacacccggagattgtatgatctgcgcttgcccactgccatttgactcgaacaactttgccaccagttgcgaaatctccgagagcggagaccaaatccattgtgagtgcaagccaggatatacaggaccacgttgcgagtcttgcgccaatggtttctatggagagccagagagcataggacaggtgtgcaagccgtgcgagtgttccggtaacatcaatccagaggatcagggatcttgcgacactaggaccggtgaatgtcttcgctgcttgaataacaccttcggtgctgcctgtaatctgtgtgcacctggattctatggcgatgctatcaagctaaagaactgccagagctgcgactgcgatgatctgggcacccagacgtgtgatccctttgtgggcgtctgcacctgtcacgagaacgtcattggcgaccgttgcgatcgctgtaagccggatcactatggatttgagtcaggtgttgggtgccgagcctgcgactgcggtgctgcctccaattcaacgcagtgtgacccacacacaggtcactgtgcctgcaagtcgggagtgacaggacgacagtgcgatcgatgcgccgttgaccattggaaatacgaaaaggacggttgcactccgtgcaattgcaatcagggatactcacgaggattcggttgcaatcccaacaccggcaagtgccaatgtctgccaggagtaattggagataggtaactaacacttgtgatctttggtttctaaatgttgagtgtactaaaactactttcgtcattccagatgcgacgcttgtccgaatcgatgggttctgatcaaggatgaaggctgtcaggagtgcaacaactgccaccacgcccttttggatgtcactgatcgaatgcgctatcagatcgatagtgtcctggaggactttaacagtgtaaccctggccttcttcaccagtcaaaaattgaactattacgaccagctggccgatgaactggagcccaaggttaagctattggatcccaacagcgtggacctgagtccatccaaaaaggccaacagcgaattggaatccgatgccaagtcctatgccaaacaggtcaaccagaccctggccaacgccttcgatatccgtgagcgatcgagcaccactttgggtaacataacagttgcttatgatgaggcggtcaagagtgccgaccaggccaaagaggccatcgcttcggtggaagctctttccaagaatctcgaggcggcagcgagcacaaagattgatgctgctctggagcaagcacagcacattttgggacaaatcaacggaaccagtatcgaacttacacccaatgaacaagtcctggaaaaggcgaggaaactctatgaagaagtgaacactctagttctgcccatcaaggcgcaaaacaagagcctcaatgccctcaagaatgatattggagaattcagcgaccatctggaagatcttttcaactggagcgaagcttcacaagccaagtccgctgacgttgagcgccgcaatgtggccaaccagaaggcctttgacaactctaaattcgacaccgtttcggagcaaaagctacaggcagagaagaacatcaaagatgctggcaatttcctcatcaatggcgatctgaccctgaatcaaattaatcagaagttggataacttgagagatgctctaaacgagctcaattcgttcaataaaaatgtggacgaagaattacccgtgagggaggaccagcataaggaggcggatgcccttaccgatcaagccgaacagaaggcggccgaattggccattaaggcccaagatctggctgcccaatacacggatatgaccgccagtgcggagccggccatcaaggccgcaactgcctactcgggaatcgttgaggccgttgaagctgcccagaaactcagtcaggatgcaatctctgcggccggaaatgccactgataagacagatggcattgaagagagagctcatctcgctgacactggatctactgatcttctccagagagcacgccagtctctgcagaaggtacaagacgacctagagccccgtctgaacgcttcggccggcaaggtgcagaaaatctcagccgtgaacaatgccaccgaacaccagctgaaggatattaacaagctgattgaccaactgccagctgagtcgcagagggatatgtggaagaattcaaatgccaatgccagtgatgctctggagatactgaagaacgtcctagagatactcgaacctgtgagtgtccaaacgccaaaggaactcgagaaggcacatggcatcaatagagatttggatctgaccaataaggacgtttctcaagctaacaaacaattggatgacgtagaaggatccgtttcgaagctaagcgaattggcagaggatatcgaggaacagcagcaccgtgtgggcagtcagagccggcagttgggccaggaaatcgagaacttgaaggcccaagtggaggctgctcgccagttggccaacagcatcaaggtgggcgtcaatttcaagccaagcacgatcctggaactgaagacaccggaaaagaccaagttgctagccactcgcaccaatctatcgacctatttccgcaccaccgagccatccggtttccttttatatctgggcaatgacaacaagaccgcccagaagaacaacgactttgtggccgttgagattgtgaatggctatccgattcttaccatagatttgggcaatgggccggaacgcatcaccagcgataagtacgtggcagatggtcgctggtatcaggctgttgtggatcgcatgggtccgaatgccaagctaacaattagggaagaactacccaacggtgacgtggttgagcacagcaagtctggctatcttgaaggatcccagaatatccttcatgtggataagaacagtcgcctatttgttggtggctatccgggtatttcggacttcaatgctccgccagacttgaccactaactccttctccggcgacattgaggatctaaagattggcgatgagagcgtaggattgtggaactttgtatatggcgatgataacgaccagggcgccagggagcgggatgtgctgctcgagaagaagaagccggtaactggtctgcggttcaagggtaatggatacgtccaactgaacgccacatcgaacttgaagagccgctccagcatccagttcagcttcaaggcagacaaggatacttccaatggactgctgttcttctacggcagggataagcactacatgagcattgagatgattgacggagctatcttcttcaacattagtttgggtgaaggtggaggcgttcaatccggcagccaggatcgctacaatgacaaccaatggcacaaggtccaggcggaaagggaaaaccgaaacggccttctcaaggtcgacgatatagtaatatcacggaccaatgctccattggaagcggacttggagttgcccaagctgaggagattatacttcggtggtcatccgagacgtctgaatacctcgataagtttgcaacccaactttgatggctgcatcgataatgttgtgatcaaccagggagtggtcgaccttacagaatacgtaactggcggcggagttgaggaaggatgctcggcgaagttctccacggtggtgtcatatgcgccgcatgagtacggattcctgaggatgaacaacgtttcctcagataacaatctgcatgtggttctgcacttcaagaccacgcaaccgaatggcgtactcttctatgccgccaatcatgaccagagttccaccattggcctcagcctacaagatggtttgctcaagctcaacagcatgggcagtcagttggtaatcgacgatcgtattctgaacgatggcgaggatcatgtggttacagttcagcacacccaaggtgaacttcgtcttacggtcgatgatgtagataacaagaggtaagtttaaagaagacttcgatctcttttgtggttcctatgctaatctacatttttacattctcatagacttggttctccacaaccattaatcctggagggtggtgacatcttctttgctggcttgccggacaactatcgaacaccgaggaacgcgttggcctctttggcctactttgtcggttgcatcagcgatgtaaccgtgaacgaggagatcattaactttgccaacagtgctgagaagaagaatggcaacatcaacggttgcccaccacatgtactaggtgagttgacaggatacaacatccgattgaaagccgatttataaaaatctctatttgcttacagcctacgaaccaagtttggtgcccagttactacccaagtggagacaacgaggtggagtctccgtggtcaaacgccgatactctgcccccacttaagccagatattgaaagcacactaccgcccacaacgcccactacgaccaccacgacaactaccacaacaacatcgactactacaacttcaacaacgacaactactacgacaccatccccgatagtcattgatgaggagaaggagattgaggcgaaaacaccgcaaaagatcctaacaacgcggccaccagccaagctgaaccttcccagcgatgagcgctgcaagttgccggagcaacccaatttcgatgttgatttcacagaggcgggttaccgattctatggactgcgggagcagcgcctgcagattaactcactgccggtgaaggtacgccgtcaccatgacattggcatctcattccgtactgagcgaccaaacggtctgctcatttatgccggaagtaagcagcgcgatgacttcatagccgtgtatcttctggacggtcgggtgacatacgagatacgggtgggtgcacagttgcaggccaagatcactaccgaggcggagctgaacgacggcacctggcacaccgtggaggtggtgcggacccaacgcaaggtatccctgctcatcgacaagttggagcagccgggttccgtggatctgaatgcggaaagatccgctccggtattggctgtcgagttgcccatctatctgggcggagttaacaagttcctggagtcggaggttaagaatctcaccgatttcaagactgaagtaccgtactttaacggctgcctcaagaacatcaagttcgacgctatggatctggaaacaccaccggaggagtttggagtggttccgtgctctgagcaggtggaacgcggtttgttcttcaataaccagaaggcgtttgtaaagatctttgatcacttcgatgtgggcactgagatgaaaatcagcttcgatttccgaccgagggatcccaacggattgctcttctctgtgcacggcaagaactcttatgccatactcgagctagtagacaataccttgtactttaccgtgaagaccgatctgaagaacattgtgtccaccaactataagctgcccaacaacgaaagcttctgcgatggcaagacgcgcaatgttcaggccatcaaatccaagtttgtgatcaacatagccgtggatttcattagctccaaccccggcgtgggcaacgaaggatcagtgatcacaaggaccaatcgtccgctgttcttgggcggacatgtggccttccagagggccccgggcatcaagaccaagaagtcctttaagggctgcatcagcaaggtggaggttaaccaaaggatgatcaacatcacgccgaacatggtcgttggcgatatttggcagggctattgtcccctcaactaataaagaacttcggaacgacttaaggacctatgatttatttggacaacgactacgaaaaactgccaggaagaatcttcttttgccgacaactgctaatcaaaggacaacgaacgatcaaatttcaaacgaacaaaatcgacgggtcataaaaaagtcataaggtcttcaaagtaatagatccttagcaaagatgccagtcgtatatattcctagtactataagccaaactgcgtgccaattctattaaagccatttacatttatatatcctttttaaaactccttaagagaatcttgcatttttgtaattccaataaaccaataaaataaacattttaatgaaactaaaacttttgtttttttatgtcataagttttaaatggtgtaacatacatttttacaattattgagactttatttacaaaaatatttcaggttttgttgaattattcatattataaatgattatataaaatcgtatattactcaatagctgactttttttggggctttggttacttagtaaaattagaatgatgattgaagcaatacataattggctggatagcttcggattagtattcgatgtcgtacagttcgattagccggcaggccagtggttgtggaaatttccccaaaaaaattagccaattctccgcacccgtttggttcttaaagccttcgataatctagaataacaaacgagtattgttgaaagacgaaaattaataatttccggaaataacttactcttcgaatcatctgacgcagatcctgtggaggattgtcccacgaggcaatggcatcgcaaaagaataagaagtcgggcaccacgcctcctggattctccctgatcatatggcacattcccataaaagacaaatacttctcgtcgtggtcatatgcgtaacgcaataacaagcaccttcatttcgtggaagaaaggataatttaaaaaatgagcaaatgaagcatttaatgtgtacataccactggcgtaggaattcgggcaaatagggagccacttcatctggacatgcatttccgaggcgcccaagtgttattgcttaaaaaaaagaataataataataaattactttaaatcaggccaaattacttacccgcattcctcgaaagattttttggaatgtcctgccggttcatcaggatcattagttcgctaagcagaaggcgtacgtacggcttggtttcctcaccttaggggcgaaatacaaaaaatcttttttgttacattataagagaaccaagccaacttacccaacttaacgcagatttgccctatggcccaaactgcattgttgcacacaccaacaacgctggggtt

SEQ ID NO: 21653 - DNA, 11673 bp, DROSOPHILA
agccatccagtgcggttggatgagctccaccaaaggaatacgaaaagaacagtgaaaaaagtgaaatacagcagataagaaagtgaaatacatacataagtgaaccgggaaagaaagagatagaaccggaagtggtccgtggagaaaggactgtcgttatcgcagcgcgggtgcttgaactctcggcacaatggggcacggagtggcctccattggggctctgctagtaatcctggccatctcctattgccaggcggagctaacgccaccatatttcaatctggccacgggcaggaagatttatgccacagctacgtgtggccaggatacggatggaccagagctctactgcaaactagtgggagccaatacggaacacgatcatatcgactattcagttatccagggacaggtctgcgattactgcgatcccacggtgccggagaggaatcatccgccagagaacgcgatcgatggcaccgaggcctggtggcagagtcctccgttgtccaggggcatgaaattcaatgaagtcaatttgaccatcaacttcgaacaggaattccatgtggcctatttgttcattcgcatgggcaactcccctcgtccgggtctctggacgctggagaagtccacggattatggcaagacctggacgccttggcagcacttttccgatacccccgccgattgtgagacgtactttggcaaggacacctacaagccaattacccgcgacgacgacgtcatctgcaccactgaatactcaaagattgtgccgctggagaacggcgagattcccgtgatgctgctcaatgagcgacccagttccaccaactacttcaactcaacggtgctgcaggaatggactcgtgccactaacgtcaggattcgtctgcttcgcaccaagaatcttttgggacatttgatgtctgtggctcgacaagatcccacggtgacgcgtcgctacttctactcgatcaaggacatctcgatcggaggaaggtgcatgtgcaatggacacgccgacacctgtgacgtcaaggacccgaagagcccagtccgcatcctcgcatgccgttgccagcatcacacgtgcggcatccagtgcaacgagtgctgtcctggattcgagcagaaaaagtggcgccaaaacaccaatgcccgaccattcaactgcgaaccctgcaactgtcatggtcacagcaacgagtgcaagtacgatgaggaagtgaaccgcaagggactgtccctggacattcacggacactacgatggtggtggtgtttgccagaactgtcagcacaataccgtgggaattaactgcaacaagtgcaagccgaaatactatagacccaagggcaagcactggaacgagaccgatgtctgcagcccctgccaatgcgactacttcttctccaccggacactgcgaggaggagaccggaaactgtgagtgccgtgctgccttccaaccgccaagttgcgactcctgcgcgtatggatactatggttaccccaattgccgggagtgcgaatgtaatctgaatggaaccaatggctaccactgcgaggctgaaagcggacagcagtgcccgtgcaagatcaatttcgcgggggcctactgtaagcagtgcgccgaaggatactacggattccccgagtgcaaggcatgcgagtgcaacaaaatcggctcgattaccaacgactgcaacgtgaccactggagagtgcaagtgcttgaccaatttcggaggcgacaactgcgagcgctgcaagcacggatacttcaactaccctacttgctcatactgcgactgcgacaaccagggcacggagtcggaaatctgcaacaagcagtctggccagtgcatctgtcgtgaaggttttggaggcccaagatgcgatcagtgcttgccaggattttacaactatccggactgcaagccatgcaactgctccagcacgggtagttcggcgatcacctgcgacaacacgggcaaatgtaactgcctcaacaactttgccgggaaacagtgcacgctctgtactgccggatactacagctatccggattgtctaccttgtcactgtgactctcacggatctcagggagtgtcctgtaattcagacggacagtgcttgtgtcagcccaactttgacggacgtcagtgcgattcctgtaaggagggcttctacaacttccccagctgcgaggactgcaactgtgatcctgcaggagtgatcgataagttcgccggatgcggatcggtgcccgtgggtgagctctgcaagtgcaaggagcgagtgacgggcaggatctgcaatgagtgcaagccattgtactggaacctgaacatcagcaatactgagggatgtgagatttgcgattgttggacagatggtactatttccgcactggacacctgtacctcgaagtccggacagtgtccctgcaagccgcatactcaaggcaggcgctgccaggagtgtcgggatggtaccttcgatctggacagtgcctcgctgtttggctgcaaggactgcagttgcgatgtgggcggctcgtggcaaagtgtttgcgacaagatcagcggacagtgtaagtgccacccgaggattacgggtctggcatgtacccagccactgaccacccacttcttcccaacgctgcatcagttccagtacgaatacgaggatggatcactaccatcgggcactcaggtgcgctacgactacgatgaggcggcattccccggatttagcagcaagggctatgtggtgttcaacgccattcagaacgatgtacggaacgaggtcaatgtctttaagtcatctctgtatcgtattgtcctgcgatatgtgaatccaaatgccgagaatgtcactgccaccatttcggttacttcagacaatcctctggaggttgatcagcacgttaaggttctactgcaacccacatcggaacctcagttcgtaactgttgcgggtcccttgggagtgaaaccctcagccattgttttggatccgggtcgttatgtatttaccaccaaggccaacaagaatgtgatgcttgattactttgttctcctacccgccgcttactacgaagccggaattctaacgcgccacatctcaaatccctgtgaactgggcaacatggagctgtgccgtcactacaagtacgcctctgtggaagtgttctcaccagcggcaactccattcgtcatcggtgaaaactccaagccgaccaatcccgtcgagacgtacactgatccggagcatctgcagattgtgagccatgtcggtgatattcccgtactgagcggatcccaaaatgagctgcactacatcgtggatgtgccacgaagtggccggtatatcttcgtgattgactacatcagcgataggaacttccccgacagttactatatcaacttaaaactaaaggataatccagattcggaaacatccgtgctgttgtatccatgcttatactcgactatttgccgaacatcagttaacgaggatggtatggagaagtcattctatattaacaaagaggatttgcagccagtcatcatctccgctgacatcgaagatggttctcgtttcccgattatctcggtgacagcaattcccgtcgaccaatggtccattgactacatcaacccaagtcccgtctgtgtgatccatgatcagcaatgcgccactccgaaattccgttccgttcccgattccaagaagatcgagttcgaaactgatcatgaggaccgtattgccaccaacaaacctccatatgcctcactcgatgaacgagttaagctggtccacttagacagtcaaaatgaagcaaccatcgtgattgaatcaaaggttgatgctacaaaaccgaatctatttgtgatcctggtgaagtactaccaaccgagccaccccaaataccaggtgtactacacgctgacagcgggcaagaaccagtacgatggcaagttcgacattcagcactgtccatcgagttccggatgccgcggtgtgatacgccccgccggagagggttcgttcgagattgacgacgagttcaagttcacgattacgaccgatcgatcccagagcgtttggctggactacctggtggtggttcccttgaagcagtacaatgatgacctactggtggaagagaccttcgaccagaccaaggagttcattcagaactgcggccatgaccacttccacataacccacaatgccagtgatttctgcaagaaatccgttttctctctaacagccgattacaatagtggagcattgccttgcaattgcgactacgccggatccacgagcttcgagtgtcatccgttcggaggtcagtgccagtgcaagccgaatgtgattgagcgcacgtgcggagcctgtcgcagtagatactacggattccccgactgcaagccatgcaagtgtcccaatagcgccatgtgtgagcccaccactggtgagtgcatgtgtccgcccaatgtcattggggatttgtgcgagaagtgcgcccccaacacctatggattccatcaggtcattggctgcgaggagtgtgcatgcaatcctatgggcattgccaatggaaactcccagtgcgatctgttcaatggaacctgcgagtgtcggcaaaatatcgagggcagggcctgtgatgtttgctccaatggatactttaacttcccgcactgcgagcagtgcagttgccacaagcccggcaccgaactggaggtgtgtgacaagatcgatggcgcatgcttctgcaagaagaatgtggttggaagggactgtgaccagtgtgtcgatggaacatacaatctgcaggagtcgaatccggatggttgcaccacttgcttctgctttggcaagacttcgcgatgcgacagtgcctatctcagagtttacaatgtgagcctgcttaagcatgtgtccatcactactccggaattccacgaggagagcatcaagtttgatatgtggcccgtacccgcggatgaaattcttctgaatgagaccacgctgaaggcagactttaccttacgggaggtcaacgatgaacgacctgcgtactttggggttctggactatctgcttaaccagaataatcacatctctgcttatggcggagacctggcttatactttacatttcacttctggcttcgacggcaaatacattgtggctccggatgtaattttgttcagtgaacacaatgccctggtccatacaagctatgagcagcccagccgaaatgaaccattcaccaaccgcgtcaatatagtggaatcgaatttccagacgatttccggaaaaccagtttcacgagctgatttcatgatggttctgcgggatctaaaagtaatctttatcagagccaactattgggaacagaccttggtgacccacctgtccgatgtgtatctaactctagccgatgaggatgcagatggcactggcgaataccagttcctggccgtggagcgttgctcctgcccacctggttactccggacactcgtgcgaggactgtgccccgggctactaccgagatcccagcggaccttatggtggttactgcattccctgcgagtgcaatggacattcggagacctgtgattgcgctaccggaatctgttcaaagtgccagcatggaacagagggtgatcactgtgagcgctgtgtgtccggttactatggaaacgccacgaatggaacacccggagattgtatgatctgcgcttgcccactgccatttgactcgaacaactttgccaccagttgcgaaatctccgagagcggagaccaaatccattgtgagtgcaagccaggatatacaggaccacgttgcgagtcttgcgccaatggtttctatggagagccagagagcataggacaggtgtgcaagccgtgcgagtgttccggtaacatcaatccagaggatcagggatcttgcgacactaggaccggtgaatgtcttcgctgcttgaataacaccttcggtgctgcctgtaatctgtgtgcacctggattctatggcgatgctatcaagctaaagaactgccagagctgcgactgcgatgatctgggcacccagacgtgtgatccctttgtgggcgtctgcacctgtcacgagaacgtcattggcgaccgttgcgatcgctgtaagccggatcactatggatttgagtcaggtgttgggtgccgagcctgcgactgcggtgctgcctccaattcaacgcagtgtgacccacacacaggtcactgtgcctgcaagtcgggagtgacaggacgacagtgcgatcgatgcgccgttgaccattggaaatacgaaaaggacggttgcactccgtgcaattgcaatcagggatactcacgaggattcggttgcaatcccaacaccggcaagtgccaatgtctgccaggagtaattggagatagatgcgacgcttgtccgaatcgatgggttctgatcaaggatgaaggctgtcaggagtgcaacaactgccaccacgcccttttggatgtcactgatcgaatgcgctatcagatcgatagtgtcctggaggactttaacagtgtaaccctggccttcttcaccagtcaaaaattgaactattacgaccagctggccgatgaactggagcccaaggttaagctattggatcccaacagcgtggacctgagtccatccaaaaaggccaacagcgaattggaatccgatgccaagtcctatgccaaacaggtcaaccagaccctggccaacgccttcgatatccgtgagcgatcgagcaccactttgggtaacataacagttgcttatgatgaggcggtcaagagtgccgaccaggccaaagaggccatcgcttcggtggaagctctttccaagaatctcgaggcggcagcgagcacaaagattgatgctgctctggagcaagcacagcacattttgggacaaatcaacggaaccagtatcgaacttacacccaatgaacaagtcctggaaaaggcgaggaaactctatgaagaagtgaacactctagttctgcccatcaaggcgcaaaacaagagcctcaatgccctcaagaatgatattggagaattcagcgaccatctggaagatcttttcaactggagcgaagcttcacaagccaagtccgctgacgttgagcgccgcaatgtggccaaccagaaggcctttgacaactctaaattcgacaccgtttcggagcaaaagctacaggcagagaagaacatcaaagatgctggcaatttcctcatcaatggcgatctgaccctgaatcaaattaatcagaagttggataacttgagagatgctctaaacgagctcaattcgttcaataaaaatgtggacgaagaattacccgtgagggaggaccagcataaggaggcggatgcccttaccgatcaagccgaacagaaggcggccgaattggccattaaggcccaagatctggctgcccaatacacggatatgaccgccagtgcggagccggccatcaaggccgcaactgcctactcgggaatcgttgaggccgttgaagctgcccagaaactcagtcaggatgcaatctctgcggccggaaatgccactgataagacagatggcattgaagagagagctcatctcgctgacactggatctactgatcttctccagagagcacgccagtctctgcagaaggtacaagacgacctagagccccgtctgaacgcttcggccggcaaggtgcagaaaatctcagccgtgaacaatgccaccgaacaccagctgaaggatattaacaagctgattgaccaactgccagctgagtcgcagagggatatgtggaagaattcaaatgccaatgccagtgatgctctggagatactgaagaacgtcctagagatactcgaacctgtgagtgtccaaacgccaaaggaactcgagaaggcacatggcatcaatagagatttggatctgaccaataaggacgtttctcaagctaacaaacaattggatgacgtagaaggatccgtttcgaagctaagcgaattggcagaggatatcgaggaacagcagcaccgtgtgggcagtcagagccggcagttgggccaggaaatcgagaacttgaaggcccaagtggaggctgctcgccagttggccaacagcatcaaggtgggcgtcaatttcaagccaagcacgatcctggaactgaagacaccggaaaagaccaagttgctagccactcgcaccaatctatcgacctatttccgcaccaccgagccatccggtttccttttatatctgggcaatgacaacaagaccgcccagaagaacaacgactttgtggccgttgagattgtgaatggctatccgattcttaccatagatttgggcaatgggccggaacgcatcaccagcgataagtacgtggcagatggtcgctggtatcaggctgttgtggatcgcatgggtccgaatgccaagctaacaattagggaagaactacccaacggtgacgtggttgagcacagcaagtctggctatcttgaaggatcccagaatatccttcatgtggataagaacagtcgcctatttgttggtggctatccgggtatttcggacttcaatgctccgccagacttgaccactaactccttctccggcgacattgaggatctaaagattggcgatgagagcgtaggattgtggaactttgtatatggcgatgataacgaccagggcgccagggagcgggatgtgctgctcgagaagaagaagccggtaactggtctgcggttcaagggtaatggatacgtccaactgaacgccacatcgaacttgaagagccgctccagcatccagttcagcttcaaggcagacaaggatacttccaatggactgctgttcttctacggcagggataagcactacatgagcattgagatgattgacggagctatcttcttcaacattagtttgggtgaaggtggaggcgttcaatccggcagccaggatcgctacaatgacaaccaatggcacaaggtccaggcggaaagggaaaaccgaaacggccttctcaaggtcgacgatatagtaatatcacggaccaatgctccattggaagcggacttggagttgcccaagctgaggagattatacttcggtggtcatccgagacgtctgaatacctcgataagtttgcaacccaactttgatggctgcatcgataatgttgtgatcaaccagggagtggtcgaccttacagaatacgtaactggcggcggagttgaggaaggatgctcggcgaagttctccacggtggtgtcatatgcgccgcatgagtacggattcctgaggatgaacaacgtttcctcagataacaatctgcatgtggttctgcacttcaagaccacgcaaccgaatggcgtactcttctatgccgccaatcatgaccagagttccaccattggcctcagcctacaagatggtttgctcaagctcaacagcatgggcagtcagttggtaatcgacgatcgtattctgaacgatggcgaggatcatgtggttacagttcagcacacccaaggtgaacttcgtcttacggtcgatgatgtagataacaagagacttggttctccacaaccattaatcctggagggtggtgacatcttctttgctggcttgccggacaactatcgaacaccgaggaacgcgttggcctctttggcctactttgtcggttgcatcagcgatgtaaccgtgaacgaggagatcattaactttgccaacagtgctgagaagaagaatggcaacatcaacggttgcccaccacatgtactagcctacgaaccaagtttggtgcccagttactacccaagtggagacaacgaggtggagtctccgtggtcaaacgccgatactctgcccccacttaagccagatattgaaagcacactaccgcccacaacgcccactacgaccaccacgacaactaccacaacaacatcgactactacaacttcaacaacgacaactactacgacaccatccccgatagtcattgatgaggagaaggagattgaggcgaaaacaccgcaaaagatcctaacaacgcggccaccagccaagctgaaccttcccagcgatgagcgctgcaagttgccggagcaacccaatttcgatgttgatttcacagaggcgggttaccgattctatggactgcgggagcagcgcctgcagattaactcactgccggtgaaggtacgccgtcaccatgacattggcatctcattccgtactgagcgaccaaacggtctgctcatttatgccggaagtaagcagcgcgatgacttcatagccgtgtatcttctggacggtcgggtgacatacgagatacgggtgggtgcacagttgcaggccaagatcactaccgaggcggagctgaacgacggcacctggcacaccgtggaggtggtgcggacccaacgcaaggtatccctgctcatcgacaagttggagcagccgggttccgtggatctgaatgcggaaagatccgctccggtattggctgtcgagttgcccatctatctgggcggagttaacaagttcctggagtcggaggttaagaatctcaccgatttcaagactgaagtaccgtactttaacggctgcctcaagaacatcaagttcgacgctatggatctggaaacaccaccggaggagtttggagtggttccgtgctctgagcaggtggaacgcggtttgttcttcaataaccagaaggcgtttgtaaagatctttgatcacttcgatgtgggcactgagatgaaaatcagcttcgatttccgaccgagggatcccaacggattgctcttctctgtgcacggcaagaactcttatgccatactcgagctagtagacaataccttgtactttaccgtgaagaccgatctgaagaacattgtgtccaccaactataagctgcccaacaacgaaagcttctgcgatggcaagacgcgcaatgttcaggccatcaaatccaagtttgtgatcaacatagccgtggatttcattagctccaaccccggcgtgggcaacgaaggatcagtgatcacaaggaccaatcgtccgctgttcttgggcggacatgtggccttccagagggccccgggcatcaagaccaagaagtcctttaagggctgcatcagcaaggtggaggttaaccaaaggatgatcaacatcacgccgaacatggtcgttggcgatatttggcagggctattgtcccctcaactaataaagaacttcggaacgacttaaggacctatgatttatttggacaacgactacgaaaaactgccaggaagaatcttcttttgccgacaactgctaatcaaaggacaacgaacgatcaaatttcaaacgaacaaaatcgacgggtcataaaaaagtcataaggtcttcaaagtaatagatccttagcaaagatgccagtcgtatatattcctagtactataagccaaactgcgtgccaattctattaaagccatttacatttatatatcctttttaaaactccttaagagaatcttgcatttttgtaattccaataaaccaataaaataaacattttaatgaaac

SEQ ID NO: 21654 - protein, 3712 aa, DROSOPHILA
MGHGVASIGALLVILAISYCQAELTPPYFNLATGRKIYATATCGQDTDGPELYCKLVGANTEHDHIDYSVIQGQVCDYCDPTVPERNHPPENAIDGTEAWWQSPPLSRGMKFNEVNLTINFEQEFHVAYLFIRMGNSPRPGLWTLEKSTDYGKTWTPWQHFSDTPADCETYFGKDTYKPITRDDDVICTTEYSKIVPLENGEIPVMLLNERPSSTNYFNSTVLQEWTRATNVRIRLLRTKNLLGHLMSVARQDPTVTRRYFYSIKDISIGGRCMCNGHADTCDVKDPKSPVRILACRCQHHTCGIQCNECCPGFEQKKWRQNTNARPFNCEPCNCHGHSNECKYDEEVNRKGLSLDIHGHYDGGGVCQNCQHNTVGINCNKCKPKYYRPKGKHWNETDVCSPCQCDYFFSTGHCEEETGNCECRAAFQPPSCDSCAYGYYGYPNCRECECNLNGTNGYHCEAESGQQCPCKINFAGAYCKQCAEGYYGFPECKACECNKIGSITNDCNVTTGECKCLTNFGGDNCERCKHGYFNYPTCSYCDCDNQGTESEICNKQSGQCICREGFGGPRCDQCLPGFYNYPDCKPCNCSSTGSSAITCDNTGKCNCLNNFAGKQCTLCTAGYYSYPDCLPCHCDSHGSQGVSCNSDGQCLCQPNFDGRQCDSCKEGFYNFPSCEDCNCDPAGVIDKFAGCGSVPVGELCKCKERVTGRICNECKPLYWNLNISNTEGCEICDCWTDGTISALDTCTSKSGQCPCKPHTQGRRCQECRDGTFDLDSASLFGCKDCSCDVGGSWQSVCDKISGQCKCHPRITGLACTQPLTTHFFPTLHQFQYEYEDGSLPSGTQVRYDYDEAAFPGFSSKGYVVFNAIQNDVRNEVNVFKSSLYRIVLRYVNPNAENVTATISVTSDNPLEVDQHVKVLLQPTSEPQFVTVAGPLGVKPSAIVLDPGRYVFTTKANKNVMLDYFVLLPAAYYEAGILTRHISNPCELGNMELCRHYKYASVEVFSPAATPFVIGENSKPTNPVETYTDPEHLQIVSHVGDIPVLSGSQNELHYIVDVPRSGRYIFVIDYISDRNFPDSYYINLKLKDNPDSETSVLLYPCLYSTICRTSVNEDGMEKSFYINKEDLQPVIISADIEDGSRFPIISVTAIPVDQWSIDYINPSPVCVIHDQQCATPKFRSVPDSKKIEFETDHEDRIATNKPPYASLDERVKLVHLDSQNEATIVIESKVDATKPNLFVILVKYYQPSHPKYQVYYTLTAGKNQYDGKFDIQHCPSSSGCRGVIRPAGEGSFEIDDEFKFTITTDRSQSVWLDYLVVVPLKQYNDDLLVEETFDQTKEFIQNCGHDHFHITHNASDFCKKSVFSLTADYNSGALPCNCDYAGSTSFECHPFGGQCQCKPNVIERTCGACRSRYYGFPDCKPCKCPNSAMCEPTTGECMCPPNVIGDLCEKCAPNTYGFHQVIGCEECACNPMGIANGNSQCDLFNGTCECRQNIEGRACDVCSNGYFNFPHCEQCSCHKPGTELEVCDKIDGACFCKKNVVGRDCDQCVDGTYNLQESNPDGCTTCFCFGKTSRCDSAYLRVYNVSLLKHVSITTPEFHEESIKFDMWPVPADEILLNETTLKADFTLREVNDERPAYFGVLDYLLNQNNHISAYGGDLAYTLHFTSGFDGKYIVAPDVILFSEHNALVHTSYEQPSRNEPFTNRVNIVESNFQTISGKPVSRADFMMVLRDLKVIFIRANYWEQTLVTHLSDVYLTLADEDADGTGEYQFLAVERCSCPPGYSGHSCEDCAPGYYRDPSGPYGGYCIPCECNGHSETCDCATGICSKCQHGTEGDHCERCVSGYYGNATNGTPGDCMICACPLPFDSNNFATSCEISESGDQIHCECKPGYTGPRCESCANGFYGEPESIGQVCKPCECSGNINPEDQGSCDTRTGECLRCLNNTFGAACNLCAPGFYGDAIKLKNCQSCDCDDLGTQTCDPFVGVCTCHENVIGDRCDRCKPDHYGFESGVGCRACDCGAASNSTQCDPHTGHCACKSGVTGRQCDRCAVDHWKYEKDGCTPCNCNQGYSRGFGCNPNTGKCQCLPGVIGDRCDACPNRWVLIKDEGCQECNNCHHALLDVTDRMRYQIDSVLEDFNSVTLAFFTSQKLNYYDQLADELEPKVKLLDPNSVDLSPSKKANSELESDAKSYAKQVNQTLANAFDIRERSSTTLGNITVAYDEAVKSADQAKEAIASVEALSKNLEAAASTKIDAALEQAQHILGQINGTSIELTPNEQVLEKARKLYEEVNTLVLPIKAQNKSLNALKNDIGEFSDHLEDLFNWSEASQAKSADVERRNVANQKAFDNSKFDTVSEQKLQAEKNIKDAGNFLINGDLTLNQINQKLDNLRDALNELNSFNKNVDEELPVREDQHKEADALTDQAEQKAAELAIKAQDLAAQYTDMTASAEPAIKAATAYSGIVEAVEAAQKLSQDAISAAGNATDKTDGIEERAHLADTGSTDLLQRARQSLQKVQDDLEPRLNASAGKVQKISAVNNATEHQLKDINKLIDQLPAESQRDMWKNSNANASDALEILKNVLEILEPVSVQTPKELEKAHGINRDLDLTNKDVSQANKQLDDVEGSVSKLSELAEDIEEQQHRVGSQSRQLGQEIENLKAQVEAARQLANSIKVGVNFKPSTILELKTPEKTKLLATRTNLSTYFRTTEPSGFLLYLGNDNKTAQKNNDFVAVEIVNGYPILTIDLGNGPERITSDKYVADGRWYQAVVDRMGPNAKLTIREELPNGDVVEHSKSGYLEGSQNILHVDKNSRLFVGGYPGISDFNAPPDLTTNSFSGDIEDLKIGDESVGLWNFVYGDDNDQGARERDVLLEKKKPVTGLRFKGNGYVQLNATSNLKSRSSIQFSFKADKDTSNGLLFFYGRDKHYMSIEMIDGAIFFNISLGEGGGVQSGSQDRYNDNQWHKVQAERENRNGLLKVDDIVISRTNAPLEADLELPKLRRLYFGGHPRRLNTSISLQPNFDGCIDNVVINQGVVDLTEYVTGGGVEEGCSAKFSTVVSYAPHEYGFLRMNNVSSDNNLHVVLHFKTTQPNGVLFYAANHDQSSTIGLSLQDGLLKLNSMGSQLVIDDRILNDGEDHVVTVQHTQGELRLTVDDVDNKRLGSPQPLILEGGDIFFAGLPDNYRTPRNALASLAYFVGCISDVTVNEEIINFANSAEKKNGNINGCPPHVLAYEPSLVPSYYPSGDNEVESPWSNADTLPPLKPDIESTLPPTTPTTTTTTTTTTTSTTTTSTTTTTTTPSPIVIDEEKEIEAKTPQKILTTRPPAKLNLPSDERCKLPEQPNFDVDFTEAGYRFYGLREQRLQINSLPVKVRRHHDIGISFRTERPNGLLIYAGSKQRDDFIAVYLLDGRVTYEIRVGAQLQAKITTEAELNDGTWHTVEVVRTQRKVSLLIDKLEQPGSVDLNAERSAPVLAVELPIYLGGVNKFLESEVKNLTDFKTEVPYFNGCLKNIKFDAMDLETPPEEFGVVPCSEQVERGLFFNNQKAFVKIFDHFDVGTEMKISFDFRPRDPNGLLFSVHGKNSYAILELVDNTLYFTVKTDLKNIVSTNYKLPNNESFCDGKTRNVQAIKSKFVINIAVDFISSNPGVGNEGSVITRTNRPLFLGGHVAFQRAPGIKTKKSFKGCISKVEVNQRMINITPNMVVGDIWQGYCPLN

SEQ ID NO: 21655 - DNA, 7546 bp, DROSOPHILA
gggatcccgacaggtggacgaggccctgctcacccagttgcaacgcgggtgggttgaatgttccatttgctatataccctttttgccttaggctgctaaatatttcacaaaaccatacagaatacagctttctaatcagtggtgttaaacgtaacaaacattatcaataataatttattcactatctatgtgaatttctgactggaaattagttgcgtgttacgaaagacctatgttaagaaggtaaagatactttatttaatttctatttcgaattaacagaatccatgtgatacccatgcgacctgtgagtcccgaggggccaagggttatcatctcgcagttccgaaacatcgatcccaagaaatcgaatccccgcgaagccttcaaactgatcttcataatgttggaactattggctttggagtgcgataatgccgcgatttccggcttgatctgggttgtggatgccagagatgttaccatggagcagatgatgcagtacgatcccttcctgctgaagaaggcatttgctctggtggaccaatgcataccactgcgatttgttgagattcatatgatcaatatgcgcaaggagggacaaaccatattcaattttgtaacgaagtttttgccctccaaactgcctttcaaggtgaatctatcatcaaaaagcttgaattgcgttaggattggtaattaatctctacaatattctacacagttcgtggtccacaaaaagtcggaggatctgtaccagcacctgcccagagatgtgatgaccatcgagtatggtggcaccaatggctatcaggcagaggcagtggatcattggcgccagaagctgctggacagcaaggattatctggccaaggatgcccagtatggtactaatgagaaactgcgcgtcggattggccagtgcctgggccaatggagaactggacgggatgagcggttccttccgcaaattggagctagattaagtaagacgactctagttgctgttttgaattaccatttaattaagttctaatgctatacaaataatttaaggcctattcgggtcactgggtatctcgtgtatcctcttaaaaatagctttacaattgcctaaggtgctgatacttaagtgctaagtgctgcacttccgtttgaagttcacgtgcagagaagtgggtgcagttgctccggatgagggcggcgattgggtatctgaagcggagggcgtggccttattttgaatgggactcgtggtgctcttattgatgctctgaacaatcagatttagacagtccaaactggagccattggcattgccatcaaagtctatacaaaaatattttagataaatacatcaaatacttttttttttttacttttacctgtaaactgaccatatttctccatatgtttgttgtaaaaactaagtttatcttctagataagcgccagcataggagctctgcaaggaaaaacataaataaatacaaatggaaaaatcatatattttttttttagttggcctcaagcgaaattggggaaacaataaattacagaaaagtgtcgccgtcgaaatgacaacgtcaaatttgctccggtcctgtcaacttggccaacgagtgccatacagaatgcagtctaatgatgagattaagccaaaatttatgccagtaaagagattccacaggccaattaaaacgcattgaaccaccgcaccacacccattgtctgccccaacattgtggggcattgtgtgcagtgcactttagaggcaattaaattaattttgcgcatacgcagacgacagacaaggcatccggagattcggtcgggatttcattagaaaaattcgctataacgccgatgctaagcaaattataattgccacttctgggtgggtttccttgctgccccccccccccccccaaatccgcatctggtgcatccaaagtgccgtcacttcgtctgcaaggatcgacaaatacagggcatcccgtatggcttatatgtatgtacgtctgtttatatttagcggacaacaaagtacggagtgataaaacaacagaatagcattcaaagccgagtgaagtgaactaaactgaacgagagcagatgaactcacactgcacttttataaagcgatttatcatttttttcaagcgtttagtgacagcctgcgctcgatatgccgcagtcagcaagcggatacactgggaaaaattacacaaaaatagcacaactgggttaaaagcaataaagtctatttatatgacaatataataccgaatattgaaaaatttctttggaaataaattctcaatttaacaagcatgttcgaaatatatttttagacatgcccgacttctttctgtgtacttgtttgcaggtctttatggtatttcggtgtattttattttatttttttttttttgagcatatatcatgcgttgtatctgaatgaaatgccacttatcacttgggcattccgattcttcggttgcgtaaagattttaagccgctttttggcgcgttccccttagatgttctcctccgatctgtgagcgtgtaacggatatgcggcattatgcgatttgttagccataagttgcatgagtttttaccatgaaatatgcttttaatatactaaacccactttaaaaatattgccacttctctgcgagttgtgcggtcagtcgtaagatctcataatccatttcggaaatatcaccgaaaaaatgcaagaactacttgccagatatgtatttacatttttaataagatgcaaataatgttgatgtttattttcggaattatttaatcaatctttctcggaaactgaaaaagttactttttgaaacggggacgtgtgataaagattatcagtggtggttagaccataaaaatcacaccaattatctcttctcaataatttgcaatatcatttataaactgctttccattcgtagaaaatatctaatagtgtagctgtaaagctattcaaagataacaaaagttttcggtagcatatctgtacctgataatagtttaaaaactgaatggtagggaatccgatcaatcctgactcactgtccaaatggatggtttgcacccacgttacccacatctttccgtgagtcatttgcaccgaaaagctctatcttaagacttcaatgattgcggctatgtatttcattacgtagaaatttgactgatatagacaaggtggcacttttgtatatcgcaagtactacactttattggcggcgataaggaaatttatgggccaacttagcgttcgcatttcgtgttggaaacagttcaaaaggaaatcttttacttaagtcgccgaggtttataaatacacgggctccaaatgaatggatatggatgagatggatggattgccagggtctgagatgcatttgaatgtctgcacgtttggcgctatgccagtttttaatcaaactatggccgcacattaatatctgccaatggggggcgcagtcaacatacaaatacgctaagttttatggtaaattaacaaatttgtacattaaaattgtgagaaacttaaacaaactgcatggaaattactcagcgcaggccaacccgaaagtcaaatgaaaatgaaaagaaaagagggcgttgaagatgatggcaaaaatgtttgcataattgttgacaatttgttgccctgtcattcgggagtagatatgcatgtacaacccgctcccgtccccccccccccatttttcattcattttcatttcccttcaatgaccaacgacttggccatatcttgcaacacctttcgaagaagaacaccccgagatcttgtcatgtttttcctgtgcaatttgtcaactgccacaacggttttggttccacgtcgcagggaagctattatgaaacagaaaagcgatcgtcgcaatccaccaaacatggggatgaagattctggtgccgattcctgctccaacgaatttgttgtaattaatttacaacacgatttccattcgggcttataaaaagaaaatttatttattgcctttcactaaatgcagacaacgaccctttcccctgtaaattctcctaaattctccagctatttttcctctaaattttttttcccccgttcctttgataaaagtttgctcccctcacatctgggcaaactttctcgatcataactcataatattcccggttttcgagtgaatgtgattcagaaatgtggatgatgggctgccggcgtagcttattaagtagcacgtcagcgagcgcataaattccggtcagcagatacaacagatatcagatacagtttggggactgactctttcggggatccgtccgtatacatattctattttcatgttcgccattgcgacggaccagaccctgagattttgatgaatgtgcgcgtcgccaaagaaaaatgtacgaaagcgctgctcatgcatgagaattttacgagaaaataattgcggaacgatatacgcgccgatattgtgggcttaatattaattggcggttagtggacaaaacttaccagataatcggactggcagcttttgccgctcaaactgggcgccaggttgtcgccatcgcgtgtggtactggattcctaagataatcaatttaaccaatggtattctctattcgcggtgagatgagttcactcatttacctgtagcagatcctccaggctctcgatatactcgatggcattgcgcaatatctcaaccttcggcaggcgctggttgggattggatgaagtgcgtcgcttgaggatctcgaaggcctcgttaacctagaatgtgaacggaataataatcaattaatggccatcgttgaaatcatggaaatccattaggcgtgccataaaaacacagaacacgcggcgtgttccccttttaagtggctctttaataaaacatattttaaattaaatagagcataaaattttcaacaattaagccgttcgcccgtcgtctgtctctttatgacagccccccatcaccataccccttctaaccggagctcccacgattttccgcctttcactaatgtctctatgtggagctataaatacgtgtggttcatccaaaacttttacgaccgtcgaactcataaatgccgctgtttaactcttggtcttggcaaatgtttatgttttacgcatgttgggtggtttccctttctgcgcgttatgtcaatggatccgatcctccctggtggcgatgtgttaatttgtggggtgctagccgagctaatgaaattactacaaagttgcagtccttaaacgcaggggacttgcgaactgtggcgtaatctatttttaagatcgaccgaggattaataagcctgctgatggaaaaggactcttgaacagagttctgagtggtatgcctatattcaagtccccataagcagttttaagttattattataataatgaattgaatgaatcaaaaatctacttttaaagtgaaccattcttttaatgaatgattgaaagatgaaagtgctgtatttgtatcagtagttattgcacaatatgtttttaatatttgataaatctgaaaatgtgtgtaatgtgagcatgggatgcctacctttcgcagtctccggcgttccctcatagtggccgctttccgacggtccacggtgacgctcttctttttgcacgccttgcaggcccaggtgaggcatggtctggaggattgggcggaggagcagacgaggggcgccaggacgtgctcctcggagctgagactgctgttctcgtcatcgtagtcggtggtgtagatgggcgacggtgtcatattcatgcccaatggcttgtccagctcaaccggattatgattcgcatgactgtagttgcaagacgaacccgatccgttggctgagatggaagccgctccaccatttcccgcactcgcatcaccgacggcattgaagcggctaaagaaattctgcagtgtctggtgtggattctggccgggatgggctatcggattctgttggctataggcgctaaatccgtatccaggatgtgtcggctgaccatagccattgtggtactcctgcttgatggtttgagccgcaggcatttcactgctgccactattatacttggtcatttttcacttcactacgattttgttatattttacaaaacaattttggtagttcaacaagttgctgaatttaattgctgatactaattacgatggcacagttaatttagtcagttgattattaccatttttaacgtggtttaagctctttttctaggtatgctaggtcattaacacaaatttatgagttatggttacacacaagttttaggctgtggtttctatttaatttaatttgttatagtttcactttcgggatttttaaaatagaaccttaattagttggttacactttaatgatgctttgtaaaaacctccgacattttcaaaaatatttttcgacttcgatttgcggaccgtacgcgagtgtgtgtaccgccttccgtcgcaatcgcaacacatttggtgacaatatccaagaatccaagatatcgtgggcccccagatgtgctcgcgatcctctcggagtgcggatgctgctgcgttttgagtggctgagtggctctcgagtggttcctatttttagaggcgccccgccattagacgacattggcggttctctaaggcagaaggacgctgccgcaggccacgcccctccccttttttttttaattttcgtgagttttcaacgcgattttccgctcaatgtgaagcgtgtttgtgaaaggcttagttcaaatcaaataaattgaattttacctggccagcgattagtgtgggttggtgggggaggtggtggcataaattagctttcggggagctcaacaattcgttaatgtgacacatttagtggaaaatccggccccccgtccacagatcccatcaatggcagccacttttctattgagttatagttgcaacggccgagaaaaaagcgagaaattgagcaaaaaaataaataaaataggagaggccgaaataaaaatagtcaaagaattgtgtttatttatcgctgctcaggcacaatatatatctttggaaatcacctttaaatcttccccagcgatattgtaaatcttttgtcttaggaccgtggtttgctcgagcactttccatcttcatttttccacttttcccttctcgtctttttccatttcgtattttctcctcacattttccatcttgccgtactttgatggatgctttgttttgattcggtctgatggtattttggtggcaaagactatttgttgtgccacacgataatcccaattgtaaatttaatcattatcggcctttgttttcgggcagtgtactgtcaacgcacaaatgtaactcagaaaagaacgtttaaaaaatcaaaatcattaagtaaattcgatttattgtgttattaatttaatcaaataaataaaatacatattaaaactcattcttatgtgcatatttgattttactggctac

SEQ ID NO: 21656 - DNA, 1534 bp, DROSOPHILA
aaatgtgttgcgattgcgacggaaggcggtacacacactcgcgtacggtccgcaaatcgaagtcgaaaaatatttttgaaaatgtcggaggtttttacaaagcatcattaaagtgtaaccaactaattaaggttctattttaaaaatcccgaaagtgaaactataacaaattaaattaaatagaaaccacagcctaaaacttgtgtgtaaccataactcataaatttgtgttaatgacctagcatacctagaaaaagagcttaaaccacgttaaaaatggtaataatcaactgactaaattaactgtgccatcgtaattagtatcagcaattaaattcagcaacttgttgaactaccaaaattgttttgtaaaatataacaaaatcgtagtgaagtgaaaaatgaccaagtataatagtggcagcagtgaaatgcctgcggctcaaaccatcaagcaggagtaccacaatggctatggtcagccgacacatcctggatacggatttagcgcctatagccaacagaatccgatagcccatcccggccagaatccacaccagacactgcagaatttctttagccgcttcaatgccgtcggtgatgcgagtgcgggaaatggtggagcggcttccatctcagccaacggatcgggttcgtcttgcaactacagtcatgcgaatcataatccggttgagctggacaagccattgggcatgaatatgacaccgtcgcccatctacaccaccgactacgatgacgagaacagcagtctcagctccgaggagcacgtcctggcgcccctcgtctgctcctccgcccaatcctccagaccatgcctcacctgggcctgcaaggcgtgcaaaaagaagagcgtcaccgtggaccgtcggaaagcggccactatgagggaacgccggagactgcgaaaggttaacgaggccttcgagatcctcaagcgacgcacttcatccaatcccaaccagcgcctgccgaaggttgagatattgcgcaatgccatcgagtatatcgagagcctggaggatctgctacaggaatccagtaccacacgcgatggcgacaacctggcgcccagtttgagcggcaaaagctgccagtccgattatctgagctcctatgctggcgcttatctagaagataaacttagtttttacaacaaacatatggagaaatatggtcagtttacagactttgatggcaatgccaatggctccagtttggactgtctaaatctgattgttcagagcatcaataagagcaccacgagtcccattcaaaataaggccacgccctccgcttcagatacccaatcgccgccctcatccggagcaactgcacccacttctctgcacgtgaacttcaaacggaagtgcagcacttagcacttaagtatcagcaccttaggcaattgtaaagctatttttaagaggatacacgagatacccagtgacccgaataggccttaaattatttgtatagcattagaacttaattaaatggtaattcaaaacagcaa

SEQ ID NO: 21657 - protein, 332 aa, DROSOPHILA
MTKYNSGSSEMPAAQTIKQEYHNGYGQPTHPGYGFSAYSQQNPIAHPGQNPHQTLQNFFSRFNAVGDASAGNGGAASISANGSGSSCNYSHANHNPVELDKPLGMNMTPSPIYTTDYDDENSSLSSEEHVLAPLVCSSAQSSRPCLTWACKACKKKSVTVDRRKAATMRERRRLRKVNEAFEILKRRTSSNPNQRLPKVEILRNAIEYIESLEDLLQESSTTRDGDNLAPSLSGKSCQSDYLSSYAGAYLEDKLSFYNKHMEKYGQFTDFDGNANGSSLDCLNLIVQSINKSTTSPIQNKATPSASDTQSPPSSGATAPTSLHVNFKRKCST

SEQ ID NO: 21658 - DNA, 2997 bp, DROSOPHILA
ttcaacgcgcacacaaacacgcaccgcactcatttcgggcgaaactattttgacagcagttgcgggctgtaaacacggaggaaactcccgcagccttgcaaaaagacgacaaaaaaagtcctttgcccggataccaaacacaatccgaactgtgcgctccggcgccttgaaacaaactgattcctgttgctgttcctgccagcaacaaaataatgaagaaaaaaatagaaacaaaaagaaccacagcatcctctcgcctggagggccaccataccacacatactcgtatctctctgaatccgagactgagcatctcgcaggacctccaatccgctcgtcctgcgcagtgcatctttcggagttcgagaccttttgcggcctggccttgccccttgcaatctgactctgactctgttgactccgtgactctgaatctgaatctgaacaggaatctgaggaggaatctgatgccatagagccactctagggttgccgtcgtgtgggtcgcgtccttcatcattaaagtcgcatttggttctcgttctggttttggtcctgcaccggcagccttctgcggcggcagtttatcatgttctgcggattaccccagaaacgagaataattgcactttaattttagaacaatgaaaaattatgaatggccctcggctaggctgcagactcattcctcaagttgcctccgcatttgaaggcgctagagacctggaaaattaccgggctttattgttttttcttttgtttttttgctttcgcgcggcggccttagttgttcaaagtttgaatttgaattggaggggagacggttggttattaactgaaatgaatgacggctacttgggaaatcggatagcccaataaatcagaaggaaagtggcttaataaaacacttattaataggatttctgcctcgttagtaaaacaaacagcttgattgtgtgacatttataaagcaatttgttattcatttttttttttaggtaatgaaatctctggagccacacatcaatgttgttcatttgttgggctgctgcacggacaaggatcccacatttgtgattctggagtacgtgaatcggggaaaactgcaaacgtacctacgcagctcacgcgccgaaaggtaggcaataattcttataaatattaaaaacaaattaatttaatttccatttttataggcactatggaaacactcatggaaagtcaaatgtactaacgtcctgcgacctaacatcctttatgtatcaagtagctaagggcatggactacctaacatctcgaggagtaagttgactaggaaaatctaagtgctatctaatttatatatatgtaattccctatccagattatccatcgtgacttggctgctcgaaatattctcataaccgatgatcacacttgcaaagttgcggactttggcttcgcacgagatgtaatcacctcgaagatttatgaaagaaaaagcgagggcaagctgcccatcaggtaataaatatttcaataaatcattataagcaaaagtgttcaagcaaagccctgatttttcagatggatggctacagagtcgctatacgacaatatattctccgtaaagtcggatatctggagcttcggcatactgatgtgggaaattgtgacgctgggatcgacgccctaccctggcatatcagcagcagatgtgatgcgaaaggtatgcataaaaaataaaaataaatttattgtatatatggaataaatgtaattaatttttttcaggtgagggatggatatcgtctggagaagcccgagcactgtcgtcgggagctgtacaacataatgtactactgctggtcccacgatccccaggagcgtcctctattcgcggaaataatccaaatgctcgacaagctgctgcacacggaaatggattatatcgaactcgagcggtttcccgatcacaactactacaatatcgttagtcttagtggtgaaaagttgtagtagggtggcccccaatgcactgaacccgaaccccaagagctttattacctccaaacgactttgggacatctggttccagtaagttgatactcttacttgaatttgcatacagagagaaggtttacactgccattacgagtcgcactgcaaataaatgtatcttttggatatttgacacgtcgaaatgccaaagtgtttagcactatctttgagtttcggttgagcgatatactccaatgcaaaggccgttgtaattcctcttaaactctaagttgattgcattgtttgcgttcacgttttatttatttgacttgtattatgtacttaatttatcaaccgtgtatagaagttatactatatgtaatttatattattgttaaaccgaaaataaaccataaatatacacctaaaagcgtcattttttccacatccttaaactccctttcatatccttaaacattcatcaacctaagccgaattcgttgacgcatagttatttagagacttattggcatggcaaactttgcagctccggcgaactgagtacgtgcataaatgatgccgatggcgtcaaaagctgacgaagctgatacctaaaagactgactacgtgacgtgcatccagaaatttagcatactcgcattaaacatatcgatttctgctcactgcggcaacgaaccattcttatatagcagccatataatggctttcgaatcgcatctatttaaatctttagttattagtcagcataaaatgcaacaggttggcattgcatcaaaaacacattaaaggctctattcgggtcgccatttaagccctttaaagtggcttgcaaaatacgcaaactgggagtggaaaggagtagttcatttgggtgcgattctatttttattaccgagcagcaacagcaacagactaattgcgggttaaaactgagcacggcttttatatgttccaagaatccgtggcacaatacggcgcatggtccgctcttctggag

SEQ ID NO: 21659 - DNA, 750 bp, DROSOPHILA
atgaaatctctggagccacacatcaatgttgttcatttgttgggctgctgcacggacaaggatcccacatttgtgattctggagtacgtgaatcggggaaaactgcaaacgtacctacgcagctcacgcgccgaaaggcactatggaaacactcatggaaagtcaaatgtactaacgtcctgcgacctaacatcctttatgtatcaagtagctaagggcatggactacctaacatctcgaggaattatccatcgtgacttggctgctcgaaatattctcataaccgatgatcacacttgcaaagttgcggactttggcttcgcacgagatgtaatcacctcgaagatttatgaaagaaaaagcgagggcaagctgcccatcagatggatggctacagagtcgctatacgacaatatattctccgtaaagtcggatatctggagcttcggcatactgatgtgggaaattgtgacgctgggatcgacgccctaccctggcatatcagcagcagatgtgatgcgaaaggtgagggatggatatcgtctggagaagcccgagcactgtcgtcgggagctgtacaacataatgtactactgctggtcccacgatccccaggagcgtcctctattcgcggaaataatccaaatgctcgacaagctgctgcacacggaaatggattatatcgaactcgagcggtttcccgatcacaactactacaatatcgttagtcttagtggtgaaaagttgtag

SEQ ID NO: 21660 - protein, 249 aa, DROSOPHILA
MKSLEPHINVVHLLGCCTDKDPTFVILEYVNRGKLQTYLRSSRAERHYGNTHGKSNVLTSCDLTSFMYQVAKGMDYLTSRGIIHRDLAARNILITDDHTCKVADFGFARDVITSKIYERKSEGKLPIRWMATESLYDNIFSVKSDIWSFGILMWEIVTLGSTPYPGISAADVMRKVRDGYRLEKPEHCRRELYNIMYYCWSHDPQERPLFAEIIQMLDKLLHTEMDYIELERFPDHNYYNIVSLSGEKL
